United States Patent Application Publication US 2014/0057251 A1 - sequence listing, part 155

SEQ ID NO: 300350 - DNA, 3784 bp, Cannabis indica
atgaaaatcaacttaaatattaattttctatttaattaaatatcattagaaaaatacttcaagcaaatagaaaataactatctagacttttattgactaattaattcattttctaattgtaatatattttaattcatttatttcaatcaatcatttatatgaaaaaatcattgatttaagttggtccaaaattaattaataaaaaataatttccaactttaatctatttttcaaaaaaaaaaaatcaaaattttctgcatttaaataaaaaaatgcaatttcggaaaatggttaataaaatatatattgaaaaattattcaaatttaagttgttctgaaattaagatttccaacttaaaatattctttatttaagttggttcaaaattaattaaaataaaaatattacctattttccattgaagctcaaaaccaaagcttccttcctccaaaaaaaaaaaccgatttttcccccaaaaatgccttcgcatcagaaatcttcatcttcctcttcttcttcatcttcatccctatctctttcgtctaaaaaagaagccattttcatattctcattggtggttctctggtactcatccaacatcggtgttcttctcctcaacaaattcttactctccaactatggcttccgattcccaatcttcctgacaatgtgccacatgtcagcttgtgccatcctcagttacttctcaattattttcctaaagatcgttccttttcagatgatcaaatctcgttctcagtttctaaagatcgcaactttgagtgtcgttttttgtgcctctgttgttggtggaaacatttctcttaggtatcttgctgtgtcgtttaatcaggctgttggtgcaacgacgccgtttttcactgccctttttgcttattttgttacctttaagagagaagcttggcttacctatggtgctctggttcctgttgttactggggttgtcattgccagtggggtaagcccaattgtcaattatatatatatatatgtatatctatatatgtatatgtgtgtgtataaatttggaaactttcttatctggggtgtgatattttgggataaagtttacttttttaaggaaattggagatctgtaatatgtatatattagtgtttttatgagttatgagttttgttttctgaatttctgagatctgttgtttgttgggtttgaatttttttgttggtaattatatgtgtttgaggtgaaagattgagactttggtgtaaagctatgtaattttggacaattgttgttcttttgtagaaaattctaagaacttgtttgttattgtattttttgtaattcatgttttataataacttaataatgtaaataataatctttggctaaatttgtagtgagataatgatgcataatgttattgctgagctgaagaatcaaataaattgtttgcaggtttgataattaggattaagtcttcaagtttatttgtataaagtattgttttaatcctaagcaaacttgctacttactaagggtcttaccaaaagattttatgcacatatgagtttggcattagttttcattgtgacattgttatatctatttttttatgctttgtgaactagacataattcttgagcttgttcccttaaattaacttgtaaacaatgctcaatttcaaatgatttttgtcatggcgtttgttattatgtttttcgacctgcattgcttcgtgtttcagttaaactataataacaatttcatatttggtgagatagggcgagccgggatttcacttgtttggcttcataatgtgcctaagtgcaactgctgcaagggcctttaagtctgttcttcaaggcattctactttcttccgaagggtgaatcttctatcttcttttttcttttcattatgtaaatatttatatatatttctgtatgttcttagtagattagtcttgtctccgcaacttaatcttcgtaaaatgcagttatttaacattaagatctacaatactgtgatcttcaggggacatgatttggtacatggacaatcacgttaggcatctgttagtaaaaaatttttaggggtcacgatttgatacttgtcaacattcggggaaattttaactgatctaacacaagtaaattttagataattcttgtcctagtttttggccacattactcatttatgagaattcacttgtgtgtctatgcaagtgaaaacatttcttcttattgtaaattacaaattttgtttccaacaaaatgcagctgatttattttcttgttttggtattttctcactggtttttgaatatcataaacttgcagggagaagctaaactcaatgaatttgatgctctatatgtccccaatcgccgttctagttctattgccagcgtcgcttataatggagccgagggttatagagcaaacattaaaccttggaagggaagataaattcatgtggttacttcttcttgtcaactcagtattagcatattcagctaatttgtcaaatttcttggttacaaaacatacaagtcctctaacactccaggtttcctttccttcttttaccttacactttaaatttccgatattttcgcactttcaagtgactaaaaagaaggttctaaggattcacaatcagtaaattggcctgttaaagtacccctatagtgttatgaaaatagttcatatctaattttcatgctaaatttattttaaagagctcagatttaggacggccctgagattgagtgagtcttaggaaaaacgaaaaattattagaccctttactaaaagaaaatatatttttggggctcctgcttttcgatgtctcattaaaaaccaacaatcatttcatttctgtttttcggtttttcattgtaactttcctttttcgagctgataccattgcgtgatcaggtattaggcaacgcaaaaggagccgtggccgtagttatttccatacttctattcagaaatccggtgactgtcgttggcattggcgggtatacaattactgtcatgggagttgttgcgtatggagaagcgaaaaggaggtttagatgagtaaagctcctgcattaaccaagtcttaactctggttttttcggtttagtgaattcatttgaagaggtagtgagattatttgcaactagtttcttggtgaaaattattccatttgagaagaaagaaaagagaaaatgtggttttgttgtatctattatttttatagttcaaaagaaacatatttatatgcttcttttgtaatacattgttatcatcctacataaaatatttcattgttaacatattagtaatgttattattgagaactctattcactaatataatttattattctaccaatatatttatgtgtttttgtaggcttaattttaactttaattcggtttgacataatctttatggaatcatcgttatagttttcatgtttagattttggttaccaaaactttgtaatgcataatacaattattgttactaaaggaattaagatcgcgttttgttaaaggtaataaaatggaatgaaaaagagaagaaataatcttattttattattttgtttggttgcatattaaagtattggaatgacatttccactattttggtgactattttggtggaatggttattctaatttaaaataaaaggaaagatcatcccaatgcaagatttgaaaaaattattaattttttttctgcattttaaatttatattccatccctattccaatttcatttctcattcatattc

SEQ ID NO: 300351 - DNA, 1999 bp, Cannabis indica
agttaagttttaaggtttaagggtagtttacgtttttttccgttttttttttttagttttttttttttttttgtaaaggaataaggatggtatactttattttttgtatataataataaaatttaaaaaaaaaaaatctaattaaaaattgatataattaacttaaatttttatagtgttaaatataatatataacaatataagttgagcttctatatggttaaggaattcatgcaagttttattgataaggtagcttaaccattaaaaagtaatgttattcgttaataaatattacattttaatatatgttatgtaacagttaatagtctgccagtatataggtataaaactatataattaaaagaatttaaatagattgatgggtactcatttttatacaaaaagatgtgcatcttatttttggtgacttatcacttgagatttccaaaattaagtgcatttaaccatgaaataatcttagaatacagtgtgaactcttaagaaagtttttcaaaaaaggtacgattaaaaacaaatcacaccaaaaatataaatcaaccaaaaaatatattgttaaaaacgtacgattagaatactgcgaatagtgttgctcattatttggcttgagcttcctattctgttgctgatcttgttatcagaagtaataatgttttttcataatgtaatcttaaaggattgcaattaataaagtgatgatttattttcaaaaaaatataaatcaaatgtgttacattggtttctatgtgtgtctgtcgtctatgtatgtaatgtatacatttataaatatatctattaattatatcatattgcttatattggtatgtaaactttatacttgtatctatgattggtagaaaaaaatcaccaaaaatgcagattcagattcttattttgtaatattttattttgtcagcggaatatgacctcagttttttgttcaaagattccttcaaaaaagttatatttatcaaaatttgatggacaatgaaataagcagctgtacagtaagaattttcagaaattagcatgatgagtgagttgattttttatttttaaaatttaaaaatgatatataattgatattaaaaaatcttgtgtgttgtagtgtaaaaacaaaaggaatcaactatcacagcactacttttttattttaattttatagagagggggtagacctaagatgataaggattcgaaatatatatcagtgagatttgtgtgtactataactattattactacaaggaccactatatatatacacacacatatataaaaatcagtagtagtacatattccctacacttttgccaaagtagtctctttcagccaatgatattcataatcatcacataaggctctttagtctttacttctctcttttcaactccttaggaaacaaactaaaaaaatcccaattaaggattaatcatgtcaactatatagaatagaacaatacaaaaatggatcaattggctttttacagcatattaattaattaattatttgattatcttgtgatgaaagccaatttggctatatatacttagtagtggtggtattattatttcttgttcttatcaatattgttcaagttttgcataagtattcttagtgaactgtattaggctaagaattgtataatagtgtgagaatcattagtatactatttgttatgtgtattgtataagaattaaaaacaaaaaaaaaatgctaatttggtttactaaatgcaacaggacataaaaagcaagagtattaatatatactttcactttgatatattatatcaaagtgagacttataattagttcttagttttttttttattatattatttattaattaaaatatatatagagttatattaaaatattctaacttctaagtaaagtatattactttttattactataattttttacttttagttactacaaaatttatgattaaaaataaaaaatttgtgactaatta

SEQ ID NO: 300352 - DNA, 2012 bp, Cannabis indica
tttgtgtgtgtctttgtatgtatcatcacagaaaataagagagaaaagaagagagaaatttcgaaatccttgtgagagagaagtgcccacacacatcactcagtacctcaatcatagtttggaagactgtgaaggatcacatccaactgaagaagaatcaggctcagatcttgattatactctgctacagacaggaattaagggttagagatcttagtggaaggagacacttaattccgctaccatcactgtaagttattcttaacttttatgtgttttgtttatcgttttagaagttcatatttaggttgttaaatcaacatacttgtgagtacatctaagatcctggtaaaattaattccaacaggactgtatattaatcattgtgataggcttgatataactggctttttcgacgcagattaggcgtgttgccgagatgatagacgctcaatagcaggggtgtgtgtgtatcttggagacactttggtttggaagatcaaggtgtggattcttcaacaaaatttttggattggatgttcgataattatacaaaaagaaacaaggatactctaataggcttcaagagttataatctttcttttagtagtttagatttagtctataaattatattgagatttttgggcttatagttcatatcagataaaaactatttttatcaaatcacacttccgcttttataactctgatatggaccatagaaaccaatagagatacctcgatgctcaagcggctccaatatctgagcgtcctcgggatttggacagctttaagggcggaggaatagaattcgcaagctaggatctgagtgccctcgagatctaggcaactcgaaaatctaagctaccagtaagagcgctccttgttgcttaaatatattgtatattcttgactttttcttctcgccaacacaaaattttttccaagttgggggtcgttcatttcttcaaatagttttgtggacaattccgaacagagatgtctatttaatttttctgatctgtgaatactttcgggactgattttagatttttcccaagtttggggctgcttatttcttcgagcatatttaatattttgtgtattttttttgttgaagttttcttgaacaaagctaatgttgtgtttattgtttggtttgccacaatgattctactccaaaaagcatgggaatattgctagaataccctccttctaatgccaaatattgttaaaaaatttagacaatattaaaatatgtgagtacagtactcgaagaatatagtatatgactgtttgtttgcatgtaaataatataaaatagacataaaaaagtatagcggttctgtagggctcggtctgcctagtccactattgaaagagatctcttgctatgtgattttattatgatcaacccaaccccctttaaatggagagaaggttcatctagttatatggtgtagatgatggttacaaattatatccataattgaaccgttacaaacaataataggcctatttattacattggttataaaattaaatataatgcttgctttaaaggcacttgattatgtttgaccattaaattctcatcgtttagaatgtgctcgcacatttatgataccgcaattttgtctaattatgcaagactcctttttgatatcatcgcgatttctctttagtgaagcccttctcgcgagagaggaaatttatccccacaataattccctttttaactttaaaatttaaaaataaaataattttaatggtgtgtatatgttctaaggtaagtaaaatatatataagtttacaagaaaattgaaaaaaataatgatagttttttgataaaatggtagtttttggataaaatggtatttggttgttaggaggttttcagttgaggttagagagaagaaaatgagggaaaaagggtttcaactagcctattttgcaactgttgtccttaatttttcccaaaatacgtggaccaatgcgactgggacacgt

SEQ ID NO: 300353 - DNA, 1052 bp, Cannabis indica
ataaaataatattaatatttacatatatattcataaaactagttttattattaaatatattcttaaaatattttattgttaaatagacatattttatacattaaaatatggaagattatacaaacttccacgttgaaccgtagatatataatgtatgttattctatatatatatacatataatatgtcacagttttcgtaattttgctcaaaaatttccctgttggctttgaaaaaatggtaacagtgacataatagtattatcgttttagtcatgaaattagttagttaatttgatgagttttcaatctgaaattaatgtacacccgcagttgttgtagtctaccatacataaatattaatattaatttccagcaaacggtttcgatttttttttttccagttaagagctagaagaaatattattgttaattgatatatatttaataaatataaattaaatggttgcctcgtactttatgtagagatttaatttatgttggaatgataagattggagtttcaaggtattttcacatcaaggttgactatacatatatgtgttttacttagtaattggcgtaacaattagttgtgcgtttcttggttaaataataaataaaatgtactaaattgtttgttatgttttggtcacctgttaaatagtattaatagtgtttaatactttttaaagttaatattattattagtacaaactaagaattaaatttatattaaagtaataatttttagcactatagatattcaatgccaagtttattctaacaccaaataacaatttttaattgtaattatgtcaccacatataatcacaaacgtaagacgaccttcaagtttttattttttattttacttttatttgcaatttaaaagcgcgaggtatcattttaaatggagagcaatacttatagggcttgtttggaatgttgtattaggtcgtattgtattatgtattgtattatattgaattggattatatatatcatatttttatataatactatgttaaactttaatttatactaaaatatta

SEQ ID NO: 300354 - DNA, 3103 bp, Cannabis indica
acaataatttgttgtattttattgtcagttaggtaaaattatatatatatttttaataaatattaaataatttaatattaaaaagtaaccaatctaaaatacccgatcctgcatttttgtagattagattgaatctaaaatataaaatctacacttaatacaaatcggatgcactataaacaaaatagtacgaattagatcagatgaacacccctatataaaactatgttaaacatgacctactatcttaataatttattttattttaatttgatgattttcatagtcttcagcatgtaactaggaatgaagaaccttacaaaaacataacaataacaataacaataattaaacggtagaaatgaagaattctataaaataaatcattcttattttcaaagaaaataaaaaaaaaaccacacatgatcatacatcacacaatttaatttataaaaacaagtgaagccaaagtgtttaattagatcccatttagattaagaaagtcaagaaccattcgagtattctttattttcatacaagtccatgcatacaatacaaaacaaatttataatccaagtgaaatggaccaaggtattttctctaagtagagacctcatatccttttgggaaaggaggagtgttggcaaatttccaagatattttatgtataatctcatgttctctaccacctgcaacctcttcaactggcacagcatcagatatttctttcaggtcttgttctgttagtttcacactcactgagccaatattatcatccaagttcctaatcttagttgtccctgaagaatttaaaaccaggcacgtttagattctagctcagagacttaacacatattagactttagtccaactaggaaaggactcattggaaagcactcaccagggataggtacaacatcattcccttgttgaagaacccaagcaagagctagttgagctggagacattggtgctttcttgaaagggtttcgattcgatcataaagttgtttgttcttgctcaagttctctctttgaaaccgagggtgtgaagcctatagccataacagaaatcattggaagttcaaatgcttacgacatttatactaaaatcactttgtattagaattgacataacaaagacaagacttctttttgtaccaaaagtccatctcccagctcattttcattgattgctttactcccaaagaagccacgccctagaggactatatggaactattccgatgcctagttccctgcataaaaatggtgtcaaatgttaaattatgaagctattttatgtataaaggagaattaatacaagaaaaatcagtaacaaatcaagaacaagaacacaaggcactcaaataacaactgataaacaataaggaacatgaactaacaaaataactaattacaaggcttaacattacaatttcgaataaaagcaggcatttcataatctaatctaaacaagcaaacctgcaaaggggaatgatctcttcctcaatatcacgactccaaagcgaccactccatttgtaaggcagtgatggggtgaacaacatgtgcccttcttatggtgtctgggctggcctcagatagcccaatgtactttattttcccctcttccacaagcttcttaagctcacccatctacactccaaacacacataacacaattataaactcttcgagctaaataggatatcttaatgaaatttacaaatgaagtagtaagaaaatgaatcactgacagtgtcttctatgggcactgatgtgtcaactctatgctgaaaatacaagtcaatataatcaacatcaagacgcttcaagctagcctcacagcatgaccgtacatattcaggggtacctctcactatcactgaaagggtttctctgtccagtccagctataccaaactttgtagataattgtactttttctcttggtaactgttttaaggcctaaaacatcacaagaatacattcttaacacactaaagcctcaattacattcttgctgggacaataatatagctttaacacatgatggaagaaaattacacacctttccaactaaaacttcattagcagagtcttcaccataagcgtcagcagtgtcaaagaaagtgatgcctttgctaaatgcatgttttatcaccaaaattccttcctcttcagaaacaggggctttataaactccattcagattcatacatccaaatcccaactttgacacctgtgagtaagattaaagaaaggttaaaaaaaaattgtaagaatttgcacatggaaagtcaaacaaatatgaaatgtacacaaatatggatgaaaataaattgagagagaagaaattgaaatggaatttttacctccagtccttgattgcccagtttaactcttggaatctggagcttgttatcatcacccatctttcaaaattcaaagttcttttgtcaaagcattagtataagtaggaagactgacgaagcaaaggactgtcatttgtcgttgcaggccaggtagatttacgaaaaaagacatatagagagagaaagaaataagaagaaaaagaaaaaagtcccaacaacaaaacagctgcaccagccgggaatcgaacccgggtctgtaccgtggcagggtactattctaccactagaccactggtgcttattgagggaaatttgataatataatataatcttcatatttactctatttttaaatagaaagtcaatgacattatttgacgactggattgtactttttcaatgaaggatattagcagaaaaacacttaaaatttaatggttggtacggtaacacttttttttttttaatccaagtaacacttaatcctataaatttatttttaggtttttttaatattatacctaaaattaattttatttataaaaatatctttaaaaaaattatttgtacaaatattgttgtgccacatcagcatacataccgaaattcaaaacttaccgaaaatagaaaaaattggaaaaatctcgtttttgttataaaattataaaataatataaagttgatgagaagaaagaagaagaagatgaagagagaaagagaaagtgaatg

SEQ ID NO: 300355 - DNA, 1123 bp, Cannabis indica
atatatattctggacttaataaaatttatacattaaatataatcatgtgaaccgtgcaacacagaatgatttctgatcttttattaattagtaaatctgattatattgaaatgagttttatttagggtacaaaacccaacaggtgaaccatttactgatattactctgtatcgaagtatcttgggggcacttcaatacttgtctcttactagacctaatgtagcatttattgtaaacaaactctcctactcacttacattgggaagcttgcaaaaggttagttaggtaccttaagagcactgtcaaggatggtatatgtctcattcttgcatctgcactaactctcacaacatactcagatacagattgggctagttgcattgacgatcgtaggtccataggaggttacttggtttttttggtcaaaatccagtaagttggtttgccaagaagcaacagatagtggccaggtccagtactgaaagtgaattcagagccttggccaatgcagcagctgaactaaagtggatttaatctttactcactgaattgcaagtcactttaattcatgctccagttatatgggtggacaatcaaagtgcatcagtgtggctactaatccagtctttcacgcacagtctaaacatactgaattttaactttgtaagagatcaaattcttgacaaacaactattatttcaatatgtctctgctcatgatcaaacgattggcatacttacaaaggctctcactacagaatgtttctctatttgaagaccaaactaaaaatggtacgtgtccacaccatttcatttgaggggagtgacaatacacattctaacttcactgaagacacttaaatattaaatatttattttgatggccctataggtgtgcaagttatgctactgggcctcaaaaaataaagggtccaatatatttttttcatgcctttcagtttcatcgcaatttttaaagtccattttcaattttattattacttttaagaaaaaaaaaataaattactaatattgattatttttttaaaaacttttcatatttttttttgtatcatttttttttttttgttgttgtattggaatcagtaacaattttaataaaa

SEQ ID NO: 300356 - DNA, 4670 bp, Cannabis indica
ctttcacttatttggttaatgttaaattttgaataagaatttaaatcagttcataaaattgaattcgtattaaaaaaacatgattgataattgcataatgaagatcataaaattcatgaaattactatttctaagctataacaccacaaactaaattcatcaaaagttcaaaatcaagagtagaacataaagtctaaaacatggaggtagattttaacattaaaagatttataagtgctcatttcatgatcattatatcacttgaaagactttctataaatggaagttggagaaagtcgaaatcattatatcacttgagatgaattgtagtacaacacttaatgggagccgcaaaagtgttaaatacaatataaaatgaaacctaaatatgcttattatgcaaacaaaaagcctaaaagacctcaacaatgttcgtcttaggcctctcacgactcagaggcgtaagccttaactaaacctgctgaggcttagcttcagtttgagtgcctcaccttgaggcgtaagccgcaaaagcttttcaaaaccatgtgtgggaccaaatataagaatcacagccgtaagaatgtcattggcaggttatcttgcctgttgtaagggtttatgttgggaggctattttgcaaaattgcctttggaagttctaatagacttctttttcatttcattctattttgtatttcatgttctttttttttctcaaacaatgtatttcctgttcttaattgatagatgttgctgtgctttattacccaaaatgaattatgtcttgtaaagattgtcagctgctaccctttccatttttttatgcaagtctagtggaaaatgtgatgatttttcctctccttgatgttcctattgatacatatgtttttagtactgataaagcatgtttgtaatttgctgtcatgagattttggactagctccagattttgctggcgactgtttcatgaaacattattatgttgttgcagatatgcgcatctacttccccaggatgacgaggcatttgagcattataatgttttctcttctaagagacttgatgaggtatttaccatgtttggatgtcatggtactatcttgttcctttcctgtatgatctcacgattcatacgtgttgttgtactggtaaactctttaaatggatattagtttttggggcagcgtgtagtaagttttgtttgttggtgcttttttcagtgcttgtagctaggcatgctggtgccgagttcccttttgtttttgcggttatatatgcaaatgtacattatataactgtgtatataaagtttggtttactttctatagctgtttccttatttgacaagtggcctacaaccattagtccttgtgattggctgtttctttttaaactgaccttgaccttatcttaactcgtgcaggctaaaaagatcggtaaaataaaccttgctgctaccggtaaagatctaatggatgatgagaaacaaggagatgtgacaatagatctgtttacagccttagcattagaaactgaggcagttgctgagagggttgaggaacttgaaaataatcaaacgttgggcttgcttagtggtttcctttctgtggatgactggtaagttcatggtaattgccgctggatgattcctactgtagtttgtgtgataatatttaacgcatgtgctttgggggtgtgcactttgtacaaataaatctcacaaattgaatgtgtcattgtttagagtgtgttattttatcaattttccctctctgtctctctctgttgatttttacttcaacatctgtaggaatactggagtgacctaataatctttgctcttgttttttcttgatacagtagttgtatctgttttctctatttaaaattgtgtttgtaatattcttttatcaggtatcatgcaaatgtactctttggtcgtctctcacatttgaatcccgtggagcatatacaaatctgtaacagcttgtttaggtaaatgaaaggcatgctcctttttcttgtttttcttttctgcctctttccctctccatctagtgctcaatgtgaagcggaaatttgccataatcaagcttaattttctattcgcctaggtactacatctaactttggtttcaataattctcttattttatttattttttcaggctcattgaaaggtccatttcttcggtatacaagactgttcatcaggcacatcttcaatccattggatcttcatctggagctagtcttgatgcagtggatacggtaacttcatcagtgcgtggttcattcatagatcttcctaaagaattcttccagatgctcgtctctgctggaccttatctttaccgtgatacaatactattgcagaaggtgtgtgtacattacgtttatatattctgaatcgtattttgtttttgagcattctttttcataaacaaaaggtgaatttttttttatcttatattcttctattaatgtaggtatgccgggtgttgaggggatactacttgtctgcacttgagcttgtagatagcagtgaggcagttgggaatcctgaatcagttaatggtgtgaatcgagatcctcgtttgcatctgaaggaagcaaggttgaggatagaagaagccttaggaacatgtttacttccttctctacaattaataccagcaaatcctgcagttggacaggagatctgggaagttatgagtcttcttccatatgaggttggctttccacaacagtatttgaatctttcatttgagaatttatttggcatcgtagacactcttgctagatgaatcctatctgcttaggtgcgttatcgcttgtatggtgaatgggaaaaggaagatgagcggatgcctatgcttctagctgccagacaaatagccaaggtatgatcctggttatatcacttgtgatgtttgtagaaagtagcaattttaattgcaatgcttgttgcatggaaagcatgtttattttttagtattttatacagttggacactagaaggatcttgaaacggcttgccaaggagaacttaaagcagctaggtcggatggttgcaaagttagctcatgccaatccgatgactgtattacggaccattgttcatcaggtaatattttgttctactgcaatttttctttctttctaataatataccttaacagaacttgaaccctgagccactcaggcacactctccactacccaacaacatgggctatctataggggctgttctactgcaattattgtatttggctgctggctgctgattatgattttaactgtgcatagaaataatgcatttatatttctacaatattttgcagattgaggcatacagagatatgattgctcctgttgtagatgcatttaagtatttgacccaggtgtgttttttttttaccattctggagaaatttttatgcgtgttttgatccattgttgttatcctttacagagatcatatttttttgtttgaggcaaagctgatcaaaaagctcgcaagccttttgggttcttttttttttcttccttttggtttaatactttaattgcatttgtgattttctaagtgtgtgttatattttgtttatgtcctaatagttgtaggactttaagttaactaaaatgttaaatgagttatgaattatgacgcccaaagtaaaataaactgtgcatgagctctaaaatagaaccttcttcgagccactgtatcaaccctgtctattgtataacagcttatttcttctttcaaccactatatcagctgtgtatattttatagcccttctcctgtctcgtataccacattatcaccttctacctcaagtattagccaatgctatttgttaggatgcatggttttgaacttctcatgactgtagtatgtagttatatcacttattgttaataagtctgtatattatagtgacgatgttatgtaatcttcccccttctatgatcacaagttatcatattattatttaaaagcttatttttattgtttactctttctttgtttttttggagttatttttatttatttatttattggtgtttttgggagttatttggttattaaagttgaggcttataccgagccgaataaagtaaaacgcttcagttcccaaataagcttattaaattcttggttgcctgatctaatgaagtaatattacaagcatctttctcgactaagttctatatgtgatgtctagtatgctgatgacatgatttgttagtagtttttttttttttcattttatatatacatggtatgttatttgacttcaaatttgaccttatcttcatgcttttcttccagcttgagtacgacattttggaatatgttgtgattgaacgtttggcacaaggagggcgagataagcttaaagatgatggcctaaatttgtcagactggcttcaatccttggcgtcattttggggtcacctgtatgtattggataattctctctacatttagtcagctttatgctattatatgtgattttcttccttatgatagaatttaggtttttcctgcctgtggtagaattatagtctaaaatattttttctattaatcgctgaaaagtagatgcgttctctgtcttattttggtgtatgtctttcactgtcatcttaaaactca

SEQ ID NO: 300357 - DNA, 3654 bp, Cannabis indica
ctctctctctctctctaaaaaaggaaaaagagaaacttttcacttctcttggaacccgatggcgcaagtcccctaaatcccaggattcttgctttgtttcgacgatccaagcttcccacatgcttcctcaatggtttttcctagtgggtaagctttcaaatcccaatctttacttgtttccttgaatccgccattattgtgttcaagctttttcaaactttttacattcttgatgattctcacgttagattgtagtctttttagtattttgatatgcatgatagttttaggatgcataatatatgatttcttgatgtaaaatatttaatctttagattcgttgtgattcttgactctttaagtcacaaagaacatgatgaacgcgtttgagtcttggaaagacacatattttgatccattagacaccctgaccaactatggggtcttgtttttgacctggccagcccatggtgcttttcatgagagtggaaatttctagggtttcacctagaaccctggtcggctcttgcatgggtcatgtgaccctagccagttctagcatgggtcaaagaaccttggctggctaaatgccttgggaccctaaccggcccagggcttcggtccttaggagttggctagttttttgtcctattgtgaccttagcaagaatcttgttatggccttgcaaacctggacaacccttgtcccatacgtggttctcttaggaactgtgtatggcactttagggtgagtatattgctgctaaataatctacttaagactcaatgtttatccaagttattacacttaaaatcgtacttcgctaatacccagccttgtacaatggaattatctgtctagtactcataggtatggttaactagagtcttgtctaaatcttattcttgtttgtttgctcacctccccttatcttttacatgtagatgatcccgagtgactattggggaggtgataactgcactaacgaatatttactcagccttctctttttgaaaaccattgtctagctgatccttctagtagttcctcgagtgatctcaaggtcagtaatggttctccaaaacttaaggtctagcatcaccgctatacgaagcgaataggcagtgaattatacggtcgatttatctaggagctgaacctagggtggaggaaattcattcctagttcttggacttatattgtccaagatggtgtgactgacaccttacccattagtcgagcaacttcttcagcgagagatcttcctatcgtagagattgttgtttctattgccaaatacgcagggtccattatggtgacgaccaagaaaacatgtcgtagggcaccaccccaggaccctcacattgctatgctgacgaccagaggcagggttggtgctattgaggaggttgcacaacctcgatatgctggggagccaggggccggccaggttgaagaacttgtggtcgagcagcccgtggctagccaagatgaggaggcctcaatcggggcagacattgagtccaaggttgaggaggttatgcatactataagacttgtaatatatttttgaacagccccttgggttcttacgatgagtctggctgacctttgaacagtcttagtcgtctttttgagattgagatacaaccatgttatggaggaggctgctaacccccaagtcctcaaccacggagacgatttatatcggtggatatctcccctgtcctctatctctgccaataggcttgatgagtcaacacagtaggacttgtaggagaagttcgatgtgataggcccaccagagaccaactagaacatcgcctagcattcaaatagatggcctggtcagagcgtcatattgagcagggagcagtgctacttcttcacccctactttcaagacatagccctttactttaggttttgtccaactcagatcactccaaagggtataaagtacctttcgacaatgttcgtcctgtatgcaaaattgggttggcctcaaccctcaccctatgagatcgagtatttctttgagctgaagtccattttaatgcaaggccagtctggatacttctattttagctagttgggctaccagtggttgggcaacactaatagcacagctttgtcaaaagtttgaggatgttcccggacttacttcatttcctaggacatcccataagtcaatcactgctttttagagggtgctgaattactcacgctccattcacactctctgaatgagggatagagttaattacatcttgtgtctccctattgagaggaggaatatacttaggttggcttgtgagaccaactttaggagatatggtatgtgtccttctaagtctagtgttgagggagttgcagactcatctagatgcctaaataatgcctcggtagtagaggagacttgcctagggacatgcatacacttggtgatgcttctttgttgatttggcctagaggtcaggattctgctaggcctactcgtccacgcgtgcttctagaggcaagggcaaggcaaccattagtgatagtgacttagacaatttctcctctaaggatgatcctcccttgaatggtagttgttaataccattttttttttactttttcttgcatttaatacttgtaacttgtattctaaatttgctacttttcttttgtagacatggcttctagaatgagggaatgagggatcttgcaggagagccttctggcgatgcttcctcaagtcgtcttatggccaaggtggcttggaccatcatatcttccaacaccactcaatctccactgccaccccctcctcttgggcctactctagctaatcaaccagtgatcatggaccctccttcaaggaggacttcacccccatgcaggcctttgaacaaggggctcagaggtctggctagggggcctattcatccattagtcagaggaatactgatgtcgctcaaaactatattaataggactttgcctatcattgatggggagctttaggagttggagtgcttgacgtccagcggcctcctggacataacatatgtaagttgtatatttgattttacgcaaattgttgcattgcagtggctggccagctaggtgtgcaccacttagggactggctggccagggttgcacagatgggaagctggtcagccagaagtgcacaactaagaggctggccagccaggttttcttctacttctaacttggtttttctttttgtttcaggccttgttaaaattcagccttactcatgcaagagctaagggctcttttggagttcaccggaagaagctgatatccaagaaggccaagcttcagacgaagagggacgcagactttctatacctattcaaacagaattttgtcatttgatgagtttttataaggaaactaattaatgttttctctttattttcaaactattggagctcaattttaggtgtcatttatcactataaatatgacataaactagcgacaaaaggttgaactcttccactttttacttttctatatttttagaagagagttacttttttttttttttgtaaaggatagttgttctgctattccttggtgagtttgtgtgtctttgagattacttttatgtgaagaaaattccaaagtgaagaacataa

SEQ ID NO: 300358 - DNA, 4610 bp, Cannabis indica
tttttctttttttttttggtaaataaacagaatttattgaaagcttaaaccaaactagtgaacacagaggggccacttcccttaaacagccacatgacttgattctagaatctcgagcccagtgggcgagacaatcagccacggcattacaagaacgagaaataaaaataacatccacatccaagaactccttgcaataaaggaggcattcaacaaaaaccgggtaagccccccaaccaaatggtaaagagccctgatggagacacttaacttttactacaagtggataagacattttatatttgcgatgcctcacatacatatatcttgtactaaaggaaaaccgtctgtattccctcccaccaatttaatacccaaaccaaatcattgtaagcaatggaaacaactgcagttataatgagaatcctgatgcaattcatgcccaaaaaaattaaattataaacaccaaaaaacttccgagtgtttctctcaacaaagagcgggaatctaattttatgattgacctgattagctaaaatggatcaaaataaactcaacagtactccaacatttagatacaacaaaaccccgctaggactggccgtcctaaaaaacaattcaatgtttaaatttataaagataacaaatttagagccgaaaaagtattgccgtacgtactcatttcttgacttcttcgaagtctgcctcaggagcctgttcaccaccctgtgaaccacctgatgaagaatcgctgctagaaccaccagacatgtgctgcccgatctttgatacggctttgtttgcaacatcaagcttggccttaatttcgtcaacgttgtcctctcccatcgccttcctcaaatcagcaacagcatcttcgatttccttagctacttcagctggaattttttctctgtactctgctaagctcttctcaatgctgtagatggtggtgtctgcactgtttctgatatcaataagagctttcctttcctggtctttctgtgcgtgcaattcagcttccctgaccatcttctcaatctcgtcttctgataaccctccagatgaacggatagttatttgttgttcctttccggtggacttgtccttggccgagacagtcaccataccattggcatcaatgtcaaaagtgacttcaatttgaggcaatcctcttggtgctggtggaatacctacgagctcaaactcaccgagaagcttgttatcagaagccatttcacgctcaccttgcagcaccttgataccaacctgagtctggttatctgctgcagttgagaatacctgtaataatattatagaggggacaatcaaaggccaatgattaaaacacaatgtctaagaaaaataaaatgcattacttgatcagtgcaacaatgaaagttggctgaagagtgaaaaatgatgtggaaaatgtaaaggagaattagtctgcaagctatcagacgcactagactcataaagcggaatgaatgtagagacaaaaacaaaagtagaaatgtcacttcaaccctcttatttttctttgggtctgggttgttattatatgaggggctagagggcagtgactgtatccacttaactcgcaaaataatagattattcataatgacacggcattaaatgcttcttcattttcaaacatacctgactcttctttgtagggattgttgtgtttcggttgataagcctggtgaaaatgccacccaacgtctcaattcctagtgacagaggggtgacatctaacagaagcagctccttaacatcaccacgaagaataccaccctgaagagcagctcccatggctacagcttcatcaggatttactcctttactaggactctttccgaaaattgctgtaacaacctcttgcaccttgggaacacgggtcattcctccaacaagtagaacctcatccacttccttgatggatatatttgcatcctttaaacaattcttgcatggggccttggtcctctcaatcaagtggttcactaatgtttcaaatttagatctggttagtgtaatattaagatgtttggcacccgaagcatcagctgtaataaatggtagatttatctcagtttgagaagtcgatgagagttcaatcttggccttctcagctgactctcgaagtctttgcagtgcaagcctatctttcgcaagatcaataccctcggtcctcttaaactcactcactaagaaatccaacaaagcattgtcaaagtcctctcctcccaagaatgtgtcaccgtttgttgctttcacctagacaagacagaaatgttgtgcaaactttataaaacagaacagaagacattaactaaaacttctcaagatgcaagaaatgaatacctcaaatacaccattagatatctctaaaatggagacatcgaatgtcccacctccaagatcaaaaactgctataagaccttctttgttgttcattccataagaaagtgcagctgcagtaggctcattaattatcctctgtacgtcaaggcctgcaattcggccagcatcttttgttgcttgtctctgggcatcattgaaataagctggaacagtgacaacagcttttgatacactctttccaaggtaagcttcagcagtctctttcattttggtgagaacaaatgctccaatttggctgggggaatattgctgtccattagcctctacccaagcatcaccatttggggccttaacaatcttgtaaggaaccatcttcatctctttctgtgtttgagcatcatcaaaccgtcttccaatcaaacgcttggtgccaaagatagtgttagttggattggtcacagcctgacgctttgctggagtgccaacaagtagttctcctttctggttaaatgcaacaactgatggtgtggtacgagctccttctgagttctcaataactttgggattctacaccaatttcagccgcaattagaaacagatcaaaacacctaaagttcaatcttttgtttttaataatatcacttcaataagacaagtccgtaaattctaccttgccctccataacagcaacacaagagttggtagtacccaagtcaataccaataacatcttgtccagcaggttttgtactgtagtgaaaagaaacaacattaaaccatcatctattttaatatagcacacatatgcactcaggaaaatccattatacctgaaaggtctcaccaaggttgaccacttctggccgagataagatggcttggcagtgctagtgaactgaagaaaagaaaaagaaaatgtaagctaaccattgcaagttattgggttctcaagtcaccacacattacctcggaacagtacatcatgttgaacacataagattattatatgtcgagtactgaagcatttgatcgaggaaattttgtcccatgcctcacattttgaagaaaattagataaataaatttacagaatattctcgtccctatcctataagcccaaatctcaagtaactattaactcaagaactacaatacatatcgagctttaacttcaaacaaatatccacgaattttattgtaaatgaaacaaaaaatagaaaagcattactatcagcctctaatggagatgaatattatcgtttaaactaggcacgggatacatattgtttgatgaattgcttgagagggatacatattattgttgaaacaaggcttctaacataatttcctccatcaaatcaaaatgacatacaaatatcaagtcaagaacagcaataagcgtcgagctaagactttttctatgaaaataagtgaaatgaaatgaaaccaaaaaacaatctaatatacgattgtgagcttgataatagagttatagaggaagataaattgtattaaaaccagaatcctaagctcaaacaaataccaatgaatgttcaaaagagctaaagacatgaaacgaaaatgaggaattggtggaagcaaacatacagatctgtatgcagagagaggaactgaagcaacatcccgtcttcgaatggatcgaagcaacgcagcagtggccatggctgacttgagggagacgaaatggttagggtttagggtttttgagagagaacgaaccacaccagtgtggaactctggaaggttttagaaggttttaagttaagagctcataactctattttatttatttatatattaattattaggctgagctgattttccttaggtttaatgtgggtagctgaaacgacatcgttgaatctggtttctttgaagggctggcagtagcgaatcgtgtcaggcaggctatcaagcaggttttcttaccagttcaatggctttcggaatttacgatactgccctctattttcatgtaagattctatttctttttgttgttttccattcgttaatatgtttatctatttagggtaattatcttatgatttttttataagaagaattgactatgatttctcaataaaatacttatcattattaaaagagtaaatagtggcataaatattcaaagttttaaatttataagtggcataattttttagtcacataaatacgcaacgtttataaaactgtagttttcttccagtttcatcagtac

SEQ ID NO: 300359 - DNA, 3444 bp, Cannabis indica
ttttaaaaagtttggccaaccatcccctattttttcagttttagaaatgtaaaatagggtttaagaaagagaagaatagattctcattaatcaagaatggaatcagttacaacaatatgagtgcacatgaaatagtagtttatgttgtttggttggactttagacaatttccctttttatttttaggataattagtttttgattattatacggttgaactctcatttttttttgttctttcgaaaacaaacgaaatcagttacaagtatttatagtgtaactaatcttttactgtaccaactaacagttctacttaaaaaaaagaagtaactaacaataaactaagctaacagctcagtaaactacaagattagtcttaatatcatttgtgtatgtccttacacatcaccaggcccagaaagttgtagtgaactgaaaaaagtccattaggcttcgaggaagcccagtactataactacgggcttatgtttctgtcttatgattgggtagccctaacaaagaaagtacaatcgaaacttgttgaagaggaaaaccccattgactggcttgaagaaaaagaaacaaaatctcttttacagtctttctttctctacaacaatcttttattttttgactcggattatagagacagaggcatttgctgcagttcgaatcctgaaacgacgccgttaccatgtttaggaatcagtacgatacggatgtgacgacatggagcccggcggggcggttattccaggtggagtacgccatggaagctgtcaagcaaggttctgccgccatagggctccgatctaagacccacgtagtgttggcctgtgctaacaagaccaattccgagctttcttctcaccagaagaagatcttcaaggtcgatgatcacatcggcgtcgccattgctggtctcactgctgacggtcgggttctctcccgctacatgcgatccgagtgcatcaactataactacacctacgaatctcccctccccgtcggccgactcgttgttcaactcgccgataaggctcaggtttgtttttttttttgtagaaacctaacttgcattcattctctattgcttttgttctatgatgatctgtttgttattagtattactacagggtttgtattttatgcttttcgaataattagctgatgggttttaaatctggaatagggaactatgttttagtaaagctaagaaattgtggcatccactccattcacctatttgttttgggttttcaaatctatttcaagatatgattttggtagaaagtatgactttccgtgaaagaaatgagtgttaatatagttctttttttagttgagggcaggactcaggaggcttaaattttcaattttgatcaacatgtattatgggttattcgggacttctattaagctcaagttgtacatgttagctagggttcttgcttgtgcttcagtgtttttcttttgtggctcccaaaccaatgtagagttaagcttcggagatgaacctacccagaatagcactgaactttgttacatttatagatattagatgttacttaaaacttttggaagtgagagcattacgacatattgtgctttgtggaggcgcaataatcaaatgaagttataatcgaacttttattgaacttaacattgtctttttttcttttttatcttaaagttcatgtcttttgcacaattgctgtgtgacaaatagtataggaactccgatttcttgataattttaatgcttaattaagttcttttttttttaactgttattttattctcctagatgcattaattatgttcttgttcttagtctgtagtcaataaatgatcattctatcttttgtgacatcttattcttttgaaatcagctggtgctttcttagatatgtatgtaggcaccctgaaaatatgtatttgttacaggggaatgtggattttgtgcatttacatgcaacatgattttgtggacttattatctatgtttatctatgttgctggcgctatgtgaacattttctatgttttccccaaatccttatagaaagtgtttagtacctaatatgtgctttccttgaactatggaggaaaaaaaacaatggtgaccactgttcacatttcagttctctatgattataaattttgtttttcatgttactttagaagacacatttccgtaatttagtcacttatctttatggcaggtgtgcactcaacgctcatggaaacgaccttatggtgttggattgctagttggtgggttggatgaatctggagctcacctctattacaactgcccaagtggtaactactttgagtatcaggcttttgccatagggtctcgttcacaagctgcaaagacgtacttggaacgcaggtttgagagcttcaaagactcgacgagggaggatttgattaaagatgcactcattgcaactagggagaccttgcaaggagaaaagctgcggagttcaatctgtacaattgctgtgttaggagctggagaagcattccatatattagatcaggagactgtacaaaagttgattgatgaatttgagattgtggcagaggaagaggttcctgcagctgaacctggtcctgacgctgatcaggatgctgcaccagcagagggctctgcagcagcagagggtactcccgccgaccagggtgctgcagctgaagaaggtgcggctccaatggatatttgaggatgctataaaacaatttgtttttccttgcccagaatgaggttttctagcatgtatttgttatagtacactgatggtacaattgaaaatgacacatttggattaccctttacttctctctctctctctctctctctcttcagggtggtatgccaaaagtcaaatcaaatggttgctagtgaacttgaatcaaatttatcctctataaacttatacaagtacttgatttgaattatgcagtatgctagcaggtttttttatttttatttttttggaacttcatttgttttttaattaagattcaagagtgaaaagatgcttcattacgaaggccagaagccagaatcaatatgaaggaagccgatacaaaaccaaagttaaggcaacttgggagatcaggccaacttttgcatagacaaagccagctggcataggtgtcattaaatatcgagtaataatgtttgcatatacaaatcacaaatcaagcacaaactttacagacaagaaattctaactaaagtgacttctggcacaggtgtgttaaattgtgtgttggtgcaaaattcatatgtcaaaagatgtaacaaataggatgatcacctaaggatagtccatcgtagtaccaaagaacttaagaaagccaaggcttgtcctagttctgctatttttttttttgtaaaataagcgtatatatatatatgaaaaagatacta

SEQ ID NO: 300360 - DNA, 2247 bp, Cannabis indica
tgtgagtgcttacttcctcccgaagtaaggctttgacaaatcttctcccgaagacccttctcttactcaatgaagtttttcaacctattctaagaacaatatacgaacaataaacaaagaataaaacctagttgaacactctaggttttcacaaaaagaaattctctcctcacaaagatgaaaatatgaaaaatgaagctcaatgaggtgagaacgtttggctgctctctagatcctatatatagatcatagaaaccctagagacagccacaaacatgttttcacagctgtacaaaagtttcctaaactaatccctaatttgtagcaacacgattagaatccacagtgacagattgaatcgaaaaaggaaacttttcatataagtccaagatcacaatttgaactatatttcctaccataaaaatgttagaaaaagtgctatatacatagaaagatcgttgagatcaatcaaatacaattagagtcaattataccaaaaaataggtcaatttaaacaaactttccataaagagaattctttctcttttatgcaaagttttctatgtaaaaagatagccataaaagggtggtaagcacaagaaaagaatattttatcctcataaaatattcacactaaattaacaatattttgacagttaatattgccaaaatagacctaacaatctctccttttagcactttagataatcaaaatatttttaattttcaacaacctacaaaataaagttagcaatgaaaccaaaccaaactccccttgagaaacacaccattaaatcaaaataagatgctaactttaacataggtttaacacaaaacaccaaattcaactccctttgaaaaaaggtccagagattacaatccaaaaattaaaccatattactccccctttttatttatctttaagggccaaagaaaaaataagataaataaggtttaaccgtaatacaacaatagaaagaaacaaaaacaacgcaaaagaaagggaactaagcttggggttcaaaaattcaaactaatgaccacaatttcttggacatatctgattgaaccccctccatagcagcctcggtgtcaaccaacttccttggccaaccaagattctttgctttggccatggttgtttctaaagaacaaagaagaaaacgaagaagagagaaagagggaagagagagctcgaggtgatgaaaatcaaattggtatgtgtataatgtaaaatttaaagagaaaccgatttgagaaagaaaataaaataaaacttacccaccaagcaaaaaaataaagaaaatcgacccccatataaacactttccttttcttatttttttttttcatttaaagagcacacacaaaaattaaaaaaaaataaaagaaacgaaagatttcccccaaaaaaatatcaattaagatttgaaataaaaatcaaggtcaacaataaaacaaaatataattaataagaaatcaattttaggaggaaactaaacaaaaattacgaattaaagcacatgatacttaataaaagacgaatttttcttagcctagaagccatgccaactaactcctctttttctatgaattttgaaataaatacaaaggaactaaaatattttatacaaaaatcaagtaattctaaaatatgcatctttccttgtttcataaaagagacaaattaccatgttatgctttcaaagattataggaatttagtatttaaaatacaaaccatacttatcagatgttgagaataaaatagacaagttacataaaatatgaaccatgattttttattttagtagaggagacttccaaacttgtatatagttgttagacaatagtgtgtgcagtgaaaaatatgatcattgtccttggcatgtttttcattttttgccttttcagtttgaccccgaagctagatgctttcacaccatactgaaggtagctcttttctatggtagtgcatcctcttcataactcctaattacaaagttctagcttactcaaaagatggctttcacacctcaatatgggtagctctattccagcaaggggtctgacaagaaagtgaaacaaaaattactcaactctgtattaatattataatttatcctaatcacatatatataagtaactcaaatcttttaaaccaacctaaaaagtataaagagtacaagacactaagctaattatcacccaaaagcataatcatgtttcgtcaaccaagaatgaaagaa

SEQ ID NO: 300361 - DNA, 4593 bp, Cannabis indica
tatattaggagattttttaacaacccgtatattttaggggccacaagtcggtagtgacataagttcagggagtaaatttgctaattattctataattaatatacctacatatgaggcacaaaataaatttgggtgctaaaagtgtaaaaaatggtagtgtatatacatattttagtttaagttaatactaagaatagtgtttaaaatggtctaaatttattacataaaaattatgttaaatttaacacgaaatataatataaaataaattttacaccacaataaatattattttttatttactattttcctacttattaactagataatcacttaattttttaattatgttatttttttgataaatcagcaagtttattattattcaacaaacatttacaatctattacaataaaagagcatctttttatcaaaatatctcaaatacaactttttacagcttttaaaaccaacctctattttgttgaccaatctattttggccataacaattctactctatgcttgacactatttttaattctttgtacaattacatctctattttttatgtgtttgttccacaattggtcgtttcttacaaaccagatcgtatacaccagatgagttgtagctgctgccaacactttctttttaaacttgcttattttggctttgtggatccacttgagcagctgagacaagtcagtggtccgagcattccatgagagccattcttttattttctccacacaaaactatgagtaagggcatctgaaaaaaaagatgcttaattgacttatcctactgcaaacacagattgtaggcagcatcattaatctgaaatttctgtagtttgtccttggtcttaagccgattttgcatagctagccacagtataaaactgtgtttgggtatgttgaatcttctccaaacctcattgcaccaagacaccctattttgaatgggacaaatcatatcataaccatctgaaattcgatacctggtttgagaggattaatgtgcatcagtttgtgttctaacttgattctttgctgccactatttgcttccaataccagcttccatggctaggtgcttggtactcccaccaatcttcctctttgagatacacattgtgtatccatttaacccaaaggtgtcctctttgtttgctagagcccacacatatttgaaaagagctgttgaattccattaagcaatttttttaatgcttgaaccaccttctgatcttgactggcagacattatcccaagctaattataaacctgctccttgcatcatgtattgccctttccaaagaaaggccctacatatagcttcaatctcatgaattaccttctttggtagctttagaatctggcaccaataagagtggattgctgagagaactgaattgatgagcacgactctaccagtaaaaaaaatgtttctggtgctccaagatcgtattcttgctgtcattttttttcttcaaaacattgcattcctgcttcgagattttcttagtgcatatgggaacaccaagatatctaaaaggagcatgctgccttgagaaacccgatgcatccaacactttaacaacttcttgttctgccatgttgccgcagaatattgcagatttggttttattaggttgtaaacatgaggtggctgagaagagcttcaaactttggagcaaaagaatgatgcttttatagtcacctctacaaaaaagcaaaacatcatctgcaaaggtggttgagttttaaagtatcatatctctcatgaaatacaaaatcctctttgcagtccactttgttcataattcttatcaaatactccatgctaatgacaaagagaagaagggatacgggatcaccttgtcttaatcctctctttgaatcaaagaacccatggaaggtttcattgaaaaaaagagagaattttagagttttgacacaattcattacaagaataataaattgatctggaaagagcaaaccccttagaacctcttccaggaagtcccactcaatagtgtcataggctttttacaaatcaagtttgatcatgcaattagccttagatgatttcctcccataatgtctgactaagtcttaacagatcattatgttgtgtgcagtgaatcttcctttgacaaatccaccttagttttgagccacaatatcaggaagaatattctttagtctaaaataaatgaccttggttgcagctttgtagacgacattgcaacatgcaatttgtctaaaatcacctggagtgttggggcatctgacttttagaatgatagtgagagcaatgcaattgatttcctttaaaatcttcccataatgaagaaaggatcttactatatcacagatgtcaactccaactaaattccaattatcttggaagaaatagctagagtaaccatctggccctggtgctttagctcttggaatggcaaatatggccttttttatttcttcatctgtaataggcttcaagtggatatctgtttgttgactcgtaacagtgggaccattgcttagtacactagagattaccttccttctatttatcctgcttgtgccaagaagttgcttatagtagtctaagaatacctctgttatcctgactgggtcatcaattttgtttccttgagaatccaatatgaaaaagattctattttggttacttcaagctttaatactagcatgaaagattgtcgtattatcatctccatctctagcccaattagttttagctttttgatgaagaaaaggttgatagttcttgtgagcttgagtgaaaatgctcctggcttcaagttcctcaatctgcaatgcctgattgaagggctccaggaatagcttgttttagcaggtttccataacttcctgtgcttttattgctgttgcctgtaactcagtatacccttcttggttgattcccttgaagacaggttttaaggctttaagtttagcaacaacttggtacatttttgtgccctggtaattctgcttccatacattcagcacttggtttgcataatgtggaagtgaactccacattttgaagtatctaaatggcttcttcccaatatgtgacagttgatgaaaagtaataagggctagtgaatgatcgaacaccccttcattcatgaaaatagcttcagctcctgggaagatatctatccatttcatattagccattactctatccagtttagaataaattcgatcacctccatgttgcttattacaccatgtaaagaattttctacagcttctaatgtcttccaattgacagcaggaaacacaatctcgaaaaggctaaacattgtgttctttcaccctactaccaactctttcttcttgttctaaaatatcattaaaatctcccgaaactacccaagcatcttgagtagtaagagagcttaaatctcgccaaagatcccttctaccatcctcatcattgaaagcgtaaacaaatgtaacaagaaaattcttaccatccatagtggagacttgaagatggatcagttgactcgtacatttgattatgttgatgcagaaagtattggggttccatgctactaccactccctcctttgtgccaagctatgttactcgtaaaacaccgtccaggaaaacattagagtacaaggctccaagcttggaaaccttgactcttgtctcaagaataccaacaagaccaacattttgagaatgaatcaattgcttgatcaaactttgttttttttggttgttggctcctcggacattccatgctagtaatttatccattttgtagaggaggttctccccctcttcctatcgtatcttgttctgagctttgtaaacctgactgtacaccattagcatcatcttgttctgagtgctcatccagaatgtcgaatgcattctctgtgctggtactttcgtgctgcactttcccctttggtttccaacctttgctaactagttgaaacccatcagaacccactgtaggccctttcttttcttcttcttttttgtctttcacaacccactgctgttgtttttgaaccccttgttttttcctgtaatcatcagtgttgtgtctcaggccattaaaatttttgcatatggtgggcttccattcgtacttaatccccactgaagcaatgcatccatgttcatcgatcaaattctatcttctctggtagatcttgcttcatagaaacctcaataagtactcttggaaaagtgagtttctgcctttgtttggtaatttcatccaccagtatagggtctccaatctgccctactatcttgaacagagtattttggccccagtatttcaatttcaggttttcaatttgaatccatataggaaccttctgtatgtctttcttcctgaaattggtatcaggatctcatgccttcataatcactggcctcttgctgaagaatgtgtagcccccattaagtacattatccatgtcttctatggaggaaaatataattaagaagatgccatatgacactacaagaaatgtcacttttgccaacatattttgtgctaccaaaagttggtattgcgctggta

SEQ ID NO: 300362 - DNA, 1867 bp, Cannabis indica
aaaaaaaaaaaaaacccttaaatcaacaatttcatataagaaatatatatttgaaaaatgatgagccaaaattgttgatatataattccttctacaaaacttaaactactacatcttcccatcactacagccacttccaaaccaatcaaccaataaatgaattcctgtacaaaattcctacctatttcttggaagaaaatttcaagataaacaagcctatgctcaataaataactttcctccaatctttcttcttcattctatacctaaatacctaaccatcatctcctaaatacatatacatgatgaagtttagcttcatccttatgatccttcacaatttcgaagccgaacttgctcatgagccttaagaacctctgaactgaagctaccaagagcctcgaaaatcggggtcaatcccgcttgtaaactatttgaagctgcatcatgaacaagtttgacagcctgcttatgtcttgccttttcttcggctaatttctttcgcattgaatctaaatcgacttttaaatcatctaatggagaaattccactaccagaatggacttttgacagagttgttgttttgtctgaggatgcatcgcgatgatcgtgctctagttttccattctccatgcgcaagtgtctaagtcgcttatcgacatctttggagagaaactctgctttaattctctgtcgttgttcctcgtcttgtctttcccataattggcgcagtgttccagcgaattcattcattgctttcgataccttttgttctgaaattctttccattgcttgaaaccaatcattacatattacgaagattgctggtgctcccatacggctcggtgaaaaaggagctataccatctgctgtttcttcgggttcgtggagaagacaccttaaaagccatccatttaaggactcaacataagatttttgcatagtaacccaattgttaaagcagttgcaccaattcaaaagctccatttcaagttcaacagtagctttcagacccgtctctcttcgagtggcgtgcaccctaagagagcgcattttactctccatgatagcttggaattgtttctgatgacacttaaacatggacttccacattcttatcaatctacacatacgaaacaaagaattcaacataagtaaacaatccaaagatattaaccaaaaggtgcaactgaaaacctagtttgactaaccgatactttagaaaactacaatttagcacaagcctcattcttatagcataatgaagcacaaccaaatatgaaaaaaggacaacaaagtcgtgcaaacacatacccatgaattaattccgtgatttgaggcaacaactcttcatccctcaacttgtgtatcctagatgcaatggcatcgacagcctttatacaaatattaagttttgtcagtaattttcggattgaagcttgggtagcatcaatcttcacgggctcagctccatgctcatctaggtactttagtctcttgcacatcttctcataaataacgcgtaacctttcttcctcctgatgcacaaccacacaaattaggaatcaagatccaaacaagaattacatatttcattgttctttttttttctttttttaaatgaaagcgcataccttaacttctttataaagcttcttctcccaagcataaagtttctccagagtggaagaaaggtttccagacctcatttcagactcttttccaggacctccaccgtatgcttttgctagtttcaacgtttttgatgatatccttacacgccgcctgggtgggggccttgaaggggctataatgtacagaatcctggaaataatcactacacagtagaagatcataagtttcaattg

SEQ ID NO: 300363 - DNA, 1124 bp, Cannabis indica
cccattcatgatattttatctaaagaaaaaaaaaactatttccatttaccttcaattcatctaatgagattagttggtaaggacagaagtgaacatttgtgaaaagaatcaagtacaagtaggttcttaaaaccaatcccaaattcaattcattgagaataataaaaaagaaaatatcaaaatcccaaaatgcaattcgtttagtatactatatattaattattatgtggtaaatgacaaaataaacgtgaacgttaatgaacatgcatattcttattgttttgataatccatcaagtttttcatcactagcttttatctttggtttttcctccattcatattgttttggcatttggagactgccggcctaaaagtaaaataaaataaaattcaaccatccaagtcaaactagtgcattatagtaagaatttatacaaaaatgaatctaatgataatagttataaaagaaaaggttaagtaagattgtccccttatatttcgtgaaccaattccatttaaggaaatacccaacatattatattcccggttaatacatgcacctctccttttgaaataaataaataaatacatgcacctctcattatgcacctatggcaaggtaagagttacacataactgaaactaaactaaccaaccatttctcttattggcagacaaagcaaacttatttccattgagaaaacttaaccggcattatcttaatgtgtccaatattataaataaataaatgtcatattattgatgtaatttaatgtaaaatccacatattttaatttaataataaatagtatagaagcttgttatattaaagtatggttacttttcttattatagtattagacattttaaggtacttaataaatttgtcgttaatagaataaattcatccttagtaggatctactcataaaaatgaacctaattattttgaagccaagatagatatggatggtcaacatgctgagataacatactaatttatatatactctgtattaatagttaaaagaaaacccattttggaaaccatcaatgttgttactttgtaaatattatagatatattgatttaataaggaataatttttttttactaaaataattg

SEQ ID NO: 300364 - DNA, 2153 bp, Cannabis indica
aaagaaaagaaaaacagaacaaaagtaaattgcaattatataattcttctgattaatatactttttgtcccgactgtgtacatatcatatatcagcagagttaatttcacaaaacctcaaaatcatattttaagctcaaattgctttcccacagaagtttagtgaattcgcacaagagtaccagtcaaaaaattgcaattgcgaatgaacactccaatgagacccctttacagtcagcgcggtaatagtctataagcataagtggcacataaaaatagagcaggcaaccactataaatgactttggcaatcagctcagttataaattttcttcctataatttccaaatctctcaaaacatttaaactataggaaattgataacttcaggcacacaaacaagaatatgcacacttgggttagatatgatgacattgcaattatcttctgtttacagaagataccgacctgatctgattggctcacatgcaccttttgcccattacaaaatgctccaccacctaacataaggattgactttacgagctgaagtatgacttatttgaaattcaaaacaggcaaaagagattaatagcatagaactttcttaccagcagtagcagaaaattggcgggtattccaacacataggacccccaacaaattccacctgaaaaacaatcacactagtaaacaaccttatttttgttgggacaaggagataattaaagaaaatgccaacattatcttgtgagagaataagaatcctacactaatgcagggaaaacagtagcataacctaccattgttttctttttttcttttttttttttattcagctcaaacagaatttatactatgtccacctagatgacacatcaccatttttgtagataggagctcatgttacaaagtgattctgataagaaattgttacaaagttataaagctagcgagcatgccctagttatttcagataagggaaagacaaataaatctcaaagaacaaaatttatctattaggatcattaatgtttattaattttaatatcagttcagtgctgaatatgggaagtgtcatgtaagtgaaaaaaaaagcagactacctgtcataacaaaatcaagttgttagatccacaagcaagctaacaactaagcaacgttgcaaatgacatcaacaaaataatcttaatccaattaatttgtaccacagaagcagcaacaggttttcctcgaaacaagacacccacggaaactgcaaagctaggataacagtgtgcgaaatttgttgtgccatctgtgaagatgtgagaggttagataacttcaaagccacgtgatttaggaagcttaatttactttaaaataatgtccacgttacatcatgtgtataatatcttccaatgactacatcttcataaatatgtattgaatagagcacaatgccgaacacgtagccaatataataagcgaagaaattactgttaaataattatttagggttattttattttatttttttctttttttaggttagttccctatataactactgttcgtactcttatagtagtggcatcagttcaccaatagactatatctcaaatggatgttaagaatgcctttctaaatggtgacttacatgaagaggtttacatggtccctcctcttggagttcctcataagcaaggtgaggttagcaagctgaaaaaagccttgtatggtcataaactggctccgcgagtatggtttcagaagttctctactactattattgtgtctcttagttatgtctcaagtaatcatgattcacatttatttgtcaagtgcacatatgcagtttctttgtatgtcgatgatatgattaatcatcaaaactaaataaatgaataaaaaaaataaataaatataattccgtttctcatctaaattctgtttctaggattccacagaattctatattaaaaggttatgtggtttattttcactagtaataaacataaacttaaaggctttggacaacaacgcggcactactataaattagtgtgtgatcaaataccaattggggcatcagttaaatcgtcttgatgttttattcaaattgaaacaaaaaaaatgtgcatgtttaatatagcaaaaaaaaaaaaaacgaaaa

SEQ ID NO: 300365 - DNA, 3386 bp, Cannabis indica
agaaggttcattgttgtgcaatttggatgcccgtttagctccagagcatttactacgtctttgtttggagcacaagcagaagtttgttccatctcacaaggctgcctgcagatataacttctataaggtttagcaactgctggttttttattttttattgtttatgaaatacatttgttctgtttgagttaactttaatttttcgtttttttggagtaggattcaaatgctttggagatgtcgaaaatggtgaaattactccagcttttacaagagcgactttattctcttttaaaagaatgggaagatcatcatgaacttcggaagatcttaaatgtgattttggcgctcttgaatattccagtaaccacaccactggctaaggtattttttttttttaaaaaatttttactgcatattgggaatcatagttcttgaatattccagtgaccacaccactggcttaaggttttttttttttttttttttttttatatatatatatatttaatgcgtattgggaattatagtttttactaggacattggcttttacagtatgtttctatctgtgtcagactacagaagcagttccatatgaatacttgatgctggagcttttgcttatcaaaataaattgattctctctttttcttttgtgaaggtgctgacaggattgcaacttctagttaatagtcttcagttacttcaagaaaatggttcaaaatttccaatctttggtaagaatggtgtgactaactaaataaatcgtgatgttcttaactggaaaggtggtaggatttggtgcctgtttatttatttatttatttatttattggttcctttagatcaactggaggatattcgtattctggtggagtcatggcaaaagttggagtttgggtcgtggccagttttgcttgatgaggtgttgcatcaatatgatctcaacgcaggaaaggtaaatcactgttttatttttgtgagcttgaagacaacattgatttgagaagcttgattttcttgggaggatggtagctatgttaacatagtctattgtgtactttcctaataaactgtttaaggtagatttaggaaagtcatggttgcctgctctcaaggaatttagggacgtttatcaatgggccagtttgattaaggcttcattctcttagtttatttatttatttatttattattttttaattttctttccccttaagccatatattgaagatgtttatcagtgattctctatttgagatttggtgtgtatatctttttcttccttggattttttattcaaatttttggttaaaacttctgcaatgattattcttgaaaggactagaagtttatatggactttcattgtctttctcatacctggtactctgctcggcgactgtgttattgatcgaacttactataagactatctgaatcatgagtcacttatgttgaccttctttttctttatgttcactttttaactttagatctctgaaaattctagagatgctgtgacatttttatttatttatactatattaatctggtttctaatttttctctcttaaattcagttgtggtttcctctttatccaattcttttgaagcagagcagttctggtatgaataataatatcctaaggtatgttcagaacttgactgtgattgtaaggtttgtctttcaaatgattttatttaatcactttcttgagttgctgttgaccactacataatgttcagcttggaggattttatccaaacatccagcattggtgaatttagaagacgccttcagcttctctttgctttccttggtcagacacatatgggttcatgtgtaaacttttattcaaggtgggatctctgctttatctaattattgttgcgtcaaagtatagtaaataatcatttgaaagtcatctttgctatgcttatttgttaaatatttcgactgatgaattttcgtgaagagttatattaattgttaacaaatcttgcagctcgtttgtgatggaaaatctgaagattctatacaacgtttttggcttttatgtgcaatttttaccacggtgagtctcttctttatagttctttatatttctccatgacagtatatataaattggtgatattatttttcccttcagagtttctgagcacatagaacataccagaaaaggtataaaggaggagctgaagcaacttccgaaactatgttcatggggcattaataactcaaagaagacgaggcagagatttaagaagctcatacagaagtatgatgtgagtaatacaatttcaaatgttggtagagtttattgcaaattcccaaaggatcagattcttaatttttctaagctatgaaggtctagatgacgatgctgcctaacatttgtaaatatattttataagaaactaagaacgacacagagaactatagattgaggactgggatgcccctcctagctagaataaaatgaacggaaatctctaaactctttgttgaagaaaccaaatgaaaaactagttttagattattgtgcaggtacctgtaattaccagcttaattaaaatatgtagagtttgtaatcgtgaccttaatttgttattgcaggattttctgcaacagcctgtgatgctttttattaacaaggatgcagagcagaaaaaaggaaaatttcaagcagcacatagtgaaaagttggtcagtagttgtgcttctgatgcgatcctgcccgatgatgatgacaggtttgtgtttctgctttattggtttgttatgttctattctttttagttgggatcagaattcttacacgatgattattttataaggtttatatggtatgatgattggagaaagaaagcagatggtgcttctaaaagtttgaagcttgagttactatctgaaggtgagaaatcaaatggtgcttcaaaaagtccgaagactgatttaccacttaaaggtaacggctttttctaattctttttactagcagactttactgtttctgttagatttttttttactctgatgtaatcataaatttttgcatagcctaaactatattgaaatggttgcaggtataattagacgatgctcgacttcccttgccactagtctttcatacaaggatgcttggagtgctgtattgtgcaagctgaacagaatttctagaattgctgttgattgtgatgaactctggaacgaagcaaacaagggtcaacagaaagaagagctttgtctgaacttctgaagcttttagaaagcactggactgtctagacataaacctgtgtttacagaggtaaatctaagatttgggtactttttaataagttgcttatttctgttcatgatactgctctctccctttct

SEQ ID NO: 300366 - DNA, 2381 bp, Cannabis indica
taaacaacaacaggattctcctccctatcatctcatcttgcttaaactttaactgtgttttacgttttctgaatcactttaattctcttaaattataattgttttcgatttaccaaatagaattataagtatagtttagtggtatttaatccaattccctgtggttcgacctcacctgtgtgagtttactacttgattgcgtatacttgcgtagtgttaataaatttttgtaacacatgcctatgtatactatgcaaaccaccaagcttttcaatcggatggtggctaaaattgatggcatgattaaggatttctggtggggttttgagaaaaagaatcatgggctccacctcaaggcttgggacaagctatgcctccctaaatcttgtggtggactaggcttttgtaaaataaaagagaatcgggctttttctggctaaatggagttggaatttgttagccgggggtgactctctgttgtaagattctgtaagcaaagtacttgcagggtaaatgtttctttcactatagctacaaggactctgaatcttgggtttggaagaatgtggtgaaggctaaattacgatttggaaagttgcctgtaagttggttgctgatgggaatgatactaaaatctgggaggatccttgggttgctcacggtatcgatttcttccctaaattagtggcaatccttcctttggctatagatgggttgcaaatctcttgactcataacgaggattatgacctccaaaaacttcactacttgtttgatcctgataccattgcgaccattttgaaaggaggaaagccttctggtaggggaagagactcttagatttggattgcagatctcttgactgataacggggattaagaccttcagaaacttcactacttatttgatcctaataccattgcagacattttgaaagggggaaagccttttgatagggaaagagattcttagatttggactaaagatagcagtggaaaattctctagcaagtctgctatttaacccaagcccttgagcaggcacctcactgtttggtctcaccctccctctggaataaactctagaatagttaaattctcgagcatcataagattttgtggtggagtatcatctcaaatgcgcttcttgttcaatcaattctgaatgaaaggtttcatattgataatcccctttgccctatttgtggaaataaaaacgaaattatggtgcaccttttcttttggtgcaatttggctgttcacttatggcggtcttctccttgaggtattttccagttttagactctggtattcgtatttgggactgggtaaagttcatatggagtcttaaagataggggcattgatgtgaatgaggtgtttctgtgtgcttttattgtggtgaatacaatctggtgggcgagaaatgataaaagtacataatggtattttgggaacattaaatattatattgacttgttacactgattatagagttactatcattcccactcactccccaacacaaatggatgtttagcatccccctccgcttgacaaattgaattgtgaggttagagtggggatggagtttatgtgtattactgttgttgctagagattaccatggaacgttttgttaggcagttacgtctaaactcgactttacaaatgctttatatggcaaggttgatgcttgttgtttggttgggagaaggcgacgaaaaaggggtgcgatttcgttattgttgaaagtgactcccggatggtgatcaactctcttaatggactagaatccaattgggaaattaaaaatgactcagctcactacctaaacacttctttattttgcgggttgtgtttttgctgatgtagttataattttttggcccataatgtggtgaagtggactttcacccacaatcagtatagttgtttagatattaatgatatttcttcaaatctataattgtaatgaccctgtaatttaactttttttattatattaatattaatgccttttcttttaaaaaaaacttttgaaatttggttaacaaaattatgatccctaaattgtaaaatatttctcttgaattgtaactaggggtgggcatccgatccaatccaaccgatcgattttttaattggatatccaattacatacataaatttcaatataagattaaaaatataatgaaaaatacgtaaaaaactaagtatcactttttatttaagtttaatacttcataaatatactattcttacaagtgtattgtagctaaaagttttaaatatttaaaacaataacatttctaagtaataaaatagaacaaaacatcaggaaaataaatacactaaacaatcaagtgttacaaattcaacata

SEQ ID NO: 300367 - DNA, 4415 bp, Cannabis indica
aaaagagattgaaaataagatcaattcagttaatctcatggtggtcaggcataaagtaaatcaaatacggaaaaaccctccaacaccatacataacatcaacgcttcagcaggatgctgctaataaattgcatttttcatcaacacatactatgaaggtttggggagtttatgttattaatttgtctttgtatatctttccactatgcctgttaaattggttttccgattgctttaacattttttccatttggtgcagtaagcagatgactgtcagtggttattttttgacaacctttatgtatgtgttttgctaatagaatttactaattgtcaatgcagcttgcacagaaactttatgagggggttcagttgtctgatggcaaagcaacaggtttgataacatatactcggacagatggactacatgtatgtatgactttgtacaggaatattttcttgcattgatgtttacatgtaatgttttatagtggtgatactattttttttctaatactttttgctatgtattttagatttctgacgaagctgtcaaggacatacgctcattggtaactgaaaggtgatacaaagaaatatccatttttaaatattatttaagttatggtttgatagaagtactgcttctgctgaagttaagacctagttttgtgctacttattgcccttctattttcagttttagtacaaatcatgttttacattattaaataaaattctatatatgtcagcaaaagttaggttggatgcatttgaagttaagagaacttatatctattcatgtgaggatggcgttggtagctggctggagaaattttgtggtactaatagaggttctcgtcttaattttaaagacagccagatatagggaggggattgggatagatgaatatttaatataagtgaattcatatgaagtcatatgaggtttgacaatagaagcccattatttctaaagacagacagatgcttactagtttcttctctttcaagaattgtttacttgtatgcctgtcatttgtgcaccttaatgtttattgaaatgcagattatgtgatttgctactgttgaactagctatatcttttattttattagttaataaggtcattttctgcaggtatgggaaaggttttgcatctgtaggtgctcagaaatattttaagaaagtgaagaatgctcaagaggctcatgaagctattagacccactgatatttcaagattgccatgtaagtatatatattttgtgtattatatgatgcttgctatatgttttctttattcctgaacattttcctttccttgagtctcttgtttttattctgaatttgttatcaatatctttttgatctttatatgactattaatcgtaaattgtttgatatccacctgtagcaacacttcaaggaacacttgacgaagattccttgaagttgtatactcttatctggtcccgcacaatggcatgtcaaatggaacctgctaccattaagcaggttggcataagaatttccttactattattgtaggtcgaaagtaaaacatagctattctatttagaggatgcctgaagggtggcaattttatctttttgtagacaactatactttttttgtgtactcaaaaagttcctcctgttaaggtggtgcatggaaaaatttatgatctgcatgctgatatatttatttaattcaaccagatacaacttgatattggaaatgccgatgagttcattattttccgatccacaagctcaagggttgagttccttggatatcaagcagctttcaaggtaccacccattttcttctctttgcttgttttacatgtgcctctatgtcgttaccagatgtaatcatgctcgtcactttgtcttttgagtacatttttgttcttccaaattactattgtatactgcactgctctgtgttgtgttttagaaaaatgatctaaatcaccttgcatattctatttgacttttcaattctcatttataagaaaactagttatattgaagagtcgcatacaacctttctccatagtcatgaataattttggaaaacttgagggattatgcattctaataggacgccagccttaaaaattataggaaaaatatgcattccttaatccttacaattttggacaaagttgcttctcccattcaaacaccctctctctttaaacatccattgtttctcaattaccctcacaaattcgatccaccctaacaacactgctacttaccaccaccatggaagcgcctacaatatttttgtgagtaatgctacatacacattcaaattacacactaattatacacaatgatgtgtattaaatattagctatttatattttatatcatttttaattttatggttaacattaattacacaacattgtgtgtagaaagtgtgtgtaatttgagtgtatccaaatcattattctgtttttattgttttggtaatgttaataattataatctaatccaaaacttgcaaccaataaaatattgacttaagacgctaatttggattttgaacaattctgtacaagatatttttttttgtttgcgtttctcagtaatgactaatgatgacgccaaacgatattttgaggcacaatgcttcggcgatgctcttatgatggttcagcgataatcccttgatatttttgtagtaaaaaaaatgatgcgccatcgatgctacaacaatggtcctttgattttttatttaaccaaaaatgatgctccagctatgctacaacaagagtcttaaaaacttggtgtttgaggtagaaacgatgcacctgcgatgctcactgcatcgttttgatctcaaaaatcaagttttttttatggaaacattgctggagtttttggcctaaaaattaatcaaatttgcaaggaaccattgctgggcattggttttggtctcaaaaattttcaatgtgtgtcgttgtagcatcgctggagtatttttttgcatccaaaatcaagttttcaagagtccattgctgtataattgttttttgcctcaaacatcaagtttccaaaggaacattgctggagcatcgtttgtggcctcaaaattatgttttcaaaggaccatcgtgggagcatcgtttgtttaaaatttgcagaattggaagaaaaaataagtgtacaaaaccacaaattttgttcagatttcttcaaaatctttaaattagtgtcttgtcatgtgtgattattttatttggctgaagttttgtattggattgttaatgattaaaacattaaaaaatatcgtgggtgcttccgttgtgagggtggctgccaaacaatggatgtttagagaagtgagaaatgagagagagatgtagggtgtttgaatgggagaggcaactttgtcaaaataatttaatgagggcatattttgcctataatttttaagattgtctgctaaaactaattttcccctattaggacacataatctttcatttttaaaaggttgcttagagcctttttagcttgttttgtgcagccgaggtgtgtcaaggcattgacccagaggactactttggggcatgtgcattttaaaaacgacacagattgtgaatggctgttaactaacttcattattttgttctatcctgaccaaaataaattttgagaagtctatgccttgacacctcccttgactgcctcattcgttttaaaaacaacagactaagtgtgcgaattttattttgggagtttgtccgcaacctctacacaagacacatacatcttctacatgagacatgctgagctatatcattacggttgaatccacctgagttactgtgcaataatccttaaaaatccaaaaaaattgtatgtttgtggtatttagatgaatgagaaagctttaagtttatttaaataaatgaagaaaaaagcgagatgattttattgaaaacatgatttctttaggtctaagttgtggtatgaatcttgatgttttcaatttcatacctttgcccccattttctttctcctaagtacatatttcttatttttttcttttaggaacaaaccttgtaagtacatcttggcacttctgtctgtccatgtaatttcaaatattgctatgctctaaaaatcttgtttttggttttgggaaattattttttatgggtagtttgagaagattaattgtaaagttctacacttcccaaaatgtaggtaattttttttcaattgtgcaattccatagttgggatctaggagggacatctgcctcctttttagttttatgttccacccctcctcttttttattgtctttcaaattgcatgtgttgctagtgttttgcacttatccccgattttgtaatttctggatctgttttattttaggacatggaagctgc

SEQ ID NO: 300368 - DNA, 698 bp, Cannabis indica
tggtcattataatattatggttgagagttgtgacaaattcttactatgtatccaatcagccgagattcacgtcaattaacggtcaccaaagtttatattatataggttaccaatatagtatagtagtgaatgtttacaatactatatatacacagaattattaaaaatacatacaatttatatatacaaaaatattaaaaatacatagtgattgaaattctaaattatgcatcataaattatctgaaattctctaaaaaaaactcttgttaaactaaattaatttataaaaacaaagtttttctaaaaaaaaaaaacagatgtcataaaaattaaaaaataaaattatgcacaaaaaaatttaaagaactttttaatagtgattaaaaacaattactaaccaacacttttctttttatatatttatttggtagattttaattttattgtttaatcactttataggaaaatcaggaatcagcttaagttggaggcagagagcaaatatagctattggagcagcaaaaggtacagtaaattttcacacacaatacaacccaacaaaactaattttcacctcctaaaaatgatagagataattgctatggtatagttaaatagtttgctactgaaatatatatatagggacacgattttgtcccgtgatgtactttcacggaatgcattccgtaatacatt

SEQ ID NO: 300369 - DNA, 2101 bp, Cannabis indica
gagagagagagagtttggtgatgggaatgagaggaagcaagttgggaaagttgatagaaggtaaaggatcactaaaacgacttcgactgagagggtctccacttccattgacaccaagaggttatgtgccgatttgtgttggattagaagatgagttaactaagcgatttatggtccggacggccttatttggcgatgcccatttctcagagttgctctatagatcggctgaagaatatggcttttctaatgatggggttttgaggatcccttgtggagccaaggattttgaggattggattaccaaacactcctccaagcccaacgtcttcagggttaaacccctttgattattactcattattttgtattaataattaattatttgttcgtacagaatatatattacattagtttctgggaattgtggattagtgctggtagtggtaggtaatgatgttactggtatatatgaaataacataatattaagtactttgtatgttctttttatatattccgataaaaaaaataaaaaaaaaagtattagatgaaattaacatttgtttataaattttttgtttagtggatcgatctaattattgccaatgatgatgtatatatatattggtatgaatgaaccataagtatactcctgatcagtgattggcattcttatgcttacaaagagaaagaagtcacatttttgtaatcttttgctaagaattaatggtcagtttagtaattaaatatatgatttgctataaatatcacttaatttggtataactagaggagtgcacataatttctcatattgttaagtttatttatttattgtcaggaagtttttttttctactagtacgcaagttgatcatatataattaatcaattagttgccgtttgttcatttaaaaataaaatgttaattaaaagcatataaacaattatttgaaacaacacttggcacattaatttgaaatataagaacgaagaaaatatatatacaaatagtatcacctattatatttgacttctatcttaaatattaagatgcatgtctaagaccaaatattgaaaatgttaccattatgtaaattaatatcaacaacatctatcagattgagttgcagtgttgcacccatctttcttcttctattttatttcttttgagggtataagcttgcactcttgcaatattaatgtaaagaaaatggaaatggaaatggaaatggtaatgttattattttgggaacttattattctttttacattatttggaactttcaaatttgtcaccattagtggccagcaatatactcttcttctgaacattttgtccaatcgaattagtttatctttttccctcaaaaggaaaaaaaaatagtttatatatctttattattataataaatattttccctagtattgaatttatgtaatcgaattacgtttatatataatatattaatcaaaagttgggtagaaaaagtagctagaaaagccaaagccaactgtacattaaacctaagtgttgctctgcataactttagtgattattgctagtactttaggaggccaatgcattgttttattgttttatcatatatatttttggtcattaatatgggtgtgtggctgtggcccaaacaacctagctcagctcagcaattgtatcttctattcaatctatttttggattcttccaccatatttcattaacttcacacccaaactatattttgtttctatattcaacagattcttcaggcagaacaacactcaactaatttaaaatgtttgtaatgaacaacacccaacaaattgtatggcctcaatttggtccaatgggcaagacccatagtaaatgtaaccgcacacagtttatgacctacttgcccactcctgttattttggctatactatgccactgctctgatttccttacatataataaagttttattattaaatgtttaataaatggctgtacatccttctacatattactacggtatattttttcatttttctattatattagtgtctctagtgttttttttttttttattttttgtaaatagctaaaggcacttgtggtgc

SEQ ID NO: 300370 - DNA, 2370 bp, Cannabis indica
attagacttagattaaaatgaaataaataaataaacatgaacaaatacaatgaattaaaaaacgtacattttttgcacacaatctgatgacttcatctttgccgagtgtcacctccttactgtcacaattcaccatcctgggaaagcgatgcaattttctaatcgtaaatttctcagcaagctctaggatggactcataatctcaatactaaaatgctacatcatatccatcggccgagtactttgaatccttctaaggtattcccttttcaatcttcctatccacatgcttcttcttttctacgaagtccttactctaagtttctttcaacaagttggaagaaatcttcctccaggggtacttgtagaaaaacgagaggttgtcagtgattctcatgataaatattggcggaactagggtcttctcctctttcccaatcaaaacacccatcacaaatagcgcaatacccaacttgtaaacatcatccttctcagtgcaactcttaaagacgttgcgtagtcgaccaatgctgatggatggatctccattaaagtattctactatcaaacggtctgacgtttccttcttttcaatctcagcctcaattggtccaggtaacatgttaagcccaatcactagggcaaacttagtcgggcaaatcggcatctgttccttgcaatgtaaaaatgcacttcctcatccttatctaatttgatcttatgcatgaacaactgatggataagtgcacccgaaaatgctaagctctctcaaaaaaatttttgaaaggagattcctccttcaccctcttgtacaactccatttccacaaatttggctttcactttgagtaataccaactaccaccccgcaaagtcacacaaccagtgtaatgttatgacattggaagtaaaaggcgtgtaactttagaagaaaaaaattaaaaaaaaaatggctgtcaaaaaatttgtgcataagcattggactactattgggccttgcatcagacatatcaggccccaacaaaaaaatattttcaaaatggcaattgggcccactattgggccctacattagacatatcgggcccaaaaaaaaatatattcaatgttgtaatcgggcccactatcaggccctacatcaggcctattagacctaacctcaaacttatgaatgagaaatctcatcgggcctacaatattgtaccttatcgggcccacattgggccataacaaaaaacaaaaaaacaaaaaaaaaactaaataaacattgggcacctatcgaaccccatatcaggcccattggacacaatcgtaccctacatcggacccatcaggccacaacttcttttactggccatcgggctgaccatcgggccttttttttcatcccagatccaatttttcctcacggtgcatcggaccgagctaaatctaacccaaaaatcacagattcaaatctaaccctaaatctaatcaatatcagactcgaaaaacgatatcaaaccctaaatctaacaataaataatattttaaccctaaatccctaagaaaaacattcaaaaataaaatggggggaaaatttaccttggcctccattggtggttgttccttttcgtggtgggtcgattgggtggtgggtggagtggatcttcctcctcagatggtgggtcgagtggtttggtggctcttttccttcgtggtggtgggtttggtaggttcggtgggttcaacgggcataaagagaaagagagaaacgtgaggaggagagagagtgagttttggaatgagagggttaaaatggggttttagaaaaagttgacctatttaacaaatttgggatagtattgaattagtgggtcaattttagtccaagtaatgcataaaaaaatcaaattttctatgccatttcacgtatcaacatcatcattatcatcatatctttcttttttgacaaatagaacaacaaccaagaatttcgaatggcccacatattagaaaaccttaaaatttaaaagagcaataggaaaagaatgtcccacatttgcttaaataattttgtaaaaaattaaaaatacgaaaaaaggggttctataattttttaaaaattatttcctaaacacgatagaaaaatttggttcccgtcttctataaaccccaaaacctattcactattcctattattaacattaattagttctcattataaaccgaaaaatcaattcactcactcactcaggaaaccccaaacaaaccctataacatggctgtcgtacgatcaggacgtcctcatctaaatctccaccttttcttaacgaaactcttcgatggtcctgttgggttttgtgctccaaataaaacccatttcaatataa

SEQ ID NO: 300371 - DNA, 3931 bp, Cannabis indica
aattaatttatcaaatttgcgtttgtttcccgagaaaattcaggagaaaagttttgagttacaattgcttttataataaactatatatattttcaaaccataccgaccaatttgacgaaagcgaagaactaattttcacgaatcttcgatgttatcttaacaatttctgaatttgtctctctcttagggttaaacaattgatgggaaacgtcggaagcaatagcgtcggtcgtcggaggaatcgtaacaattcaactccggcgaatcaacactctccaccacctcctcctcctccgccgccggcggaaactactgggaatagatatgttttcgcagctgccactccttacccgtctcaatacccaaaccctaatccacctccttactatcaccaccacccgatttactaccagccaccgcctgttccgtctctgtttcgcggtggcgggatgtacccgggtccgggccctgttaatggtaactgggtcgggcctcagtacccttacggagccccggttcctcatccgggtgctggtccttatatggatcatcagaaagctgttactataaggaatgatgtcaatgtgaagaaggagactctaaaggtcgagcctgatgaggagaatccgggaaagtttctagtagctttcacttttgatgccacagctcctggaaggtaaagaattttgtttgaattttgtgttttgactttgaatgaggtttgaaatgtgtagtttgacttgttgtagtgctgtgttttgagttgactatggatttttagaattttatgtttgtattgtactttagaaatgttaagaacatagtgttccacacattttaataataatataggaaactgctaaccgatatagtgttaggctcttaataggaataatcataatatacacaggtacatttatgtcgctttgcgattggctagtgatactttctaaaaattattatattaaattatacgagactcgatacttgattaaactaatagcgaaattgatacataggagggtgctaggcactactgtgtgccttttagcatttctctaagacaacccatgagtgaaatagaatttaatgttcaaaattggttagtcttattgtgaatgttgtggggttgtaaatttatatactgacaggggtgagaaaggattgactctgattaaaatataaatattggtttttttttttggactgagtcctctttaagaattggactaaaagggcaaactgtacttgcagagaagaagtcaagaaagaaactttgtaccattgttatttgcggaaagacaatagtatttagtttctgtttaatgttggaaacctagttggttgtttattttccattacaataaatgacattgggtatttagtgtgtgagaagttgagaataaaattggacccccaatgaatgtgaatattgtacccattgaagaaagcatatagctttatttgagacagaataaaaagtatatttcattaagctggctaatttaattgaggattatgctctgtaaactcatggtattgcacatttatttataaaataaaataagagagattgtttaattgcagcagattatgcacccttccatttaattagctattttcactctgcataagtggaagggtgtaaattgagtttggacccttgacttggccccccaagtgcagaagagagattgcagtgagtgtatataatgtaagttcatattagtggagatctaagtgcaatgaagaacttggttggttaatgaaattatttgtttttgtttgaacattatacttgtaatttataaactttcattggaaagagatttatgaacataatgtggtggtttaaagtttatgcctaatatcatttaggtggtagcttgaggatctagtcaatccttcacttgaatttctgtttcatccataatttagtgtcataatcagatgtaatcatatccataaactctgcacatatcaattttcaaatgtatatttagctattgtggcaaacattcaacttatttgtaggataaaatatgcattgctaactttatgtgtgtatgctggcacatacagtttgtaacattcctaatggggtttcgtttttcttctttctacaacagcattacagttatgtttttcgctaaagaagatctagattgcaacctcgaggttacaaaggaaagcttgctgaaaccagtcactgtgccttttgagcaaggccttggtcagaagtttagacaacctgctggaactggaattgacttctcaatgtttgatgagtctgagttgattaaggggaatgatacggagatctatcctcttgttgtgagggctgaagcatgcccattaaaccagaatgagcaagaatctgatgcaagttcagctggaaattctcagatcactcaggcagtgtttgaaaaagacaaaggtgtataccaggtgcgggcgatgaagcagattttgtgggtgaataagatgagatacgagctgcaagagatctatggaattgggaatacagttgatgatggtgattttgatgggaatgattctggaaaagaatgtgtgatttgcttgtcagaaccccgagacacaactgttcttccttgtcgccacatggtacacaaagtttataccttttatcctctctctcttttatatttggattaaatggatttattatgaatagatgccagtatgacagcatgttagataaacaagtcttttgttaatattgtcttgcaaattagatcagaatttccaagtcttctcgcactcggactatattgaatgttggaaagcatttatgtggatttttctgtcaagtgattaatctaactggaaagttgcaactcaacttctcagaaatagaatgcccccactataaagaggggcctgtgtagaagtgttgtgttcaaactattactattttcattagtactcttcctttccccaactattaagtgttagaatgaattaccaattgttttaccatagacttactaatatctgtgtttttgagtacagtgcatgtgtagcggctgtgctaaggttctgaggttccagacagaccgatgtcccatctgcaggcaaccagtcgagcgactcctggaaatcaaagtaaacaatggtccagatgggtgaggcccgagtatgatctgctatcaattgaattctgtaaagtaactatagatttttctttaccttttaaaactctcctttcacagtaataacaaacaggcagtcccggattcaggcacagtatagagacattatttcagtgcaattaatatatcgaactctttgtttttgtaaatgattctcgctctctctcgtcctgttctctcgacttgattatctgcagctctttgagattgatgataaagcgaccgaaagatgatgtattcattcctacaaaggctaaggctaaaacactctgatgctttgaattttcgaagttttctttcgggcgtcggttgaggtctcatgctctaaaagaagaaagggaaacatggatttgttgtgtagaaattagaattttctcagctttgtgcttctttagttgtctctggatttggttttctcccttaatctctcaattctcatctagagactatcaatgaaaaaagagaagaaaataatgcatttttcagttgaataaaaagtcgttttttacagttattaagagttgctattttattagtattttacaagtggttcgtaaaaatataagatacggaaattctacaatgcaccctttaaaatggatatattgatacacctttatctgttttagcacccgaaataattttttagtcaaatttttttctcatggtcatgtatgttatagttatttaagatatccttcaaaatttaaagaaatttggaaaattttaacacgccaaaaactacgttcaaacagtgt

SEQ ID NO: 300372 - DNA, 2050 bp, Cannabis indica
agtcttacaacacattgattttttaatgttaatttttattattaatttaacaattacttagaagataataataatagtggaaaatacattatgaaaccattaattttgggagatttttgaaagttattattgttattattatttaatcaagggtttagcaattgagtctttaaaaataaataaataaaagtgatgactgacaaggggaggaagttaccaatatcaaacaataacttaaacttaaacttaaactagaatcattagaatgtgatcccctttggttaagctcatagtatatacaaagacgggcaaaaatgacaaaaaatacaatctataatcgttttaataattttatggattttaattttttcttatagaagtacggacacttatttttcgttgtttattcattctccttattacatgaaaaaaaaaagtaatacaattaaaaaaaatttgtacaaaaaatgggtaaaaatatctataaaaaaattcgattttgaaatgcttttgttaaattttttttaaaaaaattatctcttttaattgatatattttattcgtttcctcaaaaaaaaaaaaaatcatatattttttctttggaacatccctttaattaatcgatattctcatatataatatatccttaaataataatataattatgaacacaatacaatattaaagcgtgaaagaaaaagcagaaataaaaagaaaactgaaaaataaaacatgaagctaatttcaatagattcaaatattcattaattggaaatgaatgaaaattgcttataccttcttaattattctttgcttcactagattgatatttgattgtgaaaccataattttcggtgaacaccacaataacctgataatcatgttgaaaagtttgatgttattgccttttaaagattcaagtgaataggaaacttaatttgtccaaatagatactataaatcatgaaatttatataatttcagaggctcaaataaattaatgaaagtaaatttactatatcaacataaaaaattaaactattttatacctcatttagctgtatccataacattttggcaattccctcatcatcaacatagaaaaaagaaaacacttatagctacaaagctttctactactcatttatctttatttattttttcttttttcttccaacagtcatgcatattttatatatgcttcgacggaaatatcgaggaaaaacttactttctacttttctttttctatatgtaaatgtcacgagttggagtacattttataccgtttcgacggaaatatcgaggtacaagagaaaaatatttattacttcttttttcaaatcacttttatgcgttgacgcgtattttgtttttatttttactctttctaaaaggaaaataattgtaacggataaatcatgattttttatataaaaaaaattctaataaatatattatttactttatttatatatttaaaggttatgagttaccaacatcagaagtataccaattaattaacctatgatcctacaaaaaaaaaaatcaattaacctacaaagcttaccatcctgtaaatgttttaaacaaataatcacatatgaaaaactcaacttaaagctggttgagagaaacattttctatttatagtctcaaagaggattacaagaaccaatggacaagagataggtgactctaatgttggtaaaggggagaccaccaaaacagattgagattgcacaaaaataaatgtaactaactcaaatagaattagtataagcacctttaactaatactaaataaggtatcattctcaacaccacctctcaaacgagagggtgaggttttcacaccaagtttggagattaagtactgaaatcttgaatgagacaatccttttgtcatacagttatagcaatttggtctgttgagggtatgtattgaacctccaactccttgttgaggaccttgccacaaaaaaagtgtatatctattgggattttatgtcctaaataaaactcattctaatacaatcttatttgttattaa

SEQ ID NO: 300373 - DNA, 3625 bp, Cannabis indica
tcttcttctttcttctcatctactttatatattattttataacatatatatcttttaaagtgaatttttacaccttcttttaaaatttatatttattattttttttaatcgttctactaattttgcctatattattttataatagtatctatttttttttctaaaatttttctctaacttttttacaaacttacacatccatcttcaaagaatacaataaattatattagaaattttcctgttaacatatatatatatatataaataaaataattacataaagcgctatattttataaaaaaattatatttttacgttaaagttttttgtttttaattttacatttttatagttttctttaaaaacaatacgaaaagaataaaaaaactacataaaagtaaaaggaaaatagtatcaaaacaacaacaaaaaataatatacatattacaaaaaatcaacaaattaacaagagtataatataaaaaaaccatttataaataaaattatataaatcgccaaaatatttaaaattatgtacaactttattattttaaattttttattctttttgtgaatttgtaaaataaataaaaaaaaataatactcttcaacttcatttaaggatgaaaattttaatggacttgtcttaatggagcgagtattctccgcccacacgaggaatgaggatagttatttatttatttattttcatagaaggaataaggataattttgtatcctcaaaatcatgttaaattgggtaatgattcttttctccaacaacgcctcactttttttttatcatattattataatatatgagtatataaatttactttttctccaataaggtctcttaaaaattatacgtaaatttgatgcataattatatggtaaaatatttcattaattaatcaatcatttattcatttcagatttttttttttttgaaaaaacatctttattaacaaagccccaacaaactacaaagaatgagagagatcagctttacaaataatagccaactactcaggaaaagaattgtaaaaagaatggattaacttgttttctaggcttctcctagctaagctatgagcaatttcattatttgttctttttataaaaatgagctttgtacaagagtagaataccagatatcttttgacctggtttgtaactgagttggtagcactaagatgattgatttttgccaaaaattcgtccaccaacaccttgcaattagatctaatctcaaagggactcttttcagccaacgggcaggacttcaaagttgtaagaacagcccctgcttcagtaataaccaccgaacaaataatagggaggaaatgcatacctgctgagatgatctttcccgaccaatccctccaaataaaccgcagacccacgctctccttgccaggagaaagagcagcatcacaatgaacacaataaactccctcaggggggccaaccagcatccgtggtgggtaggagcagaaatgtggttgctctctttgtctctgcagttaacaggattcagatagctgttaaaaatccgatccagcagtcgaggtccactcatatatggcaattgattccaatgcctattcctattttcccaaatagcccataagactttaatcacatcctcaaactcctgcttggatagcttctgccaaaactccaccagtaagtcaaacatggagtttcctctactatctctaataagcttgtaacaaggcattaacttccacactactttaaccttatcacaagtccaaagagcatgggaaagagattcagtgtacctgccacaaatactacaagtagaatcaatcatcatacctttatgccgcaagtttatctttgttgggagccaatttcgacaaaatttccatccaaacagcttgatacgaggaggtaattttagttgccaccacatcttccacccagcattaatgttgtccatgtctaagcaacgagtagggctaagatttatttcccgacccactctatacccacttttcaccaagtattgtccatttgtagagaaaggccaaatcaaggtaccttccatttgtgtatcaataggggtccccatgatccaagggatatcctcttgttggaaataaaggtgtagaatatccttattccactcaccatcttcattaagaagattattaacagtggtgtgagggtccgaatccggatgatggtagaggatggttccattggggcaggggatccacttatcctcccaaattcgaatgtatcttccattaccaactcttgaacgagccccttctttaattattttctgaccccacacaattcctttccatatacaagaagctcccagggggcatttggcattgaggaaagaggaggtgggataatagctattcttcaagatccgggccagcaaagagtgaggcttatgaataaggcgccacccttatttggccaaaagtgcttggttgaaatcttttaagcttcggaatcccaagcccccttcttcttttggcttacaaagcttgtcccaagtactccaatggagttttgtattatcctttgtatctccccaccaaaacttggcagccaaggagtggaggcttttgataagcttttttgggatgcgaaagcaactcatggagtaactagggatagcttggatcaccaccttaataagaatttattttcccgcttgggagaacattgtcgctttccagctcttaagcttgttccaaactttgtctttgatcacctcaaacacctctttcttcctccttccaacaaaactaggcagccccaaataattggcattgacccatttgcttggaaattcggcttttcgtactcacttccaatttctcaagattaatttgttgccccaaaagtcgtgtgtagcgatgataaatttgtttcatagtatcacattcttcatccctcccttctaggaacacaaatctgtcatccgcaacgaagagataagacactttaacatcattcctaccaaaccgaactcctctaatgtccgcagccctctcagtcgcttggataagacaagataaaccttctgaacaaataaggaaaagataggctgcctagaattggattgcagatggatgggtgttgctgcttgtgccgagatgagcaagaaaaatcgggcacctatttttgagtgtgaatacgcaaggacatgtcttaacaggctcaaggattggttggatggagtgtaagcagtgaaagcttaccccatatcatccaaaggatcgggaaatcaaaattcagtagaggtaaaaaacaaattctatctgctgttgttgcttcgctgatttaccatctttgggcatcaagaaatgctgtgatttggaaaggggagcagccagttgtagggaggataaatgaagagatagaaaggaaattgaagatgagactcacaatgtatcaaccgaagaaaataagcagccatgacaaacatttgataaaatctttgtattaaaggtaatcggcatagcagtatggggattcatgtttgtaaatagatttgaaatttaaggcctcttcttgaggtgctcttaggatgtacaaatgattggtttatgcaatacaactcactgaattat

SEQ ID NO: 300374 - DNA, 3533 bp, Cannabis indica
tattagatatggtccaatgaacattcctactcattaagctgagtttttccattttatcttttctttaaaactcttaagtatacttaattacatttataatattttgtagtaatattgggcactagtgtctctcaaaatttctctctctatatatctatatttacaaaatagttcagtaattagtttttttatgtttgtttttgaaagtatgaaatttttattaaaggcaactacctgaaaacagagtcaaaatactcgtacgacttcgaagaccaggtcacaaaatcatgtgctaagatattagtgcctctaatattacaatgagtgaaactaaaaataataatattattacacataattaaaatatcaacaataacattactaaattcagtaaataaaggatttttatcaatgaaaaaaatataataccagggatgtaaaaaaatatatataattgtatatattatagaatttatggttatattaagcaccctattaatttttaaattttttaaataatttacaagattaaaataatattcaaatatattgttgtaccgatgttttcttctataaatttcaaaaaagaaaattactaaaatctgtctaagaactagaatttctacaattatataataataacaataaaaaaacaaatattataattatcaaggtatgaaaagcacgagggagggtacatgtgaactcccctaaaaagcttagcactattattttaatttgctagttatgatcatcattgttatttaatcataaaagaaaccactcacaaagccaaccactagaaaacagcacatacttcccaattttatttctccatattcccatttggctattttgaaaaatagaaagtattgaaaggataaaaaaattctttttcaataaaagctatctaattagtctttatttatttattttctaaagtcttatatatatttaatatttgtagaacaagaccttgacactcattaagccgccacaataaggatgcttttatttatttatttatttatttatttactttatgtgattgtggatagttgctgactaagacaccacacattactaatctaatgcccctcactcacctcacccctcaactatttatttatttattattttttctttccatctttggttattaatttatagatctaaaattgatattaattaaggaatggtatcacattcacattcacattcataagttgtgttggttcaaatcattatataacatcttacaattattttctctcatattaaataaatacataaatacatcaccaaaaggaaaaagaaagaaaactatgatacatactatacgactcatacattggttgagcatgcaattaaaatagttgataaattaattaagatataaatagtgatatagttctattcaaataataatttttttctttcaaaatatgactaattcaaatgacaaaatgctttttttatccaccaaactatagcacttatagactcttccacactgttatttacatgttattctaaaaaactactatttacacatggcaaaaatatagtataacattacgacaacataaaaataacgttgaaacaacacaatcgtaaaaatataaataaaaaaaagttcataaaaatgttaaaaaattatgttttatagtgtattgtgtaaatttctcaattattttgctaggcaaaaatacttcccgagctataacacttgtagatttttatccattctatccaaaaaattaatagttcgctagcatggcagttaaaaaaagaaaaaattttcaaaaatactaatttttatgttttatttataattttatgatctaaaacttttatttacaaaaaatactcttttagagttttacaattataaaaatacaattttctcaacaaaaagtaagaaaacaacgagaaatcaatctcacgacaactataaataaactacaaaataacaaaaaaaaatctcatgacaactataatattaatacaactataaataaattatacaacaattgaaaaaacagtttactatttttactgaagaagtattttttgaaaataaaagagctcaaaaggtaaaaatgaaaattattccgtgttgaagtatttttgtattttttttctttaattttctggattattttgtaaaaatttcttaagaaaatatttattgtatttttaattaattaattatttttgaattttaaaaaggtatgttataattattttaagactaaaaacttaatagtaagaataaaaaaaggcctagaattaaataaatacaaacataatcatatttattattcattcaaaattttaaagtaaaaacaataataatcaatgttaaaactgaaatataaatttgtaaacaagtttatattatacttgaaataaaaaatcaattaaatcttgttatccacgatttcggaaggaggatacatggcattcctaatttaaaatttatcaattagagtctggtcaaaagccctaccaagaatacatgcccaacttatacgaaaggatgggtccaagcccatccgaggtctaggagacactccgccaagactagacctatccggatccaaaagggtctcccatcctcataagaagaagtaattaaaaccctccaaataagcacttgggacgcatccagagagagcattccaagaggcaccctagagacttggtacaagatgacgtgacagtcctctgacatcaaatgctatagaattagggtattgtcccctatgtcagactctaagagtgcacacaccactaaaaggaaaccttccttttgtccaacgacatgatactaacactacaatacataaaaatggcacacacatgacatatgtcaaggatcgtatggtccccaagcgtacagatcgcctccgcctcatgggctgacctcagtgtatgggccctagtcacatatttcatgtatttaacccattagttggccaagcttgcatgcaaaccatagtgggtcacgaatagacccaaattcgattcctagcctataaatactatattataccctcaagcaagggaagaaaaatgtgattgtataaacaatatagaaagaagctagggttcttcagcttgtagaaactccattgtaatacatcaaggctactttgccaaatacaattgagtcgtggactaaagttcattaatacccaaaccacgtaaaaatctcaatttccactctattaatttatttagtcactcaactcttattttaattgattttcaaaaatctcagtaaatattttggtacttttattaagaattgaagaaagctttgaagctactttatgcctgtaaccatggtggctaggggtgagcatcggtcggtttggtcagttttttctatataaaatttaaaattcgatatttcggtttggattggtgcaatccgaaaactgaccgaccaatccagaacttatcttaaaaccgaccgttttgaacctcagtttggtcggtttaaaccgcccaaactgaactttttt

SEQ ID NO: 300375 - DNA, 7811 bp, Cannabis indica
ggcataaaacccaacaataagttccaaatgaaaagtactcttaaagtgtaataactcattctcagtatcggctaacaaaatcctaagcctacacaagtacaccttgggatcagtaatttggtcaatttattccccctttaagaccgaatgactttcagatcggactttgtccaaacgctccttgcatctaatgatgcgacctagatgttcactcctctcagataacaatctaacatatctcttgtaaggatcctctcaagggcttttagagtccgaggatgaaatacaaacaaagtcggtcccaagaggtatttttcagaactcattgaaaacttaaggtggaatcacatgacaccctcacctaagaggtagaagagaggatattaattctgctaagcaaagaaagttgaggcagcctgcaatttgactctctagtcatgtggaagaaaagagttgcacacataagaaataaataaaccatcaacaactttaacaagaaaaggaacacttattttgaagtgctgaagaagaacatataagatgcaaagttcgctaaatagagagtgggaagcctacaacagaaagtaaaggaatttgaaaaagtcattcgatcgaagccttaagtgactgatggttacatagcccatgggtgagcctcactcgaccaagagagactcaaatatttctcggcataaagtgactaatgtcactcaacccaagagaaacaaatgtcacgcagctcgagagcaatcatggtcattcagacccatagtgactaatttcactcggcctaagcatgactaatgtcactcagctcgagagtgacaaagatcactcggccccatagtaactaatgtcacttggctcaagagtgactaatgtaactcgtccccatggtgactaatgtcactcggtccccaaagtgactaaagtcactcagatgtaggaggaaaaatattattcttaagtaatcaacaaagaaaaaaagaagaagaaaaatagagaaaaaaggctaaggcctgattttaacctgggacctcttgataaggaggattaaaattcaccactagactaaggaaggagttgtgaagtgaagatgagaaaggaggaacctcctatatatactaactgtatttttgaagtgcgtgtctaggaagaagtccaaaaactacctaaaggacaccatagtaactagtccacaagaacacttaaaagaattcttgttgactatgggggcaagtgttaaccccaaaaattagcactcgtaatttctaaggttagctaaccgaggcgtgaaagatggtgtgacgaatgtcactcaaccatggcctccccaaaagtcactcactcatgaccttcccaaggtcacttggccacggccttcctgaagccacttgaccatgctcccttaagtgtcactcgaccatgacattcttaatgtcacttggccatggcattgtcaaggtcactacgcaagggcaccctataatttcactcaaccatggcattctcaatttcactcgaccatgacattttcatggtcacttggaaagagcaccctcaaatgtcacttggccataaaaatgtcagtcgaccatgaaatcctcaaggtcactcggcaaggaaaccctcaaatgtcactcagccatgacattttcaatgtcactcagtaagagcaccctcaaatgtcactcagcaatgacgttctcaatgtcactcaactctgatattttcaaggtcacttgaccatggctttcttaaggtaactcaaccatggcctgaaaaaacttagttgaattttcccaagcaagaggagagtgaaatgactacgatacaatcacaaggacaaggcatgtatgcgaggagactacggccacgcctcctacaaactctgaaagtaaggaggtacgagtagtgggagcatcattcctgcatacttgatgccctaaccactaggactctgcaaccaccactcttgcaaaccgggactatctgacaccagacaaaggtgcaaagtgcaagggcacctctagcacctgagatttatagcttgaaagtgacaatttatctccttgggtccaatatgtatctcaagccagtagagcctataaatgcctcctccctcagatgtgagagggagttggaaaattattcttgcattcaacttattgagagcaatataaattttattttctctctactttgagatagtcacttacattcatgcttcatctattcttaagttataagttttaagttaagtttaattttctagccaacaagttagttgatgagctccacactcaatagaattacatcaaccaaataatcttatttattaatttaacgattatttcactataaatatggaattgaactcttagtaattatagaattatatttaatgagtttatgtacagtgtccattgatataattaattttagtgattagccctccttgtgtcagatcgtaattagtttttgttaaattaccattttacctttctaattacttctttatcctttagtaccactaattgaaagtataatttaaatccaatttaattttttgcaaaaatttttaattctagaattaacacttaaaaggaaccaaaatttgtttcattagaaaagtcaggattgcataatgattatacattaagttcccagtcattcacattattagcttcctaaaatagaagttgtaaggatcatcttttctaagaaatattaacgagtgaatcaaagaaactcacaacataaacatgagttcatgattactcagaatccatgccgatctactaattgatcatcattgtgatatgaattagatctttatagtaaatgacatgtttgataaagacaatttatttacatatcagtccatgtcaatataatctctactatatacaatactttcacttagatatatcttcctagattagcaatctgaatcaagatttgttgtttcaaataacgagaatcaatgaatcgtactatagcaaccgttgatgaaagatttcataactttaatgtgtggctgaatatttttattcatggccaatgatcttaattctctatacagtgcaagtcatgacagcatcatatatgaataacggattttttattttattttatatatatttgtatataaattattcaatataaattattaataattcaacatttaagtatatatcaaaatgttcaactaattatatttataatcaaaatgtctttgtattgtaaatgacttctgtctctcattgccattataccactacgaggaaaattattaaatcatagcgcgccaaccacacttactgtctttgaatctcctattgatcttgaaaaggttaaccatattataattttcttggtttgatatattatttggaagtaatattggatttgtgtaatttgagctggatctataatttaacgtatagaagctaacataagtaaaatatcaaagtacagaattacgatatagaaaaatgtaactaatttaaagtagttaaaaaggtttaacacaattgattttttattattgcctgaaatgcctattccaattagtgtttcctaaatttgttggaagtgggatgtataaactttgaaactatacaaatcaagcaatacttggtgagtttcttaaagaaatttagtaatctttagagatctagagagaaagaggttattttaaatctcaagtctcaaccaatataagattatagcgttaagtttagcctcaataaaatttgcattatatagtaactagctgtaatgactatggtgaatattgctcatgaacggggtgcatttttatatgtaccttctcacacaggtcacacccgagcttatactaacaaactcggccgatgtgccccttatattaattactgaagctccaaatttatgagaaacaatacatagtgatctctacttgtttatcaaaaataatacatagcctatacacacttgattttgaagaaaattatgttgttgattaaaattaataaaaattgcgtgcttcaagttaattaaacaaaaaaaaagtgtacagcaacatccatacgcctatatgtacaatttgaaattcatgaccacacatacgtaggtatctatacaaataatattaaacacacacacgcactgatcatatatatatatatatatatatatatgtatatgtatagctataggtttggcgataatattagtcataaatttaagagagtagctaataatatgagttttattgcttctgaagaacctaattaaacctagagaaggtccagcgattccttttggacccggcctatatgtatgtatacacttattctttttgtaccctatatataaaccatactataatactacatagccctagttagctattaactacatattttattcttttgtgcgccctatatatactacatactataggcttctcatcaatggactaatttgtgagacagctactgttatatacttataacacgttgagaagatcgatcctagaacagaaattaaattatcacttaattaacatagaggagacatagccagctatacctccagctatataatctagatttcattaaatatttgattgctatatattgaattttgttttgtaagagtatctccgtgaaaattcaaaattggttatttatgttgaaatatagcttattttgtaaaaaaattgctttaatggtatggacaaaaattaatttaatttgtcacatagtaaaagttcatctaaatttgtcacctagtcggtttatagggttgtctatttaaatttatttttatattttttaatatattattattaaatttaattattgcattaaattataaacatttttcatttattttttattgcactactatgaaaaagagtttaggactgttttaaaaagttgggtaaattattatcattggttcgtaagaccaaaatctataccaccgacgcaaaatgaaataatttaagcatcagttacaaacagtcgccaatgaacattccaaagcattttaaatggttgctggcatttttccattcagttttaaagggttactattgataggcaaccctataaaaccgccgactagtgaggttttatgattcgataaagaatcgaacttatttaaatgtacatgttattctttttttccttgaaaaaaacgctcttaaaaaaaatcaagatctcacctacccatttataattttgaactgaaaaaataaactacaaaaaagagtctagatttaaattaacaaaactaaataaacaacaaaatatagaaatctagtgtcaataattcccaaattcgattacaataagacttctaataatctctaaatgttattaatttaattatttacatctattgatgaaagggacgattggagaggcttgaggacaacgatctaagatataagtgacgatgattagagagagacaagacttgggaccactgacgatgaggctccatcaattttcgaacatagaaacttgtaaaaaaaacgaatctgaatagaggggaagagagaaaaaaattgtgagagagagaggccacgggaaatagatagagagagagcgagagagagaaacctgaggttgctcacctattgcccatcctatttcccccttctagggttgctcatacaatccgcaatatgtggttccaaactccaatcaatcctaaccaagctatttgaaaccagaccaaaggaatccagtgtcaatagtttagtcaatttagatcgtttataattctctagttcgctcataattttaaaattcttacttatggttcaaaccaaatcaaactgtgtaatcttttatataaacttaatacgattctgtattgatattgatatttagaaataatttcaagcataatattgatagtaacttaaatatttttttaagaatatttattttcattgttatttacatattatcagcttcaatatactcaataaaaaaattatcacaattttgaattataaattgtttagagatttttaaaaactcattatatataataaaataagaactaagaaaatcaatcaagtaaatgaaatagagaaagagattcttacatggttcgtatagtaacgaaacccttgttcatgagtcaattgtattgggctaagaagccttgaagtattacatcaattttcttgacaaacttaagaatcctaaattttttctgtagtatttgagtaatgtatttttcaaccctttacttgaagggataatgtagtatttataggctaaggtccgggtatggatatacccaagaccgactagggtttgcgtgtaacctagcccactaacagcataaatacatacaatacactgactctagcttctatgcttttacttatggacatcttgtgaaccttttgtttctaacgggtggattgcacttagccttagctacttagtccgtgagctttatggacgttgaaaaatcacgtggcaccttgatcaagtgatgacgactgaatcatgtcaacgtgtgtttcaaggaaaataaaaatcattgaaactacattaacccgttgttcgacatttaatgttgatctttccactcccgaactgttggattcaatttatattttctaggatgtaatatgggctatccatttaaggggtgcatggatcatctactctactcttataaatagagcgtaaaatttccattcaccacttttacccacttttcatttttaattcaaactttttcagaagagaaaagagacaaaaataacttttggtgaatgatccactatcttggcgagtgcttttgccttttactttgaatttaacatgagaaaacccaagagcaccaccccagacctgacgaatcctccttaagacccatcaagactgttagatttttaggcaaagattgacagacttatagctcgagcttgtaagatttggtccagaatcacatgccttaaagagatttctattatcatgccatcgctataactatcgcacaatgtctgaattcctttcccaaggtctttaacaatcccaagctcttcctttcatcacataagtatattttacatttatggagttttaaagtgtttgaggtctagggtaagatggttaaatttcttgagaatgtatctggtcaactttgtctgttcgcatgtctattgtaagagattagtggatagaatttaggcttttggggttgtagaaagcattaggttctgtgaaactctgctattttagtgattttctgtcaggaaaccaaacttagcaaaatattattgtgaatggctgaattctaatcttctggttgggacccttatggttctagatgaaacactttgagaaattccttacaaattcatgcgttctggattttgcttctgaatggcaggttcggaggggatctctctatgcatttttaggagaggactctcccataccccttctatctttttagtgtggttattaactacttagtttttttctttttcagttactgtaatggcagacgtcgtccatcttaaggaggaagaactgatcaaggggcaggccagaaatgctgctacggaagagatttacaattcatctccatgggacatggatcaaattaccaatatatattataactatcatgtgatagtcagtagtcccgtgatccgtaaggagaaataccgggtaagctgtgcaatcccacatcgcctggggaaggtcaagtgggatgattatgagactatgtaggtatgtaactacacagttgaagatggcttaaataaattgattggtact

SEQ ID NO: 300376 - DNA, 1085 bp, Cannabis indica
catatttatcataagaacttttaaaatcccatagtaagtgtaattttcacggtagcaaaagatatttttttttttttatgttcggtagttttataatttatgagtcgaattatgttgtgaagcaaaattttagtaaaagtaaaaattatgaaacgaaaaacagaggctttcgattttgttattttgttttttaggaccttttttttcccggaagatgcacttttattacttatactataacctgcacacattttaataactgttgtcggtgtagatatatatttaaaattcaaaataaacctggcatttaattttttctttttcaacgcatatcttcccgcggagttatagccttcttagacagacgatgattgatataaatttatacacgatattatacacatatatatgttttaattaataggatgaattctattaatcaatcaagtttgtcattccaatgtcaatgaaaacacaatgtgtataaataatggtgacgagtaatataatgttcaatcttattcacggaacctttaacaattttaataaaatttaaagaagctaaacgaattctacaatcattaattaaggaaccaaacaaaaatgacatatgcaatgtcctatgaattgcttgcacaataactaagtaatcacttttaataataacacgttgccaatttttatgcttaatttaacttaaagattctttaattccaattatttctgccatatcagcttgaacacgataacatgactaattaagaaaaatttcaccaaatggccatatcagcttgagctaccccacttgctccgaaaagaccttgtgacgtaaagattgttccattaacattaattatcttataatcatattcaaatttggtttagtccaatgctctagacattattcacaccatcagacataaaaatgactacatcttccttagtttagcactttgccattgattaagcaccgctctagctgataaaataacctatgctgccgaagaaatcttatcattccaaaccatatcattctgagccttccgaattgtccaagccaccatatacttgtaattaacgccccc

SEQ ID NO: 300377 - DNA, 4040 bp, Cannabis indica
tctctctctctctctctctctctctctctctctctctctctctctctctctctcatcatcccaaaaagagcagccctcttcatcccccatctctctacctcccaactacaaaacacccgaagccaccgccctcctcctccgccaaagtcactactctccgatctacctccctctcgtcctccatccaaagtcgtcgttgtagaggccaaaattgggctaaggctcaatgtcatacatgatgtttccaaagaatgctcaaacaagatcaagttggtctatttaactaattatgatggtaagatcacaacaacaagcctaatagacccaaaacaatacaatcgagtcagatattaacatcactcatgacccaatattgagctcacaatgatccaactcgtatacgagaccaagtcttatcattcatctaacaacaatatttgtagtggtcagttaaactaaccacataaataatgatctccctaataaagtgggggagaagtgcttccaaagaggggtgagcagtcatgaaagtctctccatgaacgtctataagagccactctcagtcactgagagaggcagatcaatttgagtcatcccaatacttttcacttataattcactctctcattctctctaaaactacatacttatttctgcagtcaagataggtggtaacttagttaagacatttattctcatcttttttattatgttgttaataatcttgctgacttgaccatcagagtcccctcgaccggcaccatcctagtgtcctaaggtttctcggttactctcttctttgttctacaggttatctgtgcccgcgtacgatcatcttcgattgattgtggattatagcatctacaatttggcacccatcgtggggccctaacaagctgcaactaagcaaagtgtctcgacccttatcattcagcaacccacactagagcaatggcggagcacatagaggaaggagagatcaatgaggaacaaactagctttcgtgaacaactcgccattctcacaactcaaatgaaataaaatttggagcaaacttaaccagtggaaagataaaatgcatcgttcaagaaggagaatgtcacgctaaaggtccagcttgagtcattgactgctttcatgacgacaccagataacagtcgaagaatattccaagttccaatcgatctaatgcagtcaattgaggcaaccccaatagaaggatcaagccaagttactggacaaccatcaacaacgggggtaactaatgtcacggtcggacaataaacaaccacagtcaatcagaatatgggctcacagtcaacttcatcagccattcctctagcagtcaattcgtcagtcattcctccagcagtcaattcatcagccattcctctagcaatcaattcattaaccattcctctaccagtccacatgattgctcctgaaggttctcgttgtctactgattatcaatgagttctcggtaggttcttgataggatttagtattgcaatttttgttgtcacgtttgcattttatttctgttagtatcgtattgtttaacttttgttgatgtcattgataagttgtgtttagtctatttcttgataagttttcaattggttctcaatatgtttttcgataggattctaacatttgttttgttttctttctttaatagcaagtgattgttatgagagagttaattcttgcccaaataaaaaagcatatgccaggacaatcacttacaataatgctgagataatgattgagatgggtgttgatgagacacatcattaatatgacgtccatgaccatactattttcgaaagccatgttaaaaaagtagcaaaataaattaaaatagtagcatcattgtattagaaaatattttgtatagttttatacatttagagacaattagtgtaactttgccttatcatcaaagttaaattttaaaaattgtaataatagcatccggagcctccatgtaaaatattatcaaaaaaccatcaagaacacatcgaatttctatcgagaaactatcatagaacgtatttactaaattttataaaggactgtacaaaccatcgagaacatatcgatataccatcattaaattttaaaaatttcaatgacaatatcttgagccttcacatgaaatattatcgaaaactcattgagaacacatcgacttcccatcaagaaaccatataaaaatacatttaagctaaattcttaaaagtatcgaaaagaatatcgagaatatatcaaaaatttcacgataatagggatattggacttgacaaacaaagcactagatcgccgaggatggggagtaagatcccagtcccgccaagaaatgaattcaacaattgaagcctggactcttttttggatgtcaaacacagtgatacaaatctttcgtgataagttttattcctgccagaccaaagatgataacaaagagaactaacaaaagtggtgaagttaatcttatcagtcaaagaaaaaccaaccaaaaaggagggttcaaaatccaccaaagaagtgaaagaggagtctcaaagtggaaggaattacttctataatgctccacgcactggaaaatcacacctgtctagcgaaagattagccaaagaaaagatgcaaaagaaatcaacattctcattacaaataacacaattaatgccagtaccaaagatttaatggaggcaactacctaatggtaagatgtcccttccaagtttccaaattaaaagtttggtgcactcataatgatgaactcttaaagattcttccaacatgaaaataaaatacatattgtgtcattttgcattgatatttatagtcatttgagtataaactaaattagtcatccaaatataagtctaggaccaggaccgcaatcctgcgtcccggcttcagagtctagggttgagtcaaggtcgaggtctaagatctagatccaagtccagattccaaatccataggcgcgtttaagattcggttccagagtgaagtttgaagtaagaattcaaaattagtgtcgaggttaaaatatgccaattttctttgaaaaaaatacttaaaagttgattttttttaaaaggttaaaagttgaatttagagcatactcattaacttaataaaaaacaattaagataagtatccttcataatttaaggataatatacctaaaagttacaatgcttccatacatgctagttggtattggaagaaggttgtaactctcaaaaaccaattgaaatccttgtgcaaggtaactgagtttcagagggacaaatacactattgcaggaggatattgtgtgttctctcctactccaaccaagctaaattggtgtaaggaagtttggggtagattgaatactccaaaacactgtataatactttggctagcaatgctcaataggctaaaaactaaggatcggttgctgaaaattggtctgcaaattgatggtagctgctgcctttgtgaaacaccgtaggaaagcagccaacatctcttttttgattgttgtttttgctgtagcaggttgatggaaataaagcgttggttaggctggaatgctacttctaacagcctcccgattctgctgagatgggttcaaagggccaagctctccaagtttcgaaaattagtgtaccaagctgcaattgcagcccttgtttatgcagtgtggaagctgagaaatgggaaaatttggcagggaacttctctgaacagtagcagttttagtgaggaaataaaatggaatgtaaaaatgaggtgtaacatgttcttaccaagaaagatccaagataaggatagagtttggtttaatgatttgtaaggtgtatagaattgattgtgtatacattgaaacagcttgggctcgagggggtgcctttaggttgtaaatattgattggtgcaatacaatttctgatttatcaaaaaaaaaaaaatttccttttctttggaaaaaagactattttcaaaaatatgagaaaaattattaaagttatgataaatat

SEQ ID NO: 300378 - DNA, 2196 bp, Cannabis indica
ttttttctttttccttttgaaaataaggtgaacaattttattgatcaaaaagtaaaatctaagggctattggtctagagaaatgaaaacataagaaatagatataggaatagaattgaataaaatttaaaatgtataaattataaaaaaaattattaaattttgtctgtattggaatcgtctttccttctattttaaaatagaattgtcattctaccaaaatagtagaaaggtcattctattggaatatattccaacactttaatatgaaaccaaacaaataaatagaataagattgtttccttacctttttatttcatttcattacctccgaccaaatgccacctaacattctaattctaaaggctcgtttggtacgtcgtattgtattatattgtattgtaatatattgagttgtattgtattgaattgaattgtataattttaatacaatactatggttggtattgaattgtattagtatgttgtgttaaattattacacaaaaccaaccatatcagtgtgtgcggtgttaaaatcctaaacaagtttttctttcaagtgagagtgttcgaagtccaacttgacaaaatatcaatcctttgcagtattcatctcaaactattcactgtgttgattctttgatggtttgacctttcaaaactctttaaccacctttcatcgactttactttgaagccttttcttaaagttatcagttctactttctcggttaagctctgaaagttccctctcagtcatacttgtctttgtggctattatgggggacaacctaggaaactcatgtgaaccaaagaatgtcagctccgaatctttgaatggggcccctgaagtaaatacgaatattgattcatctcaaccaccccaacatcctgcgatgaacatagaaataaatgatgttgccacagatgaagggttggtggagtctcactcccaacggtatatttgaaaagtcaaacaaagaccttgaagttttatgcagcaacttcctcgaatccatgactcttgatttggaaccaaattttgaactcactgctgaaatcgttagtacgggggtgctagtcagtttcttcgacggtaagggggtgtccatgtctagattaaaggacattctcaatcagatctggaaactcaaggcacattggaaatttaagacgatgaagccaggtgtatgggacattttctttgacctgcctgaagattgttctgagattcttcgtaataggccctgaattatcaatggaaaactactaatcattcgtgaatggctagaggatggagattggttcaatgtagatatggggaagacaatcttttgggttcttgcttctagattgccaaccccttatcttaatggagtcaatactcgtacgttggctgctaaagcaacgagattcgttcggagtgatttagcagatcaaagaaccattattagaagaggatttttaaagttccaagttgaaatagatacttctcataagcttacgtcaaggttcttcctggacatcaagaggggaagaaaggaatggattcaatttcgctatctcaagctgctgaagctctgttacatctgtggttatctcagacatgacaaaaaatcgtgtttccgaccaacatcctttgcctatcctccacaaggtgcattggttcctgcttacagcccttggatgaaggcggaatcaacagtttttagctgttttaacacccaaaatcagcttgaatatttcagagaggaagatggccggacttctttgccgacaagaagaccaccagagtctgactcgagaaacaaggagaaaggaaagcgactggtccatgagagatgcagggagctgttgggaataatttaccaggatttagatttactaataagtatgttgaattaacatcctaaatatgattctctaaaacaatgaaaataaatacataagggtttaagaaaaccttacattgattgcagtggagtataatgactccttccattcaagatctctagcccttgattcctttctgtagcagagcattatcaagatctgaacctggatctctttctctccttcaggtttagttaccatcgtcttactcactatgattgagtacttgacttgctatgcgtgggcatggtactcattcactatgggtttcgaatgtgaagaacaatgaaggaggttgaaatc

SEQ ID NO: 300379 - DNA, 1406 bp, Cannabis indica
gtaaattaaaaaaaaaattaaaaaatatatataaattaatttctcaaaattattttcttaaattatatacaatttaatatttagttatataacagtgaaactatcttttaacattttctcaaattatttaggttcctaattagtgtatttttatttttattatattatcaattaattaaacttaatcaactaagtatcaaccaatgattaaatatatgagaatgaaagatttgtgttttatgattttaattaattagcagggaccaaactatcagaaatcaacggaagcagagtaaacgagatcagcaacacccaatcgagcgccgatgagaacgaatgtacggttcgagaacaagatcggttcatgcccatcgcgaacgtcatccgaatcatgcgcaagatacttccaccgcacgccaaaatctctgacgatgcaaaggagacgatccaggaatgcgtttcggaatacatcagcttcatcactggagaagccaacgagcgatgccagcgggagcagaggaagaccataaccgccgaggatgtgctgtgggccatgagtaagctaggcttcgatgactacatcgagcccctcacactctacctccaccgctaccgggagaccgaaggcgatcgtaccaccatcaggggtggtggtggtggtggtgcaggtgggagtggctctgatttagtttcttctccattcatgaagaggctcggaagcttagactactcagccttagcagccacgggtttgcacccaatacggcaccgtttcataacgggttctttgggtatttcaaagatgctactggctctactactgcttccggtgctggaggtgggtcgtcccaggctgcggtggccaatggagaacaaatacatgggcagtataaatgaagatatatatatatatatgtatgcgactgtgaaatcttattggatttgatgatattgtgatcatctgctatagctagagctagtactgttgtggtggtggtttttatttatttctgtttatggctgtttcttctggtattggattatatctccaaatcaagactttttaattaaagtttaatattaacttttccgttgccattttcgatgactcaataactctatatgcctctcattttctctatgtcattttacaagttattacataaagacacaataactacttatataacagggattaatattattttgcacctggctttttcaaaagttatactgtattttttaaaatagtacaaaaatactattttaaatttaatattcgatacacattgttgaaaatattatttacccaatataataaaacagattaaacatatatttggtcctctaaaatgttaaataaattaacaattaacccaagatctatttgtatataacatagaaca

SEQ ID NO: 300380 - DNA, 824 bp, Cannabis indica
aattattttttttagtttttattctttgggtaatcaagttgtaatttagtttgaaaaaaatttagtcttcttgttaatactataatttcaagctaaagataaaaaataatttcatttaacaaaagttaataataattattaaggtaattgaaattccaccaaacaacctaaaacattaaaatgtctattttttccttaccattttaatttaatagaatgactcttgttttcataaatataatttttgagacaaaaattattctaatacaaaataattttgcatttttttttaattatattaatctttattccattctcatttctagtgtagtcttttcattacaaccaatcaaattaaaaattctaaaactatttatgctaaaattccacataattatataaataaatatataaaaggcttgaaaagagaatatgctatccaaaaagttgtctagatgagattagattaagattttccttttttttggtggaagtggctgacaaagctttacaatctcaatgtattctattcattccctttccctaatttttcaacttgcccccaacaaaagcatatcaataataaataaagaattgattattaggcactacactaatagtgtccaatactttctgtaagtggtctcttacgatttgttagcaatattctttaaaagttattttcttaagttatatgagactcaatacttaattactccaataacagtataatactgataaatttgttaagtaccagtaatatcttttagtatttttttaaataaaaatataaatttaaaaattatataaataataaaaattaa

SEQ ID NO: 300381 - DNA, 5180 bp, Cannabis indica
aaaaacaaacaaacaaacaaatcaagatacttttataaatactttgaatccaaatctcttttatctcactaaaaattcttaaaaagctctttcctttttttcaactgctgatttcttctgtacacatatgatgatgatgatgatgatgacttcttcttcttcttcctaacttcactacctgttgtctgcttcatctcattattcaaaaaccaactgcagtaattttgtctagaaacagaaaaataaataaattagcaataaatgattgtaatagtactactagcagtataatttttattgttcttcttcccccgacccgaaatgtacaagtaatctatgttggattcctatccacattactatttaacaatgctgctgttgccccgttgttcccagctatcttcgatgatgatgatgacgatgatgttgagggcggtctatttatcttctcgagtaacctactaaaaactaacttcacaggtatgcaagctactgttgtcggcccagatgatgttgtctctggttgtttcatcaccccgtcatctttttggttaccactgccactgatatcgtgtgttagtttgttactgaagttatgtatggatgatagtgtccttgttttctggcttgatagtgaggctgttttctttggcatccttttgtgttttctttcgtatggtgaggctgagttttgatgagggttcttccttatgaggttgggtttatgactgaaattccctttcttgttgaatggtggcggtttattttctcgatctaagaaaggaaaatcataagcagtttcatcaccatcgagtgttgatgataaatgaggacgtggtacacggaccttagctgtcctcctcgcggttctccatgcttgaggaagagccgtattgccgtcatgttccattggctcgttgccatagtcatctattgttggaatgagattactagacgaaccctcttctaatgtttcgatttggatcgggtgccctataattgccttcccatttagcttactcataagagaaactataggaacaggctctttctgataccttgcttggacttttacatcaatgtctatcaaaatcgatcctgatctcccaccaaactgatgacggccatcgaaaagtgggtcaaattgttctcttttaatattcctatatccttttgaagaaggccgttcatcccaattccaatcatcccagtcagttatattatgaccaccaatatttcgacgtctggatgcagctcttggtgaagagtatccgttgtcctgtccaaacatttctgccctataatcctaataagtcatttcagccttgtcagaattatcatcaagaacagtataaatacaaaaactagaactcccacttgagaaacaaaaacccttaccttatcttcatgataagctccgtatatataccctttctcatcagtagcatccattgacctctttgtaagattccgaatattcctcttcccttttaatttccatttggatactgattcattggcagatgtaggataccgagcataaaagtgagaggcatcaccagaaagcatcatatcatccggttcatcgcatcccatgcgtccatgttcttgtgcttcgtatcttcccaaagagctcacattttgttccataggtacagcagcatctaaacaagtatcagaaggttggtgagagagaatattaaaccaagaacatgcaacaagctataaatcacaacatagcaccaaaaagaaacaaaatatatttacacattggtaataatatagagaccatcagattatttccacaaaacaaattgatcatagatttgctcagatcaaaagtaagaatatgacctacccctacgcttcctcctactaacaaatatgacaatctaatctacatttttgaacataattccaaccaatttcagtactaatcattccagtaacattttatcgatgaagtcatgcacgaacatatcatatcaatgaacttaataatacttatcaacatataagtttcaatggtcaatataatacagaacagcacagatgatgaattgtcaaccttctaaaaacacaaaaaatcaagcaactttaattatcactatcaaaggacaaacaagtggatgcagaaagaagagtaacctgaaaaaactgtcatttcttcatccacatcacgttctgtctcagaagaatcagactctgattctgaagaacctgtttcagacgaacccgattcatcttccgtaaaaccagaaatgttcccttcagtcaaggaattgcgatgtaaggaagctccaatctgggaatctgacatctcaacgtcactttgtgatattgctttattttccaaggattcactagagtctgctggatagtacacacatctactcctctttgctctgaaaacaactcccaaatgctcccttcctgaaatagaagtagaaacattagcactgtcaggttgcattgaatcggggacttctaattttgcactattcagcaaaacttggacaagaggtcgtcgcttgtcacgtctcttgaccaaacattcatcactcaactcctcatgtgaccttttccttgtgtctaaagaatgtttaccattcaagtgatttgcatccattttatgactgccactaggaagagcttgagcactatggtcaacaatgggtttccgggaaccatttaaagcagtagaaggtgaaagtttagtctttatagggacagtcctgagcccaaagtcctgcaagcccctcatccgaggtgtaacatcagaatgatcctcttccccactgaggtgatgatttccctctttggatttttgagaagacaaaagaccacctatagtctcattcttatgggacacatctactctcttagataactgatttgatttgggatttccaagttttacactatcaattccaagactttctgaagatgtaactaacccctttttgactgcaccagatggcttattgatcgtgcgatcagaagctatacctaactttcctggcttcttcgactgctgcttttcaagttcaagtgcatgaagaatagcatcttcccgacgcgcatacttctctcttttctttataggcatgccctgtgaggactctgccctttcaatacaatcatcaaactcgccacacctaaatgccttcacacgtttcgatttctctaaattgtaccaatccctgaaaagtatacacaacatagaatatcttacaaaaaaagaatcccataaaaaccaaaaaaaaaaaatttgagtcaagaaagagccataaatttatatctgccgactacatgtattacacatttcaaaatcccattatcagttattcttttgtaacgaggatatatacaaaaacccaatagccttcattatttgtttctaatctagattgtttctaaaatcatatcaatcactaactacccaagagggatagctcaaggtctgtggattgagtccatcctcggtacctacataacaattgctatgattttctagtcctagtttcaaaggaaagttgttctcatcttatgaagaaacttcatacgagatttgccgcaaaaaaacttctaatgaaaggacttgctatttgtttcaaatctagattatttctaaaatcatatatcaatcactaactacccaagaggggtagctcaacaaagtctgaggtttgagttcgttctaagtacctacataacaattgctatagattcttgttccccaagtattctaggattggcggggatcctagtttcaaagcaaagttacgaggctcatcacgaaaaaacttctaataaaatgaaaggacttgcaatttgtttctaatctagattgtttctaaaatcatataatcaatcaagaactactcccactatagttcttccaccaatttggattctaatattgtcaatgttttccaacaaagaaaatcaattctctacaactaaactcattataacccaataatttgtgttctaatattttctaaccaaacaaaacactcattacaaaatcatcaaatttgttaggtatcaaaaaactaaaatcttaacaaagagagaatagaaacatacacactggcatcttccctgccaagaagcttaaccggagtccctgaacgaggcgatgtaagatgcgaagccgaaagctcatcaggcccaactatcttcccaggccaccacgaaccattcctcctccgcacccaaacgatcgatccaacactgaactcaacagtacccgaatccgtactccccataacaacaaaaacaaccaatctctctctctctctcactctctctatctctctaaaacctaaacgaaaaccaccaccggaaaaggcaacgacggcgactcaacctccggcgaagaacaagaaggaacggaggatccgaaaggggccgagtatggaggatccgattatacgaattcggattagggttagggtttccattcagaaaacttagaattgattttccattggagtctctctcttctcttcttcttcttattttttttaattaattaattaatttttatttttatttattattattatttatgtacctgataaaactgttttttttctcccttcttctttgtttctctctcttaatatttattttttaaaataaaaataataataaaaaaaaatatgtaagcccagaaaaaagcttcacttcatatctttgagtttggtttgaatagggtgacgtggcgtgatattactagtgctgagctggaacaacgagtttgagtgagtttcaatctacacaacacattcttctccacgtgctatcttaatgggccctctgatattatggggcccaaaaagaatttccttttttaaataaattaaattttatgaaaaaaaatggaataattacaagcaaatgtaaaataattatatttttagaaaatatttttttacatttttacggttttttaaaaaataatacgaaaacaacataaaattaacaaaaaaattacataaaagtaacatcaaaataacaacaaaaaaataacatacaaataacaaaaaattaacaacaaattaacaaaattacaacataaaaagaccatattttctgtaaataaaatcaaaaaaattgtaaaaatatttaaaattccgtaaaatcgtatttttgtaatttttgtgttgttt

SEQ ID NO: 300382 - DNA, 2356 bp, Cannabis indica
tataaattttaatttaaatttgagttaaacataaatttaattaattaataatattttataaaaaaattattagttctttttttattattatatttattagttatttttataaaatatttaaatatatttattttattgttgaataaaataagttagatatattttcttataaataattttaaaactaaattaaattttatatatttaaaaaaatataattaaaatgttttatgttttatgtttaatatttattattattatttaaattaataattaagtaataacaactttaataaagtctaaataaacatgtatccacttacctaattaacaaaaaaaaagcattttactaatagttaattagtttacatatacaaacaccctttaatagagtactaattttataaagttatttatatcatttttttttttcacaaaatattatagtttatttacatataatgcgaatgactgaaaggacacatccaatgtcatgcatgtatatgtatatatagcataatgtcaatcagtgtataggttttcactaattcccatttgaaaccattcagttgaagtcattgacaacgactttttaattggtggtaattaaatgccaacttgaaaagttgaaaatgacaagaaaattaatttgatcagttctcaaaaacatattaattaaaacaactgtgatgttttcttcattgttttgtttaaattatgagattaataatctcttgaataaatatttactcagcagactattaataatataaggtacgtaggagtattactagtaattaatgttaattagggatatgatgtgacaaaagtagcttatcgttatactgatcatgtacttctgtactataccactaaacataacgatcatatatatttgaagattcattaactggctaatagtatggaccgatgatcaataaatgcaatatatatagatttgtcctatatatattctttatcaacatataaaattttacctaatttaatatttctaatataatatactttcatttatcaacatataaaattttacttgtgttttgaaacatataaaattttactttattataatactatatgtgcgccttagtatacataagtataatattatgactgataattaaataagaggactatctaaagataatccattgttaattacaatgaatatatatataaatatgtatatgtactacacaaggagatataaagactaataaacaattacgtacatgagtagatttcatatatcagaagcataatctcttgctcagggtttgcgtatatatatttatataaatatatataacttgacaatatattgtaccccggccgcttaggtaataaaaagaaaaactaaccatactccttcccttgcaactataaatattttatatagttaattaagataatgataatataatttattataggtaattaagatcagtagtagcccaatcgaagctccaagtccaagttgttgttgttgcttatttttattggtggctgatgatgatcaccaagaacaccaatctccaagtccagtctcacagtactactactactagtactattcgcagtggtctccacctgcacctgctgctgcttcttcaaattgttattattattattattataaaacataatcatgtttttctcaacaaaacattcattaattattcctgatgatgatgaagatgatctgacgaaatccccatgaacagactctttgttgtccatcattttggctaaatctgatgacgagcctttggtagcagccaagataagatgatgaggatactgaccagcatgatcgtaatgagccaatattggctgcttccacttgttggattttggatcattagcagcaccaaaagacttatagggtgaataacacaaggatgaattaatagatgcagtgttataaggaatcaacggtgggagcctactgctgaccatgcttgaaatagttgatgatgaagaaaaggttggattagggctagggttagggttagtgttagggttgtgacttataaacatggcagtagtagtagtattagcagtaggaggaagagttgcagtcatgatactatactgaccagtacttattggaggagactgtctgagcctagcccggtctttcctgtgaacgttcatgtggccgccaagagcttgagcggatctgaattcccttttgcagaagctacatgtgtaagatcttggaggccatgaaaaaccattcatcatgttatagttctcttcttcttcttcatcatcatcatcgtcatcattatctttatctttatcttcaccgtcatcttcttcttcttcttct

SEQ ID NO: 300383 - DNA, 2250 bp, Cannabis indica
ccaaaaaaggactttacatattctattaagcaatgaagggtcagctccataattgagaaccttgagcgctatgctttgtcattttttctataatatgccaataatgagagtagaacatgactgacattccgtctattcctagactactatctattttcatggtctataaggtgatataaactttagaggatttgtatggtctagtaaaatagccatttacctcttctgaaatgaccacaagaactgaattgagtacatgatcaagcaccacctgatccactcactctgtatggtaaatattctgacagttttcagtcttctccaataatgttagatatagcattcttataagtgtgttgaattctacttttaattttgtttacacttttttgagaattcgagtgttgatgaaaatatttggtgttgaaattccatacttttagccaatcaattctactcctttgttgtcaatattctttttcttgtgcaggcaaattatccaagatatcttcagatttatggagcttagtaaaatgagattgtgaagtatcataagaatttctcaagtttgcaaccttattctgtgtggtccaaatctgcttaggtagatatccaaattttccatggtaccaaattagaaggttagaagaaacagctgcaatattttgcaatgatattaaagttgaaggtgtgtcataagagtgccaatgccttgaaatgagctcttcacattcagcttcttgaagccacaactcttcaaagtgaaattgagacttaaattaaattggtggatcttgtctattcgatgtaataataacttttaatgcctgtgattagacttgtaaaaatcaaggtgtttgagagaaggtagcacataattatcaatccaagggacatttgacaaagcataatccaaacactctttaatatttttatttgaaacattgttgtcaagccaaataaaaatctccccttcaaggttgagagtagtgagtctacaataataaaaatgcaaacttaaaaagaagtcaatctgtatatccagtcttagggtacctccaattttatcagttgcatagagaatctcattaaatcttcttaaccatggcatcaatggagcgaaatcatgaagtatttgaggagtttctaggataatggtctcataaaagtgataggagaaccataaaactagaaaaataccattatgggccattgtcaaactccatatagctggggataagttgatgaatacctctttttcgtattcaataataaaaaatactctcatattaaattttatttaaatgtacccacttttatgagtgggttgcccaatataccctcaccatccacttaagtctaccacattatttacattaacctaaggggtataatggggacatcatctataaaagtgggtatatcttaaagaatatgaaaataaaaggtaaaaattaaaacaagtaaagtaaagtgggtatacaatgtaatttcctcatatacctgccaataaaattaatttcataatttaaaatagttacatttacatgagatatccataacaacattaaactactcctagaccgatctctggaacttctatcccattagaaaaatataaggcattattaaacttaaaaagagaacctattttcaaatttgtttccataataaaaattacatcatgaaagttatgagaattaagcagatttagtttatgaaaagcacaaggacgttctaaaccctttgcattccaactgatgatattcatggttactggtgaggttgagtctcaacctatgccgaataagctgccctgcacttttctattaatgaaagaccataaatctcagagaggcaatcagaaagaggttgttgaaaggtgtttttagaatcagccagaggagagtttcttgtgcaaaagtacttcaaaacatgttgaatattgccacccaaggacatcaattaccttttaaacgacatatatgacaatctattctcattaaccatttccataccagggtgaaattgagtattcaaaggagcaatagcagtagttgcagtcgtggagatcgaaactgaagtatggataatagaatttacttgatttgcttaaaccaaaggagaactagtattattagtgttcaaaacacaaatataagcaagtggaattgccactgatagtgtaacgtccccgcttcaagcctctattgggcccttacacccatagaataatggctcttatacacg

SEQ ID NO: 300384 - DNA, 2236 bp, Cannabis indica
ctcacatagctaggcttgttggtttagcttcatttattaaaaaatgtctctggtatttggcatggagttccttatggttgtgagtatagtagtttcactatcatacgccctatcatatctccttaaccatcttctccgacgacgagaccaatgttgctacatgcttgcctacgagtgttacaagccccctgaggaaaccaaactcagcaccgattcatgtgctcaaatcgtcttccgaaacaagaacctgggcgtcgatgagtaccggttccttctcaaaaccatggtcagttccggcatcggagaagaaacctactgcccaaaaaacgtcatggaaggaagagaagagactccgactcttgccgacgccttggccgagatggacgaagtcatattcaccacactcgacaacctgtttgccaaaacgaagtcgtttattgcttccccaagcgagatcgatatcctcgtggtcaacgtctcgcttctctccgtggctccttcgttgacttcaaggatagtcaaccgttacaagatgagagaaaacgtcatgtcgtttaacctctcagggatgggttgtagcgcaagcatcgtcgctatagatcttgttcaacacttgttcaagaatcacaagaaggttaacgcaatcgtaatttctacggagtcttttgggcctaattggtattgtggcaaagaaaaatcaatgatgctttccaactgtttgttcagatcaggtggttgttctatgctctttacaaacaaccgttgtcttaagcaaagagccattttacagctcaaacacctcgtcagaacccatcttggtgccgatgatgaggcttaccagtgttgtattcagttagaagatgataaagggtaccaaggttttcgactcactaagaaactcaccaaggctgcttccaaggctttgaagctcaacctcaaagttttggtgcctaagatattacccatgagagaattacttcggtttttcatatctaacaatcttagaaacaagaaacgtcacaacaaaacttcattcggtttgaactttaagacaggagctgaacacttttgtattcaccctggaggaagggctgtgatcgatggtgttggaatgagtctagggttgagcgaggaggaccttgagccatctcgaatggcgcttcaccggttcggaaacacatcggcaggtgggttttggtacgtgttgggttacatggaagctaagaagaggttaaagagaggagataggattttgatgatgagttttggagctggttttaagtgtaataattgtttgtgggaggtgatgaagaacttggatgatgtcaatgtgtggaaagactgtattgaccaataccctcctaagtctttggtcaatcctttcatggagaagtatagttggatcaacgatgattatcttggctttgttcgatttcagcgttaacaaagtcttataattgtctcttaataattattataatctctctctctacactactagtggtcctaattaataagatacgcgccgagcggccaaagccaatatatataggagtgtactatagttcctttacaggttcactcttatagttataaggttataataagtgtcattttcttttaattctatatcgtttgattattatataagatcttccctcctctcatatatagatatgtataattaataaacaatataaaatatatgttatgatgaatcattaatcatcctttgatttaataataattgatgctatatatatttatatactaccagctagctccataaatgagttgaaggtttgatcgattttcatatacgtacttttgtgtttttggtcaacgtatatcatttacctaaaattagctaagtcagttatgaaatcaattactagtggtgaagtgaccaaagagtgagttaaagtagagagttcaccatacatactatctaattagaccgaacttatagtccaatcaaatttaattataaaaaattagatattaaattataatcggattaaattgaatattaaaagttaaattttaatttgattgaatcagttatcggatgttaatctcaaatttaattaaaaatcgagatccaatctaattatattttctacatattacgaaaactatttatatttatttttatttatataaaataaaaaaataatttgataatagttttactagattttgctttttagttgaatttataatatttggttgtttt

SEQ ID NO: 300385 - DNA, 3664 bp, Cannabis indica
gttcttgatattctaatttatcatgcgtgtttcaaaaaatttcaaacctattttcgacaatgtgaactattctaaattattaaaaaaattatagaaataatgttctaactataacgtacaccaccatgattctttttttaaaaaaagtatttttatgtttttaagaacgaaggttgattaagaggttgacaatagcactacttattttaaaatgcaaccaaaggccgacatagaatggaaattgattcctttccgttttattccattttattacctccaaccaaatgcaattctaaggtttgaaattttccgatatgcagctgcgcgagaaaaataaattgttgaaatcttctgttatggttacatcaggttcaaaccaggtacaccattaaacttgttttattattatgtttgtaaactcaatacatacatatacatactatatacagtatacaatacaatattaaagtgactattgaaatgttattctttgatgatgtacagggatttctaaaccttgtgttaacactatgtgatgcaacagactctgtagtactgtttgcaccatacttcttcaatgcacacatgtcctttagtatgacaggcatcactaacatattgataggtccaagtgatcccataacactagatccagatacaggtttatacctatatatatatttatattattgttacagtaattttcaacaataacaagtttcatcattcttaattattatgaattgtatacactaaaatactttgttttgtgtttttcattccctcttctagattggttagagagaacactttcagaaacaaaacctacaccaaagcttgtttctttagttaatccaggaaatccatctgggaaatgcatttcagagcctcttctaaaggtatgttatatgaataatatatctatatatttatatgaaacactattatagtaaacacttaaaatgtgtgttttggtacactcactatctacttcagcattcagaacaaaaaaaattttgtttaattttttttcatgattttatacattgtagttgtttaggatcataagtaaatttttaaaaaatcctgaataacagtatcaaaataaggttcaaaatatttaagttacacgagtaattgattttttcttatacgcgtaagtaaacgtttgaaccttatttttaaggttataaattatttagagaaaatttacaaggtcaatgatcatgaaaaaaattgaattaaaaaactatcttaataccaaaacagaaagaagtgcactgaaacacccatttaggagagtttcctatacacttaccctaaactttatatcctgcatctattccttggctagatttcacttatctaactcctttgtctttttctttttcatgtttatttgttttcctaaaacagagattttcagatatttgtcaaagggctggatcttggcttgtaattgataatgcatatgagtaagtttcttatatgtatttaagtttttacgtacacttttatcatatataccaggatatatttaataggtgtgattcagttttatttgaatttttttttaattgtcatataagttttgaatacataaaaaaattacacacacaattctacacaacaaatatgtcaattgtattattaaataattttattattactattaaaatctaaataaatcaaataaaataattaaaaatatccaattttaattccaaataaaatcaaataattttatattttaaaataattataaaatttcttaacttgtgacccctttttatcccctaatattgagaattggaaaaaaaaaatactatttcacacaaaattatatatttttggattatttttctaacggtatctaatttattaaaagcgaacttttgaaaattttgtgaaatttcataataaacaaatctataacttaacccctaaatattacgaatttgaaaaaaatactatttcacacaatgtcaaaatgatcctaaattttagtggtgatttattattattataaatcacaccaaacatagcatttattcaattgctaaaatggattaaggggtaagtacacatggtggtttactaactattttactcggctaaatcacttattatgtttttcaggcactttatgtatgatggtcgaaagcacagttgtatagaggggaaccatattatcaatctattttcattctcaaaggcatatggaatgatgggttggcgagttggatatgtacacaattttatagttttattattctattaatccattttattcttacttatcttgtaaatatgatataaattttacttgattcttttcagatagcttacccgtctgaggcaacggctctaagaactcagcttctcaaggttcaagacaatgtagccatctgtgctccaatgatttcacagtatctagccctctactgcttggaagctggggatgagtggatcaagaacaaagttaaaagccttggcaaaaacaaagaactacttactgaggcccttacaccactaggcaaagatgcagtgacaggagaaggagctatatacctatgggccagactcccagaaaagtactcaaatgatgattttgaagttgtgtgctggctcgctcgtagacatagcgtggtggttctcccgggaagcgcttgtggtgtgtccggctgcatccgagtcacgtatggagggatgcctctagagagctgtcatgttgctgcaaagaggctcaggaaaggcttggaagaacttgttacatatggcatggtgaaggaacagtgaaagtttcgatattgttgaactatgtgttgtatgttataatgcaactttcaataagagtataacaacaacaaaatggtgttattgtttcgggatattagtggctaaaccacttaaattttatagtttgtaccactttaactatataaactcatttttttagcagcaaagcctattgaattgcacttatgcttccgtccaaaaactgttattaagtgacacagtagactgtccacatatactgtccttctacggccttctgcctgcacacacgacaaatttttagtagtatacgtaatattaattattaaaatatcataaaaaaataatttaaaaattataaaaataaaacaataataaaatatatatatatttttcttcttcttcttatccttcttttaaatacctaaactaataaccctaaccctaattccatctctttcatcctctctctctacccattttttttctcccaagcttgaagacgagtcccgactcgatttctcaaccgtgattgcaatagagccatcaagtccacaattgctcattgctgcgacaattcctatatggagcacaggcatctatcggagtataaatccggaggaggaggttaacaaagcacacaaccttttcctttttctcggtctaggtgagcagctaggaaaatggataaattgtgaccactgtggttggatatgaccatgaaatcacgatcccaaccatgaccagcgtggttgggtctgggttgccagtctgggtcaccgagcggggcagagggggctgggtcacgcgagaacgagagagaggagagggtctgcgcctggctgtccactggccttctgcttgcaccaagagggaggaataaaga

SEQ ID NO: 300386 - DNA, 3372 bp, Cannabis indica
ggttatgataatactactactcaaatttcagagtctttagcatttaatattcagacactgcatattggtaactgcaagggtaagtgacattttctttgttcattgtgctgtttgaagaaacctcttttccaaaactgctgatttgtttcaaaattttgaattgcaattacttttgggatactgtgggttgagagagatactctatacatttgagtttttgtttcttttttatttttttatttttttttgtttttattattttttcttttgggaacaattttattttttgagcaattttatggttagctcttgaagtcattgcaacatataaaacctttgttttcctcaggtgttgacgaaacatctcttctaaaacttctgtctgaaacacaaatgctgaagagtctttgtctgagggacacccacattaccgaccgtgctctttgtagtctccgtggttcttccttagagatgcttgatgtttctaatactatggttagtctctgtacttaaaatatctgtcatcttgattcaatgtagtgattgaaagtatgaccctgcatactatcatttagatgttacctgattataaactttccagatatcggtcatttcagtctgataatagaaagaaatatagaatcaggaagtcaaatgcttaattgccacagaaattaaagcttagccaaatgacacctgaaaagtgaccggtggtcaatcaaattaaagctactcgtgatagaaagactagttgattattatatcaataatgtctcgtatgattgtcattcttgctccctatgcatctataagacaacatgtctacccaccactatgtatgaaggataatgaatttgtccatcctaactggtcattttggcccccaattttgcacctcagtgcatattgtgaataaaaatttatttcactagattaattgtacgtctagtaagctccgtacctttcgattgactcaaatcttggtaaaatataactagtgtttgcctattattaattattatggcatctgacagacaaatttcgatttctttccttcatctcatttcaactacgtttttttttttctctgacctgaatcatttcaactatgttaaatacataaatcattactcggaaatctctaaatgaaggatattgttctgagtttttaggtctctggagaagctttagcacatattatctatcgaaatactggtttgaagtgtttaagagtaaagggttgtaggaatttgtttcgatgcaaatgtgatgccaccacgatgggagaattttcttacttaaattcttgtggggaagtggaaattgctttgggaaaaacttgcagattgcacgaaatttcccttggatggggattttctcacttttctatggaagccctgaaacctgcaataacaacactgaggaagttgacggcgggcttgggctcatcattaggtgaagctgcacttgtgcaactaccttctgcttgtcctatcctagagtctgtagctctttattttcaggtattactctccaaaagtcttggagatacttgctattgacattgttttttgttatgtgtagctcatatttattagattgttatttttttttttttttttgaaattggcatatagttattagatttggtagtaataaaatataggccaggcatttggttccctgatttttcaaactattttgggtaaatgaactttgctacagatgtgctccccttgtagatgttgcttataactttatccaattctcttatattgctatttaattgtttaggttagttatttctgaaactctttcctggattttctcttgaattggaactaaaagatatcttatatgaagatcgctttgaaccattgagtcaccaccttaattaactctatgtttggtagaggagaaaagggagaggaaagaaaagtttgaaaggaaaagtggagagaagtaaaaaaaaatgtttgtgtggttggaaagaaaaatagggagaagagaaaagtggatagaaaaatttgaggtgggcacaaaaattttctcctccaaattggacagaaaagttttacaaaataacattaatgtaaaattactcatttattttcgcaaaaaaaaaagtaataattttctttcctttctactaaccaaacaactaagaaggaaatagattttctattctttccttctaattttctttctctcctatattttcgatcccctcctattttctttccgtcataccgaacatagtgtaagattgtgagtgtcatgtcttttgagcctatatatttctaccattattgttcacacttaagttactccattagcatcattcttttccctgttttaaagttgtatgaatatatatttatatatataatatattttgcacaggcatcagccctcttagtgtaatatgtagattgatatctgctctttacaggtaatatcagacagtatcattgtaaacatcatggaatccttgaggaacttgcaagtcttggctttatgctattgttttggcgatatatccattgcagctttcaagttctttatgccaaatctgagaaagttacaacttgaacgggtaaacccatggatgaccaatgaagatttggttattctgactcagagctttccaaatcttgctgagctttcattgttagggtgtccacttcttgattcaggttagtagtttatttagcagtgcacaatttcatttcccgcagtaatcaatcattacattttagtttccttccaaatatatttctacagctatcaatatcatctataatggttcaacaaacaataaaattttgatgtgcctcataataagcaatttcttcgctcctttttttttttttgaaaaaggacaaggtcatatgtcatagacagaccattatccataagtttattaaaacctgagtaagtagaggaaaaccaagattacacagcttgggattcccaagagagtctggacacatacataaaacaattttgcgctgcttcattgtcttgtgggtgtatttctaaagaaattttgaaacaccaaatctttagagtaatacaaaatttacttactatcatcaccccctccccatgttttttcagattcacagcaaatcatctcacatggatggcccggtttactttcaatccatctagaggttttgcatcttcaaatcttttattttctgttttgtcttatttatgtttaatttaggtacatgaaaacaataaggtgccgtttggtaacacttttgtttttattttttaattcacaaaatgaaagtaaaatttttaaaaacaaaaatagcgttctataaccacttttgtttttccaattttaaaaactaagaaaac

SEQ ID NO: 300387 - DNA, 1544 bp, Cannabis indica
gatcaactagtgatattgacttataaagatacaacggtaagattatagtatcttaaccaagatcaatatcggtcacagtccaatgtatactccatacactcgaaactagcatactttgccaatgttctggaaagaacataacacttaagcaaagtgtaagtacacttctttactaattatcacatcattgtaaatccaatgcactgatgaaacaggaactttatcttttgaagcatataatcacaatcacattccactgtgttgacatcactgtaattgtaaatgactatatgttatggacttaacagattttgtatatattaaaccataaacatgaaagctactagtaaacataaatgacttctaatcttatattgataacaaatcagactagattgaaataggttttatttagggtataaaatcctaacacatactccattctctgagggaccgctttcatgaatgtaccgtaaggtttgacaatagatgaaataggttggataaacaatctagagcaatattgatcggtatggcctataattccacaaataaagcaaaaggtaggcacaaacttatacctaaaatttatccagaaccaatcaccttcgatttgctgcagcttcatcttccgttttaatgacttctctatatcaactcggaccggtactcgtaaatactccctccacacaccattgaaagtgttctcgtcagatttaataaagctttcgatgtagttcgcatcatccaaaatcactctttctgtcttgattcgcgactaaacatcatgcaactgaactcagatttcaagatggtgcaaacgcagcgctctcggaacatcccctgttttcagtctctcaaaaatcaaaggagcatttttaaaagtccatgggctcctgtcaataactctttgaatatctatctcacgatagaattgaaaaatatatttatttcctcccaaatccttcacatacatacccatacctggcttccaaaggactgccatcaaattttgcatagccatgaaatcaatcagattgttcgttaaaaatcgtcccactatgctccaccttgtatcaacctctgtatcatcaaccaaaggccaatcatattgaacagctggctcctcttcctcttcgagtagaatgatcgataaacgagccccaaaatcctcattgttttacgaagtctacattctgaatctttcacagaataggccaaaacaaacaatccaaaacacaaacatacgaaaaacaaataaccaagcacattcaaaggaacattctcaccatgtcataagacaagacccattcattttaaacaatgtagcttctaatgtaactaattaattattgtttttcatagactagtattgccaccactagaagatttttggaaagaatggctgtcaagcatttttctccaccaatgtgtacactcaaaaattataaactaggaaaatgttcttatgttatgagaacaaaataaaaatactaccataaaattattttatatatatatattagtggttatctttgtttttc

SEQ ID NO: 300388 - DNA, 3854 bp, Cannabis indica
ggaaacatgctctcaattaatttatatacgtattatgaacgttttcaaaaatctggttccagatgttcgaaaacaaccataaaacaacataaaaataactattaaacaactgctttcagagaactcaaaatgtaacttctctccgagttaaatcttttcccaacgtcctaataccgatttaaatgatataattgagtattgtaacagtttctaacagctagaaacttatcccattaattccataactctcatatgtaacaactcacataattacatatttatcaattttgatcctcaggttacaatctattttaagatttgtaactcctcatatgttacaattttatgtgtattattatactatatatgatataatataacctccaacacataatatatattaatctcatattaatatataatatgccacattttaatcttcattatatatttattaaataacaaatatataacagtatctcacttataaatttagcgtacaggtctccaagttcactactcattatgtgaaacacagtaaatctatctaagttttattttcttttggagatcattgtgtgggactgaagctcaaagaatcaatagtttgaggtatttcgattttataattatatcgtgtatatgttcgatttttttcgtatttcatacaatcgttcatatgctttatattattcatataaatttctatcagtaggagcctagccctcttctctaattatttgaacctcgcgtagggtcttatcatgtggcgagcaccatgctagaaggtaaaggtcgagttcttggttgttgttgctgatgttgcttttcttttttaggtgcgattgtgaactggatccccggtctttaaatgctcaagtagaaacggaggggaatggggtcatgtggggcacatgacccactcaacttttaataaattaattttttgcataacttttttatatatatttttatatttgcccccaaaaatatttttttttatttttaccgtcatatatttttatttttatccttgtaaatttataattttattttttataagaattttttttattaataaactacttttaacaaaaaaaaaaaaaaaaaattgcccccactaacatttacggctggctccaccactgtactcaagtgcatattttggttgcttgggcaacttcaagcttggtatttttaattctagggaggtagaatcttttgtttggtggtttttacaaagtttctttcgattttttttttcaaaaaaagaggatagatataactaagtagaggttgggataggattactaaattttatcaataatatatatgtaattctacagtatacacactggaatgattattttagtatattttttatttgtttctatgtgatttttttttagttatgatctaattgtttgtagttgtttaaaattattttgtaaattaaaaaaattaataatttacctagccaaaaacaaaattcaaatactaattttagaccatctaaactaatcaaatgataaaagataaaaggtgtactaaaataggttgtagtataatagatttttctaatatttttctacctcagctttatattggatttcacgtcatggtgacatacttaaatcaatacataataatggatgatcgaccaagtgaaaaagttctaaaatcaacggtccatcccatcccaactaggtagaaaaggacctctttttgtcttttcttgaataatccaacctggattcttgaggccctttgtgctaccaccacacaatctggaataaaaatcagatttttctagatcaggcaattggatcacataaatcccagtttttagtttttggaattttctgtttatttttgggtgccacccaaaaggcttgaactatgaaaacctttgaattttgaggtccagggatggataagtttagggtgagttgagaaaaggccacataagggtagaattttggtttcagaaacttgttttctgaactaagttcccctttggcatggttgtcaagctttgtttgatggcttcttatggctaccctcctggtggagtcgttttacaccaagagcagggcatgagcagagccattcaggtaaagtctttagcttaatgtgttttggttttacctaagattatgaaattgttttgggtttctaatgttcgtgtttaaattctctttattctatctggttgttgtgctgatttattatttgattgccattattatcattaaggggtcattggattcatctgttttgtgtttgtgtatttatgtatgcaaatatgtagatgtttgctttgggagcatgcttctgctaatctgttttgtccagtccatgattaattgttttgtttctgtattgaattaatctggttttgttttattaacccaggatttccaaccatttttgtcgaattatggaccaaaacatgagaccttgagactaggatccctcaatctgagaccacaagagtctgaggacccatggaaacccataagcgggttatccgagtctaacaagtatgtcaagattgactctgtgggtgaaaggaccatgctttctgatgtgcaaggtatgaaaatgaaccatttcattgtgtcactcatttgttaaatgcttttgctgtttggatatgctttttctatagtattatttacctaaaataccacaaattctattggacttacttcatgtcccttgcttagtatatttattgttttttggggcatctattttgtggttatggtatgtgtagaagttgattgcttatatgatgtccatcatagtacaagaatgatttaagaggcttgcaaaaggaagatttaatgtagatttgaaagctgaagaaaaagaactaaacgtgagaaacattgttggcaagttatctcaaagtttctttttcagtatttaagatttgactgactgccttacaattgatttaggcagttatctcctattttcataatcatactattattttgtcttcttgcattgccttgtttgtttattttttatttatattttcttacttcttgttgcagatggctgtccaagttccatgcttttcagctctagcattgcagaacattgtagaaaacacgaaacaattttgcaattcctcatgtctgcagtaaatgaaccagagggaggtggagtggacttgactttgctttctgagatcatgggcttacaagcattaagaattgattcgcatcaacaagtaacacctcttatctaccctggttctgaactgtatgcccaaaagcctcttttggactttgttggagatctggtgggtagttcaaaaattacagttcaaccagatggtcaagtcctgttcaatgttacggggactgaggtgaaggatctactttcggttgttgctgagttttacttgcccaaaaacccagctaagttgaaaaagcagtcaatgcttgtcccgcactatagtaggtacgtatcattaaaaaaaaacttaatttaatttcttttcagtgcagatatttaatcatgtgtatttaccctctgcacaattagatttataaaagcatctttggaattcatttttatgttaaccctttgctagaggtgatggttgtgaattcatttatctgtttctcttgtaattttatgtgatgcattggttcatggaaatgcatggttttttcatatctcctagtatgtagatagatgaaaggcatgtatgaaaattggttaaaatgaagcaaagcattactgttttgccagctacttcaacccttttctcaggatatttgtgcagacttttgatgatactgcacaatctttttaatttaacatattatatatgt

SEQ ID NO: 300389 - DNA, 2747 bp, Cannabis indica
aaaaagatattaataataattataataataatattattattaagtaattgaaattattagataatatatggagagagacagagaggggcgaggggtggaagttttgagggaaaagaaatatttgctgaaacagaactgttatcggactggtcgataaataaagcccctaccttagatgttacattaggattcccatctctgtcaccacccatccaagatccaaattttattggtgtgcatgtcaatggaagaggctttccagtatgctgttaaatcagtagaaggacaccttacaatgtgaaagataatacgataaaaacaaatgggaaaacaaatgggcttaaaaaatacaaacgcatttatacatattacaagcactacatctgggtcactggagaatctacaagcaaaacattacagatcgaagtaaaccttcttcaaagcattgctaacacgccttaaataatgaggtacagctttccaaagagattgttccacaatattcaaacctgagttagaaagttaatcgttattttagttttagtttgagataagtgatagcatattgagatccaagcttgtgtatttccaataatgtgaaaaagaaaaattcaaggccttcacctgccctggcctcatcaactggtgtaggtttgtggcgcctgagttcatctgtttgccatattgaggttatctctctcacctacaagaacgaaataaacaatgaggactaaaagaattttcacattgattaaaacacaaacttcctatctaaaatcccattgtaatttctctatgaaggaaaaagtcaaaataccagatcttcaataagcatttctcgatcttcttgacttagatcagaccgatcattataatctaggagatgctgcaataaatatgaactactgatgaaaaacctgaagttacaaaatatataagattatgttatgtttactgattactgattacttacagcaattctaatgtgtttgtattgtaaggtccggcgattaatttgtgtgggatgtgcagtaagaacaatttcaacttcctacaaaaaccagaaagtagaaactgagattaactattggaaacgcagcaatttcttgctgcaataatagttttgagccactggcaaaaattcacagggtaaccagaaaaaacgaaactcaaagcagaaataataaccctcatacctgtttgcaaacagcctcataaagctcattaggggaaactccactctgtacaagattatcaaaaacatcatcacatgatcttgatagaagtgccaagttcctttgcttacgagccctgcacaaaataaaccagagtaacagggaaatacaatttattttcaaaagcatatagaaatcagtctcgtgaagataacattaatcgttttagtagacatatacagtatattattatatatactaacatatatataaatatattacctgtgatgggtttcagcaatacccattaaattgaggtaatgactgaacgcacgagccagagacaaggcctcctctaaggtcatcttcgaaatctctgaagcgagctgcttctctaccagctcggccatgtcctctactcccgccatcctcatattattagcactctgaacacatacacttcattccattataatattctcactatttaataattttatatgtatgcatgcttgaatgaaattcaataaaatgtctaagaaaataaacagtttgaattcgaaactaattattagctgcagctctcaacaagaagcaaaagccagcatcaaaaacaaaaaatataatatcatcattaaccctattcttcctcatgcacgaacacttaatcgagaatttcacaaaaaacaatacatcttagaagaaaagatcctcttcaggttccattttccttctctctgtttccgtgtctttctttcgtcgacccatcaaacaaaacacgaccaagaaaaattccatggaaatctatgcaaaaaaaaacacacgcatgcaactacaggactacattgacgaacaccagtgactccgaaagtaagaaaacagtaaacggaagaccgaggttcctcaaaaacaaaaactgatattaaaagggggtgagagagagagagagagaaagagagacctgagcaagaatccgagttctctcgagcttctccatgaattcgttcccaacttctctctgcaagacatcattgagaaggttaccgagtaacttacagtcatcgtcgaagacctggaaggagatttcttcagctatgtcatcggtggtgtccgtcattgttacagaagcgaagatggttagagaaagagagtttgtgggtagagagagaaagtggagcagaggaggagaagaagaagaagaagaaggaaggcagagaatgaagaaggcgtctgtgtagtatccagtgtctacacacaactacatgtacggagatttttgtttgaaaagaatgagtggggccttgcctgttttacccagtcaactaccaatttctgtttgccacgtgtcatgtcctccggaatggaagggcttgtttattaatggtatggtgtcactgaaactcggaaaatatattttctgtttggtgttcacagactgccaccaggtgatcctagtaaaacttcagcaaaacaaaaaaatttataaatgtatccaaaattaattatttatattttattgggtaaatactattttggatcctatttttgcaaaagttacagattggaccctgt

SEQ ID NO: 300390 - DNA, 1403 bp, Cannabis indica
aaaaaaaaaaaaataagttaaagtgtaaaaatataaatataagaaattttggccccaaataacccattaaaaatgcaatactacttaagttctttatcataaaacaccttgggtaagaaacttaaatagaattaccatcttttgtcagtatcattcacaaaaagtgaaaattcatgtcagatccctttttaactttcagtacataataagaaagaagactattttaaacacttttgtctgtgaatttgtgccaaaacaaaaatgggtgtcattcatacataaataaatttgataagaagttcatcatccctggattaaatttcccatccctttataaattattccatgtattaccacaactacatttcctaaccctatcacattcaaaaacttatggagtgacattgtatgtttgactgaaaattaaatcttttgaaactcattttgtcctgttatgcataaaaatgtttgttcctgtctctgtcttattgtttgtttgtttgtttttgctgtaaatgtaactatcacacccactaaacaaatcataagaaaaatccaaagacaattattaacgatttaattgtattacttttatttctcctaattattatttgcatttcttttgtagtgttttgaagtgaaaatggcgcttctacagttacttccacggctattctctcctatatatatgtattttgttatgcaaataaattcatgtgaattgatgctatttaattatacaattattatattttcacaaacatgcattttattgtacaattattatattttcataaaaattatagacaatccttaattatttataagacgtcactttataacagttaagaatcaccttatagtgctttataccaatgccctactaattttacatacaataattttggcaacctaagaaaataacaccctaaccccatcctatcctatgccctatgacctagttatgtattctttcatgtattcttttttttttatataaacattctctcatgcattcttggtcggcaattactgcctaaactttttttaagctgtgcgccagcttttcttcgaataagattcgaatcttttcaaagttgtaatttgcttaaaatataaattagtatagtgaagtatagatataagagtagtactacattgcgaccgagttaaactacctcagttagaagttgaaaatgacggaatcatatcgtttccttcaatatagattgtctaatgttaattccatatataaatgtagggatatgattttgtcccgatgtttcacggaatgtattctgtggtacattagatgggtctcaggggtacattaaatgaatgttatggtatgtttctactttttaatcttaattacccctagatcaatctcagccgtcagatca

SEQ ID NO: 300391 - DNA, 3533 bp, Cannabis indica
ttgatccatagatttgatggagagaagatgttagaaaagttaaggaacaagagagttgtatttgctggtgattccatagcaaggaaccaatgggaatccttactctgcttgctctctagtgctgtatctaacaaatcctcaatctatgaagtaaaccggaatcccattaccaagcactctggctacttgattttcaagtttgaccatttcaactgcactgtggagtattacagatcgccatttctggtgttgttgggtcatcctccaccgaaatctcctcctaatgttaagtacgctttaaaagttgatcaaatggataggactgccaatcgttggaatcaagcagatttgctcattctcaactctggccgatggtggacttatgagaaaaactttaagacgtaagtatacgatacatacatatatatactatactcttattatgacttgttcaagtgttggattttataatcaatatttcagtttaatttgttacattttcaaaatatgtgcatcaaaacaattattcaatagttcctcataagctcattttagtaaacctgcatttgattagagtgtataccaacaacaagtaaaatgagaggtaagatacttgttctttttttcctccaacaacctccaaaacagtatgaaacatgctatttcgttaatgattggggtctgcaaaaggttgttggctagggatttcatttcaacatagatggaatacatttttgagccaaaacatatgagatacatatacttatttgaataaataggattctttaactaggattttcttggagttttgccttcaatttttttttttttatgtagcaaaaattttcccaaactataaaaatcattgcaaatatctcccttcagttacatggtcatgggtcacaaatatttttgaagtatgatagtctattgacattaaacattgaaacatgagatctaagaataaatatacatattatcataattcatattaaactgctatttatgcatttaatttttttaaactccgctagattaagattaatgtcaagttagtgctttgttaaaagaaatgaataaattgcttaaagaaataagtgaaatgtaacttggaaatgatttttatagttcacggttaatttttgcagtatatattcgactgcaaagttttacaaaagtcataggggagataaattctctttattctatttattttgatatccttagaattgggcttagttattgactagttttatagtgtttggtggtcaatgggctgaaccctgaaccccattatggtctccaatgtaataccataattcaactaaatccacatataactttcctaacataagttttgtgttgtcaggggttgcaacttcgaagaagggaggaaaatgaagatgaatatgagtgttgaaactgcttacaagaaatcgatggagacagttgtggattgggtcaacactaaagtgaacaagaaaaagacactagtctatttccgaacctactcaccaagtcatttcaggttagtcctaataaaaaaaaaaacactagtacattggaattgagtttttatttagttgggggtactgatttgttgagtgtatttgtgaatgtaacacagaggaggtagttggaaaaatggaggtggttgtcacatggaaacgttacctgagttaggaccactgactagtaatgaacactcttatgtgaaaatagtgtctgatgtgttatcaagtaagaagaggagttcaaacttgaagatgttaaatgtgacaaacatgtcaatgagaagaaaagatggtcacccatctatatataacagcaagggtgataagaacaagtcaccttctcatatccaggactgcagccattggtgcctccctggcgtgcctgattcatggaacgagcttctttacgccatttttctaaagcgccaactgctcattcggacatgaaatttttcatgtgtttgaccctattttttttttcttttttacttttgcatattacttaattaggtagtttttaagattagcctacacaggactcatttttaacacataccaatcattctttacactttggatcacatgtgtatactcacacacgcatcattcatttacttcgaactgtgatttagaagttagaataaatttgataaattatgatttcaatttaagggtaattacacattgctctacgtttaatcaattttataaatgctaataattgttatgagcgtgaaagtcatttgcaattaatataatcaatttgaagttaatttttagtatgaataaatagaaaaaaaaaaaaaaaaagaaaaacataatcggtgtgatcataatactttgaaggtaggttaatattaaattttaattgatgaaaatgaaactcaagtactattttataccattttaaaatagtgtccaaattataatttaatattataaaacacagttaaaatgttatttatccttttaataatcaaaccaaatgaaaaaaaattgacaataaataattggttaattgggccatttggaaagctcataatgagcttatttggcaaaaccgtaagatgaaggtagaagatgtacgtttgtttctaagtctcttgatcaatagttgaaagttcaaggaagagataatattcttctgttgcgtcctctttatgatggggatggcaaagaatttcggtctaaacccgattcaagcatcaaggttaacaacattgacgcaactatctttgaggcagacagtaagcatggtattggctttatagctcggatgcagctagtggttttgtggttgtccatgcaaaatgtttactaggtattgtgactctagaattggcaaagttgggtatcaaagaggtgttgagttggatcaagcgtaatcaagccatggccatcgtgattgaatcagacagcttgctggtggtgaacgcaatccgaagtacaattcagctgtgctctgcttttagttttttaattgataaatgtaattgtttgttggatagtttaccaaatgtgtttttattttaagcttaccaaatgtttttttattttaagctttctgttaatcaagttgcgcattatattagtagaaactctgtttatcctttttaatcaactcatttcccatagctcgttacccaatcgatataaattttattttctctaacaactttcttctacctcactttatcaaactttacttattttaccacttgaaaaaaatacattttttaattttaatagcaaaaaataattatcaaaaatgcacattcttactttttaaaaacaaaaattgtattttcatttttataatttaaaacaaaaaatttacaaaaaacttctcttagtttttaaatgtaagataataacaaaattttcaccgataaaccaattggacttgcaagttatttaagatagtatatgccatctcgacatgaactccctcggctccaatgtttaaaatgcttgagaaccataaaacaaaactaacataaattttaaaaaaaaaacaaa

SEQ ID NO: 300392 - DNA, 3788 bp, Cannabis indica
tgaactttcatccttgttagattttttaattaaaattggaaaaaaattcttaaattcagacatctccatagttcaaggaatatttttaacgattttaaaaattcaaagaagataatttgatacatgtgaaagtgaaagatacaatagtcctcctaagtagcctattatttttagcaattcaaatattgtttttgatttattcttgcttgaaattccattgaactaaatcaaaaagtctgatcataatattatccttaataaaatattgccgccaccaccatcaattattgccagctcaaatccaaggttgtacatacaagtggcaatgtcccattggttcgtgtaaggagtacaccgttggccctttttttttaagtaaaaaactcctttagttctacttctaacaatagggatatttgaaatcttgttgtcagagctcacgcgccaatcaatgtcctacaaccctcacccaccaactatatccacgcccattagtacgtgtatttcactcgcgccatccgagaaattaaaataatgctcaactaatcccctccgagtttcacttactactcacggtaccggacggagacgaaactcgcggcttcccgtaaactctacacaccgtcagattaggacaattaattcaacggtgtagatctcactgataaatcggccaaacgatgtcgttttcgactggaaaacaaacattatttgctaatatttttctaatctgctaataatgttatagacacctaatttttagcaccacatataattcagatttttcacttaaatctaattttaaaagtgtctaataattcaacgtttagcgttgtgctaaaatatttctgttaattttttaaaaaatagatttattttttatttttttgaatttattttttattttaattttaatcttaattttaattattgtggagtattaccgtagcgtatggaaccgtagagtatgggggatataaatacgtagaaggaaaatacggtaaatggagtaacgagggaaagagaagagagggaggaaagtgcgaaacaaggggtctttttattttctcccaaagattgaatagagagaggtccttctgaggtcagactgtttggatagatctctctctttctgagaaaattttgataatcagagatctctatcttcttcttcttcttcttctctgatcatcgatgggtttgtgggaagcttttctcaattggcttcgaaggttacttttttctttctttttctatgtttaatcactcttcttttattcctatgttgtttggattaatactgtgtaaaaattcgacgctaatcttgatcaataatatattttgattctgtaatagagcgtggtttgttgttggggaagattatctattgttgtgctttacttttgttcttcttttagagtttccctggataaatagtgaaaaattgctagaaaaacaaaagctctcatttcgtaatgtgaaattttggagtataaaggaatgttgcttaagctcaatgatttatgtttggcctggaagttatagtttattttttttcttccgttttttttttttttttcaattatataaatctttgtgagttgttttgtacaggatatctaaaaagcgaactaaagaattttatttggtttgagtacttattggttgattgtggttaggttagaatgctgtgtctttagtgttcttcataatctgttttttggtattttaacttctaagattgcagccagtgcttgtttttaattatattgtatatgcatatgcagcctctttttcaaacaggaaatggagctatccttgattggacttcagaacgctggaaagacttctcttgtaaatgtcgtggcggtaagtaaatcaacttctatcaatgtatttgggattaccctttttccctattttactggtttagatgtttggactcataattttgatggcttttttttttcttcagactggtggatacagcgaagacatgatccccacagtgagttttcatttgtaaagttttagcatttgttttgcttgtttctgttatgcattgtttcatcaactgctagctattgattatattatattaattcttttttcttttcttttttatgaatgcttcaaagctatccaaggcaaggttgactcacacttttaacttttcaggttggatttaatatgaggaaggtaacaaaaggaaatgttactataaagttgtgggatctcggaggtcaacctagattccgcagcatgtgggagcgatattgtcgtgcagtttctgctattgtgtatggactaaacttcttatgtctttttaactttacaaaagagtatactacattttttgtcaggaacagattgctacttgtgttacataatctattttatgttaccttcttttttaaacttgctttcattataattatagtactactctcgaaatctagttgccatcagaatgcactaggttgagcttttttttactggtaactttaaaattgatgagtagatattttgatagaagaaaattgttgttgcttgcttgaataccttcacgtgttatttagttatttgaatgagatagccacattcctataaatcatgtttctaggacaagaatgtaccattaacgttgctgagcatgattgcatgagcacggggaagatgcaaacaagattttcataatgctaatatttgattatagtacgagttgctattatagtgtcatagcttaatactgccttggtctgcaaatttattttattatatgtgttgcctaattgattacattgaatggttgagattttgggaagctctgttgagttgagtggttactagttgtcattttgttcgttgtgtgtaataaacttttagctgacagtaatgtatggaccggacaggagtcttgccaccagtgttacaatgatatttttagtgaaagtaatattatattatgtgataagataaaatgttcttctaggtttgtgcagttatgttgttgatgctgctgatcccgataacttgagcacctcaaaaagtgaacttcatgatttattgagcaagccttcattgagcggtatcccgttgctggttttagggaataagattgacaaaccaggagctctatcgaagcaggctttgactgatgaaatgtaagatagacttggcttttatgattaaaaatttaagaaccttcattaatatgtctatttcagtaagttgaatttgtttagggagctaggtaggtaggatggtttgactggaagatcagagtggtttgacagaaatccctccttcccaatagggtatatggataaaatcctgaaaagaagtgaaacttattcttgtgcgtgttgacattccacatgttgcaatacatgtgttgtggtgcccaagtaatgccaatttggagaaaattaaaaaaaaatgaattaaaatagaaagctgtttttggactgctagtatttcacaatatggagttccatcctaatagaatctagttttaaactaatattattcaatgctttgacttacaataatggtatgtgggttgtgcaggggcctgaaatcgatcacagatagagaagtttgttgcttcatgatctcttgcaagaactcaaccaacatagattcagtcattgactggcttgtaaagcattcaaaatcaaagaactaagatgggttgtcttctctattcttccgttttcatgtgtcataatttctgaaagattaattcatggatttgttggtgagtgagattcacatcatctaacttg

SEQ ID NO: 300393 - DNA, 1624 bp, Cannabis indica
ttctttctttaaatattttccatatactatccctatatttccaaggaaaaaaaataataattctaatcataatataaaagctagcaattaataaaaccaagttatacattatcagtttacaaaaattcattcttattagcttcttgttttttcatcatatgaaactattatatgtgtaatactatataataattataattaattatatatcaaaaattattacatagcactaatcacacttaattaccttaattaattaagtcattaattaatatgatctataactaattaacctaccatgggaatctactttagaggaagaataaccaccattcctactactactcctagaaaggctccaatactcatcggaaaacccaacagccgacaaggcggccgcctccccaccaccaccgccgccacatttagcgacagttctaacgctctcaatcaactcctgtgtctttccctcctgggaaagaatctccaagagctgctccggtgagatgaccagcttcactttccaaaaccacccggcgccggtgccggcgccggctccgccgtaataagtcgccggacatgatctcgtcgagaaaatttctgtgtacgacctcttaagcattccttgatagtcaaacgacattctgtacggaaccacagtggaagaagtcgccggaatgctgttcgatctcacgtgtccttctctgactatatctccggcaccggcgccggcgccggtgagtgggagtaagtagtaggagtctccggcgatcaggtcttcgtcgtgggaaagaggcttccagaagagatcatggcttcggaatatgccgtgaccgggaaactctccggcaatgtttccggccgttattggggcaaaaaactccataacgccgccgtttgaggtggtgactttgattactccgtctgagtctcctaaccctccaaataagcaatttcccatagtggtttttttatttctttaagtgaaaattaaaatatataaatatatacttttggtaatgaaataaaaatatgagtatgtattgtatctatatatatgtgtgtgttggggtcactttttggagggaaattttataatcgtcggtgggattatcaatgttaatttattattaatttgtaattaagagctttcttaatcggatataaagaaaatgtgaacaagaaagaccgttacttagtaatactaaatgttatatagctacattattaattattatgtgatatatgtaattaataataaggagaaaaaaaatcaaaaacatttgcttagtggggttttataagaaatttgatgtaatttaatttaacattattaattagttataattaatgaagagataggtgtgattataggaatacatgcatgatgatttagtcaatatctgattttggaatctatatatattggtctaaaggaagtattacccacaattatttggggtccccttagcttctgtctttgacaccttttctctttaccaaaatctcataaattatatataatggtcccatgcactgctaattttgatacaacagatagggatgatttatatatatataatgtatatagtgtgattttcctttttttgatgccatacatatt

SEQ ID NO: 300394 - DNA, 1004 bp, Cannabis indica
gttaatgaacaagagttgaaattaaaatttatagtatttttttaataaaaaaagtacagtaaaatgtattatataatacaacataatttgataaattattaaaaggtatcatcaaagtctaatatcaatcatgtcatgtcaaattttattatctttttaaaaaagtaccaaacaattaataatttattaatctcgcataattggttgccaatttaataaaaataaatactcctactaaagtttactaactctacaaattaataagagtcatttgatcaatgaccattctgaatctaacggttacagtacaatcagattgtatacctaaaatacaataacatgataaaatcatgtccctatatttatatttaactaaatcaaaaaaattaattattattgttgacaaaattgagtcaacaaacattaaaaatttatatttaaaacaactccaaaacaattattctatcctttcctctctcatttctaacttttcctctctaagcattcattgtttctcagccactctcacaaatttaaagcaaatccaatccattttaatgatggtgccatttccatcaccattgaagcacccatggagaggaaaccattactctttttgtgtgattgaaaatttaataactaaactgaaaatatatttacttaagacacaaattcatagatttcaaacacttacgtacggaattttgtattttatcttaattttttcatagattttctattacaattgctgcatttgaaatggtgctatgaaaagttgattgtttagacaaaaatgatgtttaatgatgcatttgtgatagcgtcgtgaaaatttaactttcgtacgcaaaaaataatactgtaatagtatcatgaaacttaatatttgatgcaaaaaaataatactttgcaatcatgccataaaaacttagaacatgtttggtattgttttatgtcttcaaaaaaatgttttagaaatgataacaaaaatagttttgaagttt

SEQ ID NO: 300395 - DNA, 2615 bp, Cannabis indica
gtaactttgattaaaaacaaaattagaacttacagtggtaactgaacgcatggaaacaaatgcaccggcaaaaagaaagatcacgacgagaagaagagtagaggacttggcagaagatttcataaatggccgccagatcatctctgtaaaatgaccaacaagcccctgctctctcattgtgattttgctaaatctttttttcgcttttttggtacttttttttctttctctgacagaaaatgtgtccggtttgtttgaaaccgaactggaatattctgagatgtactaagtttccaattttctcaacatggttttgtttttctggttggatcagcttaacggtggtcagtactttatatgaataagtatagaaagataaactaacatgtgtatataaatatagtataatgaaaggatctgtgggtattagattattatatctcggaacttaaatatatatggggaaatgacctgttttgaaaaatcttttttaagctggtaataactaaataaataataaataaaaaaaagcgttgacgagaaaataagctttgaaaaagaaaaggaaaataaaactagaaaatgagggaagaggagcagatctcataaagttataacagaaagaattacagagcccctacggaagagagttgattagaatagagaatgtgagtgagagagccttaaaagggtactttcacaaaggtccaaactcgtgacgtgggcttctttttcttctcttctgtattgtcatactatataatttcaattattaattcttcaacttttctttttttttttctttttgggttttattactgttgggttaatgtttctctgattctgtaaaaggttatatacacctacatataccggactgatgaaggaattaaactaattggtgggtcaaggaggcagagcaaacgtacgtaaattgacaaacatgagagcgtgatgagtgtcccctaatttcagcactattttgtgcttcaatgcattatttttcaaacaatatatatcccatttacttgaataatgttttttttttctgaaagaggacctctgttttccaacccacaatttaaagtcttcactaataaaaattttctttatttaaatttaatttccaaccgacaaccccagaaccatccataagtttctgaatcttcatgtaaattacgcagttgccatcttctctgctttctctttacttgtgcacacaattagataagggttttttttttggtttctaacaatgaacgatcaattaaacatgtgcatttgtttgtttttcatgttgttagtccctgcattaaaaatataatggggaactagtctgtgtactaaatagcttgatagggttagtgtgggaaattaattaatgaaataagattatgggccttagcattaaccactcttacattatgaacctttatacttttcaatgcattgtaatgatgagtgggtatgtatatgtatatatagccgccttgaaagaatgtagagaaagctttctcacttttattggtaacctattataacttttgtattgtaaaccacacacgtatataagagtagtacatattagtttgttacttgcaatcaattgttacatcgcaatcaattctgtaacaactctaggctgacttttttagatcgtatatatatttctcctaagtaacgggagatatagtaatgtgagcataatatataggggatatttaaattggctttcttgtttttagcgaaacactaattgcaaagcactgtagaatcactttcagtgccaagtgggaattttaataacgacaatattgtcgatgcacttttaagatcatctctagtagaaataggaatatattggaagtgtatatcacatggaaaaatccccaataagaagttggctgtgttgtttctttatttttcttcattcctattacttggttttacatgtttacttatatttggtttttaacatcgtgtgtataagggttattaatataagaggaagaattagttatgaatgattttgtgcaaaaaaaaaaaaatggggtaaatactatctttgttttggcaaagttattaatttgaccttctttattgtgaaatgattaaatggacaatgtgttttttaaaattgtacaaataggatcttgagtttattttttcaataattttattttttaatattactaagtttaagacaatttttaacacaaacagatgctaaaaatttaataagttttatcatcatatctttagattacattattattaaattttattttgataaaaaatttagttcaggttctatttgtacaattttaaaaaatagaggatctactttgtcatttaacaaaataaaaaatccaattaataacttttacaaaacatagaatctaaaatagtatgtacccgaaataatgatagagagaggtagaaattacacacttttaacatataactatgaatagggatcatattacttttttttaattatgtagttaaaatttattcaatatcattgtatataatttaagtgcgtgacatgatagaaaaattaataataaacccaagatcaatttgtatataacatagaacacaataataagata

SEQ ID NO: 300396 - DNA, 1713 bp, Cannabis indica
atattaatgtgtaataagtaatgcacaaatcacaactttacttaatttgaggtttttgtccattttgtatttaatattaacacttgaccaattccattaatcccgtgctaatcacgtgattaattttactgaaaagtcaaagcagcgtcctaactagtactctctcactagtgtgtgtgcctttacttataagcaatttataataactttttaaaagacaattaaatgaaaaatgaaaaaaaaaaaattgtacgttggttcacaaaataaaatattataatacttacaaaatgtaaattaatttataagaaaataggtaaaatgtcaagtagcatattattatttgttaggaaaaattatgacaaatttccctcttttatttatttatttaattattacgtactaagatatttgaccagcaattaaagtgtgatggtgtacctatatccatatcacaccaaactttttttcatttttattttatttttacaatttgtcaccaaaaataattagatataaacaaaaagttaatgatggagccaagtttaatcaatcaagcaacaacaaaggtcctacattttatttatttttttggttttattgaagggagacatatttcacaatatgttattttagtataatataaagtctttctgtttttacattaactatattaattattaaatttgtaataatcaaaacttacttaatttgacctaaaatttaccaggaaatatttgttcacgtttagcaccttttatctaaatttgctaagattatcaatgtactagtactaggtgatagacagttaattactatggttttaaattagtgaccaaacattattgtacaataatacttttgatttagaaaaatacttgtagtaccgagctctattctatcataaaatgttatatattaattcatataattaatatagaatttcacatattttaatttaataattattatataataaagaaactagtaactctttttaaattgtcacattgttatagtgtttggtatttttaaaatgatagtacacattgccaacatttatttattatttggaaacatggttgggtttattatatcaagtatatatttttcaatattaagtttttttttaacaaataatattaatttttaaaaaaatacccaaatcatgaataattttcaattataaaaatttcaaatatttttgaaataataaaaaaaaattaggatggttaatatggaaggtacaccaataacataggagtaaaagaattaggtctaaagtaagggaaataactacttctaaagtgactttacaagctataccaaatttcaaatgaggcaaaatggcttttatctaaatactattaaatcaaaaataaatgaaaatatatgtcccttgttatttttgtatgagatatttgcctagagtaatttaaaacaacaatttaaattttgtatgtgaaaaattatttttaaaaatatgatgggctataatgtaattaatatttttgaattttagaaaattaaattgattgggaatcttacagcaaaatagtaaaagaacatttgaatagtttttaaatttaataatttgaaaacatagaatacatttaaaaaaattatttttaatttatatatcacacatcacactctataaataaattaatatattattttatattttttaataattttaattatagaattata

SEQ ID NO: 300397 - DNA, 5274 bp, Cannabis indica
tttttaaaaattttacggttaggttatttcggtagttgttctggtagtttctatgtgggttgttatatatatatggattttaattgcgatttaagttgctatataaatttctagtaaaaatataaaagaaagtttatttttaagtgtaaaaataaaaatactctaatattttataacatgtaggattcagaatttcaaatagcaataatacttgtgttttgaatcataattttgacatcaatattctaaattttctgaaaattggtaagaaatctcgtgtaattatatcttatatatatagtcatgtaaattaagggaaaaaaaatagaattacaacttgcttatgtacggataaaatattaaaaatactcataaaaacagtcactactaaatactagggacccatatataagacctacaatatactattgttattgaacattaatgtttagtactatggatttcaatacttaattacactaataatagtataataaaaaagatagtgctagacactactaatgttttaatattaatcatagtgagaaacttatatagtatataagtaataaattgcatattatctgttttagaactaacctctccaattggcaataatagagagtggtggtggtactaaaacactagtgactagctagtttctaatagaaggaaagagttgaaagaccaatcaatccaaaaaagagattccatttgtctcttggtacatcgacaaattgatattttcgtcaatgcatggctatcaaattaattaatataccatacatacatatatcctagattgcccggcacattaaatatgaataatccaaaacaacaccacatgcaaaagaatatgttaacacacaagggtcactttcactactactactactagtagtattaaaaatatacatgccaaagaaagatcttactcttacccctagcttacaataataactagtagtatttatatatatctatatatcatatgtgtgtggttctgggttgttgtgaaaatttaaggatatatatagaaaaatatgataaatttattcctttcccttagaacttaatataagcaatttgtaagtggagctgtcccttttacacatgaaacagaaatattaataataataatgtacacaaaagatcactttcccaatctggctggctggccaagtttttatttggccttcttcttagttgggaagtgaagtgaatacccatatattgatcttatataaaagacaatagtgtcacggggacttattatgtatatatatatatagcttaggtcttatctattggattagatgtcagtatctctaataccccaaatccacaaatatacaacactattgctatcaccaccacctaattaatttctatatgacaaacaagtaataataagaggaagaaaacaatttatgttaaaaatctatcttgggataaggaaaaaccttctaactataagagttctaaatttattttttgagctattcagaattttcgtcactgaactatgatatatgtattattgtacctcttgaatttttcaatctattataaatggtccatgaactattcacagtattgtaaagtggtccttctatcaagttttatcacacataacaaacaaaatgatgacatgactacttagtcaattaacagatcagtaccacgtatataatttaatattaaaaaattaaaaattagatatttttgaaaaatattaaactaaaaatcaattaataattaagaaaattttataaaactcaattaaaaaaattaaaattattacatacatatagtactcacctaacaaatgattaggtaatcatattattattttgtttgttacatatggcaaaacttgacagaaaaattaatttacagaactgtgaatattttagggactatttttaacaagttgaaaagtttaggggtacaataatatataaatcattattcgagcaaaaattctaaatagtctttttattatttctttcttaatttctacatttgttttgtcttttcaaacatgaactaattataattaggcaatacatatataagatgaaaataatgaagaaaaaaaaagaagaaagaaagagatattcacctcaaggtagatgtcaatagctctgtaaactccatcaaaactgtctcttgatgaatgtggtaaactttgtgccactccaagaaattttgagatcttaaggctttgatcaggtgaaatttcactcaagtaattatcaatcaatctaccaacttttttcaacttctcagtagtaattaaatcctcagagttaacaaatactctaaccaatcttatcacaaaattaacatcatatattgcattgttgttgttccctgcagacaccattaaatcatccaatgttgccttatcaagtacttgaccaatcaacctctccaaaccaactctactctctttactaattccaaaaccagataaaattctcaatacccaaaacagtgatctacaagagaataatgatgatgatgatgaattttcaccacatgacaataaaaccccattaacagctctattagctaaactcacaagcacatcttttgaagcattattattattatagtaataataagcttttaggtaatgaaggagaaatttggtaaggattaggctactgctattgttcatgtaattttctaagctatgaatgactctttcaatgattttagggggtaaaatggtcaaatcatcaaaccaccatgatgatgaattagttgacttgaataaagattctggggttgtattggatttgcaataagaagaagagaagaatctttcatcaggtgatgatgaagatgaagatgatgaggtattaagagtagtattttgtgaaatttttgataaaagagctgagatgagcttttccaatagaccaaatgaatctgcatatgaaaataatgactcacaactgtttaagcatgtcaatatttctttccaagaccaataaaacaacccatctagaaaaacttgtgtttgttgtaaaagattgaaacttgagattttctcagtcattccaagaaaaacagcagagcaatacagaacagagacatttgtaactgttatattgattccattaccattgttgtgacaaaaccttgaaattaattcaaacccatctgggcctcctgggaaatcatcaatctcaatagccaatattttcttcttcatcatcatcatattttgatgggctcttctcctttcttgtttcactatctttttaagcttttctgaataagttgatatcactttctgcaacaacaacaacaaaaaatttaatctctgcaataagttgaattgaacaaaatataattaaccaaaatatatatataaatgtatatacctcatttagaaaaaatgtttcttcaccattaatttgtacttgcaaattacaaagccttgacattgcttcttaaatttccctcctttgaaattagagacctctttgttatgtgttgaagtaataataataagagcaaaacaaaggagaatagtttgtactattttgtgagcagtgaccttattaagtactgtaaaatatattctgactcatcagaagtattatgggccatgcttttatagattttagttctaataaataaaataaaaaataaataaaaaaaaaaagaaaatcacataaataaatgatataaactataagacaaattttgttttttgcttttttaatttcagggcaataataataataataataataataataataataagcaataataataataataataataataataataataataataatggtaaatactattttaaatcttatattttataaaagttactaattagattatttattttgttaaatgataaaatagactatgcattttttaaaatagtacaaatagaaccctaaactgattttttgtcaaaataaacttaataataatccaaatctagaaatgttatgataaaactgactatattttctgtatctttccgtgttaaaaattgtcttcaagttggttatatttaaaaaaaaaaaaaaaaaaaaaaaaaaaattaagtacgaaaactgagctcatgtaactatttttatcattttggaaaatataggatctattttgtcattaacaaaagataaagttaaatcgataacttttataaaataaaaggttcaaaatagtatttatcttattaataataataataataataataatgattttgagtattgtttccatgaaattgcatgcctaagccatttttttgtttttgtgaaccgtgacaatacatatctgatttaagtatatatacatatcatttctataataaataaataattattttgttttcttgttttccaacctacagacaaaaatatatatataaaattatataataattctaataagtttatatgaaattagcatttctttttctggtgtaatattattttattttaattttttgtgaaccgtgattataaagattggaatcttattgttgttgcttgcttttttcccattattattagtcaaattgtgctgcaaattgcaattcaatgaatcatttttttttatattttttttcttaattaaatgccaaattggcttcctagatagcttattagctaatttgttctcactgatttcataactgtgaatatttcagaaatcaatatgcaagttgggttaattttagatccaatgacaaaaaatctcttctatagtacaaaacaaacctcttatttataatttctttactctttttgttatattggtattagttattgtttcagcctaaaatttcttgtgagagagaagttcatagacttggttaggctcattaaaattatagtaacaagatggtgttaaaagaatagataaataaattgttaataaaaagaagggtgtgtacttagcatccaaaaaaatacatgtctttttaataatatctatacgatactttatgtaacgcccgaatttaaaaacttgctaattcaaaattaatcatattatattataagtatataattttatagatcagaatctcgagttttaaaatacagttaaaactacatttactacatataaagtttcataatatattttttttacaaacgacaggacaactataaaatataattcaaaatattgaaagaccgaaaccttctaggctgcactgccgcaatatgtacaattcttaccaagctctaactcactgctcctctagcttagctttac

SEQ ID NO: 300398 - DNA, 598 bp, Cannabis indica
ttttttttttttgcatttttcttcttctttagtaaatattcacaaattaatttacaattttccttttcatctaaacattactgaacagtgaacatgttgtataattattgaaaaaaataattttctagattgtaattatacaactaaaattgtgagtaatatttagtgacaggagtaggactatgttaattaaaattttattaatggggcagcatgtagtttagactttagagatagagaccatccaaatgactttagatatggagatattcaatctttactgagagtgaaagtgaaaccaattctaaaagagaacacaaaacatcaatgtttcttaagcactgaaagactagtcgcattgcctaaaaccagttcagccatgaaaaacatgccttaattaattcgattgacatttaataaccacattatcttttatgctttgccttcatgttctgtctattgacttttctgttaattctgagccttcattaagtacttgatttcaaatgctgatataatagagtcattagctcatattgaaacaaagcttctctcttcctcaaaataaactccttcacacaataaaggcttcttggct

SEQ ID NO: 300399 - DNA, 2687 bp, Cannabis indica
tagaaaaaaattagcataaaatttagtatacgtgcctcgcacatagttttttgctagtataaatatatatatgtgtgaaagaaaaggaataatgataaatttataagtgttgatgccaaaaattggttcaacaataatttattattaagactttaaattctttatactaggttcgatctagtcgaattacattctcaatcgatttacacgattttcctctcaattctcttaaccgggtatggttctcttacttgtgtacagagtttcggttagtctggcatggtcaagaatctgtccccttttttaaatgaggggtctcctatttataggcaggaaggaatgcctaattccttcttctttcttatttcgatttgtccacgtgcactaattctcatttgctgctcatcgcacctcctcggtcctatggtatctattgacgcagaaatctggatacaaatctctgggccacactcgcacgctagattgacgagaataaattataagttaagcatatatatgagagacgcaaggatttatagtacttcagtccctatatcgcgatagtaatggagctatatctactttaaactttatttttcacgagatggattacagaaaaatggctaagtctggaggctctaatttctagagagagatgctctaagcttatgcctacttttttgaacttcaaaaatgatcttgtgcaactctcctattatagggaatgaggtattattaaaataaaaataaaataatccaaaaagatgaaaaaaaaatatatttaggctatttttaatcgttaatgatgttgtaaaagtgaaattgactctggaggtcaatcgtcaatttttggagcttcagtggcgtctgcgggacccatttcttgcacctcagcatcaccgacgtacacaacgtcctcctcgtctgacccttcaacatacaaagcataaactaacgccattatcgaccaaatccataattgtcagggctaattttttagtacgtctatttagtccatgccactttcttcttcctaagaaggttcctagatgaagggtaatgatcgacgctgactgcttttcgcttccatggcaagtctctttggtggctctgaatcacccttaggtaaagtgtgtaggaagcttgctcgaaccctatacgtccaagaaccaggcaaatattgcctaagtcctcgatttaattcccagagaaatcgccaatacgattttggtagtagtagtgttgcatggaaggtttagaaggctttgactcgtcacttcccattcaccgaagttagacatagaactctcagtcaatgacgaagaggctgcatggagtctaggttgctctttgtaaagtaattgaagtagatcgttgcccacttgattcttacctccccaaaaatcaccccaattcatttacaaaaaatggaaagggaggtaaagaccgagcagtggtgtgaaattttttaaaagaaaaatagcttcaacactacgactagataaattttaagatcaaaagaaggagatttcatcctaatgatgaattcccaatttgaagatatttaagaacattatgaacccagaacaccctagaagtactgcgcaaatttttatttgaaggttttccaaagagaaaacatgagaatttacaagaatctaacgattataatccatgcgcatacattcagcatcaaaatctaaattctaaaatctagaaatgaagaacattcaagctatgagaccaaatttttcacagagacaatatcaagataaaatgtaataatttaaaggaatttcataaaaaagctcaaagacttactcaatgttgaagattgcctggaaaaaaatttcaagcaaaactgtgagtcgaatctagaagtaacttgtgaatccttaaagctttgaagaaagtttgaaaattgagattttgactctaatgtttttgagtttcaaaatgcctaaaagagtataaatgaattctatggcaccttttataggtttctagaggggcatttttgttattcagtatttggagattcaggttttcccccaaaaaagatgtacaatcaacatgctttacggtgtacaaccgtcaatacaaatccccaaatatgagtttcgaagagaagcatttaatacctcgaagatatgaaaggacatcacagagatctaaaaagaagtttctattcacccatctcccaattcgcacatgtgtaaccttatttacctagttcgtggtttgagcaagtccacattccaaccgaaaagttttcacgtagagtaggggtaaatattatcctaaaatctgcacagggtgacatgacacttctctaggtgacacgtggatcatttttgggcctaaatgacatatacctcccttagtacgctacctagattgaattactcatcagatactgcttatttaaagaataaagtacaactgtcgcgtagggtaaatgataccatcagacccgcatcgatttcacagccacttcgcatatgccacccagggtaaatgcgacagagccttgaagatactttattcctttattttttaattaaatccctatttttatgggatttccacacgtaaatgatgtaatttaggagagtaactagttgccctttttattctttatttcttttgggaaaccaaatgaatgtaatgttgagttttgtgcccta

SEQ ID NO: 300400 - DNA, 2917 bp, Cannabis indica
agggtatcggtccccgagctcctcactcattctgttcatagcagcaaattccatctaaagagagttgagagagcgaggaagcccgattacccatggtagtcaatttcctttgcagatcaaagcttatgtgggtttgaagctcaagaatcaatggctggaggtatttcgatccttaaattatagtgcatatatgatttattaattccgcactttattcataatcatgtatgttttagtctatacaaataaatgtctaacataaacatctcactaatgagatttctatcagcatcttgtttctgaatatgttaggcaaagcagcgaataaattacaacaatttctatcagcatttcaatatgttcaaagcatgaataatgcactatcttctgtaagccttgaatatcacaagagagataaagagaatgtatataccagaaattctgaagctaatcctttcatcttaacagaaacctccctcctagtttcctctcttgtagaccgagaaacatctctgatcttcaatcttagagatgggcccttgaatgttttaagacttatgcgccatatttcacccaaataaaatttatttcctgccacagtcatccccaaaggccatctcagtccaatcttgagttttgtatccacaatagcataactaataaaatctttcaggcattgcatgtcctcatcctgtattgggaggaacaatgtggaatgtaatttttagaaagcagaataatatttaggctccatctctaaacattgatgagtggagtaatagtattaagttcccaccaatattttgtaattaaacataataagctcacactagaaacagttttagttcttctggtgcatagatccaacctcatatccaaattcttttccaggcaagatatgtccctgaccatgtagtgtgaatggctgtactccatctaaaagaaaacacgctttcaatttaggcatcactaaacacaaccacttaccaaataagaagtaaaaataacttgactcaaaacctgattgaatcttaaaatgtcattaatctatttcctcagtagcaataacacgtatcaggtagaacataaaaaaataaaaaaaccttgccttggatacatgaagttttccatcatctttcagtatcgtacatttgcaccacataactttaccaggttgtgtcacgtcatgaaactacagaagcaaaaaaacaaagaggaaaatttagaaaattcgataatgataagagattcataagattaggttgagcaaagacttacatatacacgatagagttctttctcttgttcaaattcaagcccagactttgaggcaccctcctttattaagtattccacatatgaattaggaatatttgtgtaaaatgagcttcgctgctcccccagtgtgtcttcagaaagcaaataattcgtagctctctcaagtttttgttcataatttgaaggccccctaacaaaatcaaaattaaattagtttgtttggtttggtctcagtgtatacaatttatttattttttttggttaaaaaatgtgaaaaatataaactaaccaactagaaaagaaaactttgccaaatcgaaagattatgtggattgtctttggaaaaactttttcgtggtccagatcagactccctattgcacatatattcatcaaaagaagaaaacaagtcttgaagaagattctctgtaatgtattcccatggctgtcttgtaaagctctgtgttactctgttgctactccctgtggatcaaaattagcattagaaagttaaactaataaactcaatcaaattacctatcatcattgaaatcaagagaaaataaaactaacgttcagttgtatcatcactgtgataatgtaaaacttgacggcggacaattttcccttggagggatttcccagaaacagttcggagattaagagaaggcgggaaatgattatcatcatccaaaccaacagcgaaccatttgaatataccatcatatttataatccccgacctgctggtagtgggcagatgatttgtgttttggatttttgtagttggtgagaaatggaggcaattctgcctttggtatgggactttgtgaagaaccttcaccatcaccatcattatcgttctttgaaactcttttatggggtggaacataagccatcctagttgctcaacacacagtcttctcttcttttcaagaaaaaaagtcttctcttcaaaactcttcagtctcaatgatcttcctcataaataaatacaaatataaagatgatacgtttggtttagctttatatattccctgttctcctctgcaaagtcattaagaccattgatgatgtttcgtttaaggttcacaaagtaccatccaatttacttttgcttctccagtatcattattagtgcggtacggttggtacattaaaaatagtaaaaagaacctcttcttgacgaggcaaagcaatacttggggtaacaatgaattctagtttctagagctaaagtagaagtagagtagctttcttaatagtttgattttttttggaagaatagctttcgaaatagttgactggacattgacttgacaattcactaatgaaccctattagagcatttataatttaccactggcgtgtcacgtgcttcgccacgtgtgtgtgagctcttaaaaatatttaagcacaattattttaaaaaataattagtattttatttctaaaatttgatactaccgaattgtatattcgaaaatgtacatcataataataaagttgtatgaactcttttatttactaaaaataatagactttttgctagttttagttcttttttatatcatttcacaattgatgtgtcgttgtaaattaattaattttcacatgaatatagacaattactaaattatg

SEQ ID NO: 300401 - DNA, 1418 bp, Cannabis indica
atcctaatgaccaaattagtaaaaaaaaaaataaaaaaaaaaaaaaaaagaaaaaaaagaaaagaagctggaacagaaattacaaatacgatagtgaagataaatgaagttcgtgaacgggtacctgaaagagattgtttaacgaatgtaaaaggcagaattgaagcctttgcctttcatggtagatttggggattattgatcgccatcttcactttattgaatccaacgccacaaaaatcccaataatgagttgagctgaaacgtactgagaacttcgccgccttaagaaaatctcgagttttggtttctttgatcgaaaatcgaaggaagatggtgctccggtgcgttcttctacgaagctatataattgagttttgggcaagtccaaatccgtggcggcttctcaatatattcttcttgctttctagttttgtttcatttcacatgatccgttacatttacttacagtagttatctttcttatttgagtttcgccgtaattttttgtcgttccctggtaaagtttgtcgttatataaactatcaaacgacaaatcgtcaatttaagagttttttttttttttttttggttagaatcacttcatgcggatgaaatgaaacccaacatgacaaaggaagggatcaagctatagagtcaaaaaataacaccaaaagagcaagcacttacgcttcaaaagctaaataaagtgtgacccatatatagagtcacaaaaacgatagtaattacgaaaggtaaaatgacaacggccacacttaatttttatagagatttagctttaatttttacgttaataacttacttcttatttagttgtattatcttcaattctacactaaagatgacaagaaaagctcaagtgagtttcccgagaacaaagagaattacaatatttttctacagaatttttgcttacaaaagttttgaaccccttccaaggtgatggaaggctcatatctataggtgaaaagaaatcaatcagcatttatttcccaaactcgcacctcaatcaacttcctcaatcgatttgatcaatctttattctccaacaatcttcagcattaaatgaagatcttggctttgtcttcacatccgagagggggagcctaggtgtatgtcgctcaaggtatacctgtgctctcggaacggtgttgtgttgtcttatttccttcttgcaaaacatgtcttgtctttcgagtaaaccctatgcgcaagaattgttttgcggggttacaagtgtagttgagataattcttcatctgtaccctaactgtacgctgccaaagtgagtctacacccgtggggagcccaagtgtatgtcgcccaggataaacctgttaatgtgtatatatttacacatagaaaatatttaaattatattttttaacaatcttgagc

SEQ ID NO: 300402 - DNA, 3197 bp, Cannabis indica
ttttttaaaaacaaaaaatagttttttagttataatgccaaacatgcaccaaactacttaaaataatgaaaaaaattaaatttattcacattaaacatactaataatagctctaaaaatgaacacccgtactcttataatttataatttatcattaaacttctaattgtgtatttattttttatttgaactcttaaatttaattaaattaatgttatattaatattatattaacaattttttaaataaactaccaaaatacaactactaaagaattgcaacaacttttataattcagataaaaaattaaaagggcaaaattctacaaaaaatattcttcgataaataataaaaatataagaaattagatataatataatatagtaataattaaacacactatttatttgtttttgtggccattaaatatgggcttgggcctgattcaagatggaaacagtcttcttcatcatagcttgggccttctcacttgtgggatcaaacaaatgaaagacatgattttcatcttcagtctcgataatctccacaaccccactccacccactcttctttaacgcctcataataactccaacctcttttcctcagaaaatccttctcagctacgaaaatcaacactctcaagcaacccaacctcaccagattcggatccgaactcgggttaactctcgggtcatccacaccttcacacgtgggaaatatcacctcaagcattttgtctggtttgtcgttcccgaaatacgggtgaaacaaaaccatacccataagtttcggcccactaagcccatcaacaccggcccgaatcgccacgttatgggccagagtcgcaccagcactatcgccgcccaagaaaactttgtttaaatccgcgaactggttaatccaagattcaggcccattaccaccggaatgggccgcggcccacttgacggcatcccaggcgtcatcgaaagcggtcgggagtagatcctccggtgccctgcggtagtgaacagacaaaacgacgacgtttgcttgttcggccaacgaagggacatactgactgtaaggaggggagaacggagatccgacgcagaaagcgccgccgtggtagtaaatgagaagtgggagttttcgggtcgggtcgggtatttggggaaggaagattctggcggttactccggattggggagagatgacgacgtctttggatttaactccggattcggagtcgggtgagggagggagaaatgggtctccgaagaatctgtctatggtgcgatctttgaagagacggaagaaagggaattcgatggctacttcttttgagtttgaaggtttggcctccattgttgtaattgtaatgtaagttaggtgagtgagactaatgtgatatctctttatttatagagtattcatatttggtataagtgatactttttataggttgctacgattagttttaaaggagtgacataatggcttttctgattttttaagtaaatttagttaagagggagtaaatgatggagaaagaaaggttgtgttaagtgtacaacctatttttcacctaaaaaaatctgatttgtaattaattatgtcatttagtgagttagcgttataactcatttcagttatgttagataatgatttttatttcatttaggactaaaaattacatatataaacaatttgaagtagatattgataggtatgtttgccgacattggattaattaaacggtaagagggtcttaatttaaagagcaaaagttattatattaaattatatgggactcaatatttaattaaaccaatagtgatatttacacatagtaaggtgctagataccctttagcatttctctaatttaaatcatgtttaatttgtcaaatcaagtattaattaattggataaaattaataagaatatggtatgcataagtttttgtacagttcactttgacatcttttagttggaaaaataaataccaaaaaattgaatgtgaattaggaaggttttattattaaaaaatcagtttgaggtttgtagggttaagtgtcacaaattgtatgttttagatagtattgtcgccaatatccttaatttaaatttaaattttaaatcaaccactataaaaacaaacatagtttgaataatattttaaaaatatatatattatattatataatatatatcataaaaacatataattaaaaactttaatcaggttagtcaagttaattcaatttaattgaacgggctagcttaatttttaacctacgcaatatatagattacgagggttatagtttcatcgtgttttctagtttatatttttcattgaatttttttggtttggtttagaaggattattcaaatttagtagttttacaaaatttatgtacaaccctaatttaatgtatttaaccaaaaatctaacttacaattatttatttatttatttatttttgtatattctccaaattcaatttgaaaataaatcaacacacaaaatacacaaacaaacaaaataaaaatataaacaataataagagtgatgctattcatctcgagtagcccgatccacatagtggatggtggatggttgggaagtctccatgaataattttttttatttaagcgtttatatattacattgcataatctgggactcgaatccaggatctccaacacatacgcatcctcctatgaccacttaaactagcctcaagtggttaggtctccatgaaaatttagttttcatttatgtcccttactataatttataaatacattcactatttgttattattcacgattcagaaaaaaaaaaaacggaaaatattaggaaggttttcgagaattaaagagagaaaaaataaattttcatgagaagctaatagaattttgaatgacaaaattccaacaagaacttccctttgctttaaaactcaaattatttgtttttatcagtcttgaattgaagtatggaaattctaggatggaaatgggagaggacacgtgtatgtgggccgaaatgcttgtcaagagtttagggccgtatctataccaatagattaaagcccaactattacgaaaatgattagttaattacaatagaagtgaagtgaggttacattttagacactttttttttttttggctaattagattaattgcccctgaactttgacatgt

SEQ ID NO: 300403 - DNA, 4066 bp, Cannabis indica
aaaatagaggaaaagttcacgcaaaactcagtaacactaaaaagcaacatttaaaataaaaatatacactactctaggacttaaaaaagtaataaaaaaaaaagtaacctatttcacacacacacaaaaaaggaaatcaacaaataaacatttaacttcttttcagaaaagtaacctgttaacaactattcgtcaaatacttcaacatttcaaaccaaaaaacataagttaaactaaccataaaaattgtataaattatctttgaattaatctaactaatctgtatctacttagttctttgacttcttttaacctaaaatgaaataactactgataatttcaactttagaagccatagctgtgaatgtgatgctttcaactttagaagccaaagctatgcatcacttatcatcatacttgatcgaacgcagtgattggaaaatgttgtctcatatcaggagctgaatatccgaaacagtaaataaaaggccaggtttgtagtaaaagtaaaaagatgaactgaccacatgattttctgctggctcgtgacatatgccacatactcgctcttcattatcgatttccaccttgtttgcatttctaattgctgcagttgcagagtataccacaaggtacggatggtcaactgcctgcgataaacaaagagaataattagaacctatatgaatgacaaaaagcataatgcagaatagagataaggatgatataagagttgttttttctttgcactaatacaaatcatacttcaaaaatatgaagttcgaaacaaagcaaccagattgcttactgagagaatcattattatagctgctcacctgacgcaaacgtgtgagaaggtcaaatatgtgggcataattattcataagtgttcctgcttcgatatatctggaagcaataaaccatattaaataaccatacacacaaacttgacatacttacatagtaaaaacattcaaccaatcatctttatttaaaagataggtcccacctttgaggtgacttcgcacataagtgtctctcacgtttacgtgtaatttgtgtgtacaagaaatgaattttacattgcaatttaaaatctcattactcatttcagtatattatgagaagcaaccacaagaaatgaattttacattgcaatttcaaatctcaagaaatttccattagacagaattaaggaaaacacttttatatggtgcattaaaagaaaagaaagagatggattatatacgtgttaaactgtgcctgactctcattgtataatgactcgtaataatcctgctccttgatatcgagcacatccctcctcaaagatatctgtggtagaatcaagataaacattaacaaattaagaaaattaagcacataactaagtgcaataggcaacagaagccacaaatttggaacttactattcgtggaggaagagcaagatcagcagctcttccctgtttagttcttcgtagcactactttctttaaaattttgtgcttaagcaacatcatcgcccttttcccagggtcttgattcacatatgtttgtataggtgtagcaataaacttgcaagagtaagatttcacattagcacctaaaaataccttgccacaaaacagcaatgagataataaaagaatatgaattggatactcactttattccaccaacaaaaatgtctaacagaattatgagggcattttgaacaatctcctgaggaactgcagaaaagcattgagttgtaaaaaacacatatgcataaattgtgacatatataccagattattgaagttttggttatctctaaggcgtgataaagtaatagacaatatccccttaaatcatacctatgatcaagaactttgcaatcacagtccttacagaagtaaaaggagtatggaacaatttgtagaaagcgtaactgttcatataaacaactatgtaagtgagaaaaaaggaacgtcactaagcattattaacatttgtaagcatagagtaaacttaccaaagagtaaagttcaccaacacggttctgaagaggagtaccacttaaagcccatttgtatgaagactctaaggaaagaacagctctggcagtattacttcgtctagatttgatataatgcgcctatgattgaaagacaggtatcacatcacattttatcatctgatcttcaaaactaaatgaaatcattttaaagaaaaaaaatacttaaatacaatgcaaacagaggtaatagtaattgcattaatgccaaatcacctcatccaaaataatacgttcccaattcacagcatgtaaggccgattcctccttagccaatgcttccttctcgttttgcttcgctggcttcttgcctttagaagatttgtcatccaacttcggtgttgatggcatagcttgaaacttcttcctttgttgcttagactgcttttcagttttcaaagcattcgggccacaatagtatttcaagtgcactgtcaaacgtttctcattaaacttctttgaacagtaagggcatttctctttggcaggcatcgtatgcctcctgtaatcagcctcaacaattgagtaagtagttaaaacaaaatcataatcagaaaacttcttggaaacttttcctctgtttgccccatgataaaccagtaccttcgtgctcccctttgatgtaaacttatcaatttcattttcccactgattcacagcaacaacaggacagattacaagcgtgctcttaattcgaggcaggtctgttgatgtgccttctgatgaatcagaagttacaccacttgccctataaagttctcgtttggcaagtacaagtgaaatggcttgaatggttttccccattcccatctcatctgcaaggattcctcctctatttggagtaccttcttgttttaaagcccaagctagccattccttttggtacctcagcaaatccacaaccatatccgcaggtgcttctgccacttcagtaactatttcattctgattctccaagtcaagatcttttgaaaaattctcatcaagccatttctcattctcatttttccaaatgttccacatcaaaactggctttgagtcccttttctttgacttctttttcttttctttcattttttgtactactccctcaagagccaggtctacttcatcctcaatctcctctttccctttctttgacttctttttctttcctttcattttttgtactactccctcgagagccaggtctatttcatccttaatctcatcctttttaatagttttatccaacccaatctcagttttaccccggttgtatcccactttcctccttttgtaagggtgaaactcctcatctacattaacattattttgaaatttttataatattatagaacaccaaataaattctgacattaaataaaaactaaaatctttattagacccagatgagaagtaccttcatcgctactgattttttcatcatctgaagatgacgctacgaaaatttcatcatcagagctatccgaattgtcaatatcaatctcgtcttcctcatgtccatctcctaggcgagatacgaaaatgaaattagtgtatgattctcgtcttcctcataccaaacaaaagaattattgcaaaaccaacaagaatggaagggaaaaggggaagaaacaaaacatagcagaaacgagagagagtgagggttttaccatcgttggcagagtcggactttgttttgagggaacgggaacgggaacggagctccattgatggaataagttgagaaaggtacgtagggttatcggtggactgcctggcgatgatatcgaaagggaaggaggagaagaagaagcgattgacgattatagtggttagtccaaacaattctaggggactgtatatataaccgaacggcgggaaagtactaggaagtggtggcacccaccgaatagctttttttttcttttttccttcctaataaaaatatttatttattatgataccttggtaacaattttatttttatttttttaatcataaaataaaataaaatttttattttt

SEQ ID NO: 300404 - DNA, 579 bp, Cannabis indica
tcatgataataataataataatcctgaaatatttgtgaaactttgtatagtactgttccttctttgtctcaacgttgagttacgctagatctaatgaaatcttaaataatagtaaatcgatgcttttccttacattgatttagaattaatattacgtgataaagatttcttaacctccattaatattggaaaaacaacacaccaacaccaacaacaatatttatgtattaatattctacctatacgtatgaatgcataaaatgtcaatatacttttcttttctagtcgaaaacttatcactaaaacacaatatatagacaagtattacaataggatatgcaaaattgcacctacaataagtacaatctaattgaggtacttaaatttagaggtgcatctgatcctactgcaaaaaaatctaagaaaacgaccaaatcgagtacaacgactgtctaaataccgaaaaaaccgtctttgcacggtcagttttagtgttaatgacaaaccgaccgattaaatgtatattatacactatacacatataatataattatttttgtatatatttaatatacaatt

SEQ ID NO: 300405 - DNA, 2096 bp, Cannabis indica
tagtatatagatactaactaaaaaataaaaaaaaaaaaaaaactcggtaagtatactatagacttaatctaaaaagccagctgttgtaggaattttttttcttattattattgttattttgaatgggatttgggattagagaattaggtggtgtggattcatgtagcaattatgagccacaaaaacatcacaaacttaaactcaaactcatcacatgctcccatccctttttctgtttgtttccttccgaaaattgatatttaccttcctattttctctctctctttcatatcacaattcacaaaaacaaaacacactctttttcttcttttcttttttaagggttgtcaaatttgttctttccataaaacactatgtcgacaatccatgtgtatgttctcttctgctgcatttctgtccctttttctttagtatttatataatttatacataaataataataagaaaaaaaaaaaaaaaaaaaaaaaaaaaaaccccaactttcacacacttgttaaccgacaaatgtattaattctttttatataatttttcatatttcaagttgcaagaagaatatttgcctttttattatgagtatttactctttttttttggggtggtagctttcaagattttccatcacatttgttgagagtaaaaattaggtttggtgcaacaatgggtgcagataattgatctgcttttattgatgatccaaatgagcaccaaatagaccagtcttaagtcaagtgggattgtataattccagtacggataagtaaatttggaccacttcttttcttttaggctacttaatattatttgtttatttgattttttctaatatagggagaagaaattggaacttgagagttcttcttgatgaagagaattatagagtcactaaactatatacactttattattatttattttatttaaggatgtcaaaaagatccatttagttggagcgggtcgggagcttcgattcgacatatcacttctgattcaaaatattcgaatacttattggatcttggatcaaattcacttcgtcctgcctaatttttttctagatcggatctaatccgaattgatttcaatatattaagaaaaactcaattcaagactcgaaccctaaacttagatccggaccccttgggacctagaactcggacccggaccgaactcgctccagatccaaacccgaactcggacacgggacccaggacctagattgagactcgggactcagaccgggacctgggacccgactcagacccgggccccgttgtcagatcgagactagggcccggactcagacctggacccaggattcagacagaagccgaacctaaattcgaaatcgggctcaaaaatatattataactttacaccatttattaatataagtcaatatcaaacataatattatattaaataatactatacaaaattaaaatgaatataaaattataagcttagatatcttaaaaaaaagttggatctgatctgatccaatgcgaataaatcgagtcggatctgatccgatgagtatctaatctagcgggatggagcacaacagacctttacatgatttagatcaggtcaaatcttaatcagatccgaaccattattgaagaacaatattaacatcgatttagagtttatattatgttaaatgcatagatctttatgttttataaaattgatcaaattgatattccgagctaaattttagtaaaagaatttttcaacatctctcgtagtattaatatggatatgttttgtaaaatatagaatctttattctcatctaacaaaacataacaaaatatatgaactgattgactattcgcactaaacacaaaaatcaaattggtatgtatttgtcaagtaatattctttttaattttcttagacattatattcctgaaaatgtcactgaactatacatataaaaagaatccttatttattaaaacactaagtacacacctccttaaattaaaaaaggtatttaagtttaccatcttaatagttatagtattaaaaataaaatttaaaaaattacttactgttataaaataatataaa

SEQ ID NO: 300406 - DNA, 1067 bp, Cannabis indica
agtaactgtgtaattactaggtatggtaattactagggtggtaattacacagtttagtaattacactatattttaaaatgcaaggtgtgtttggatatgaggtggtaattacatatgaattcctaatatcttgtttggcaaaatagttagtaattacatggaaaaataatattttttagtagctaatgtttaatatgaaaattttttagtaattacatccaattttcatgggggccatgagaattgaagtgtgtaattgaaactctttaattacttctaattacacagttacagtgtaattacatggtgagacaaacatgccaaattgtgtaattacctctaattacacacaaatccaattacattgtggctttctaaacacaccttaactaaaaaataatatatttacaaaaataaagtataaccatactaatttttttccctttagcaatataatattgacactctaatattttgatcaactaactaaatttatagtgatttttgtcccattgagtgaacatttcatcacgtggtataaatgaatgatcaacttttttgttattaataatatgtattaataaaagccagccatgttatgataagtgaagcactttacttaataatttatataaaaataaataaataaataagaatttcttggaagcatcatgggtttggaaattgaaagaaggaatggagctaattgtggggactatttgtttggtagtgtgtggaaattgggtgtgaattggcttagtacatcatgacctggaggattggattgaattggtactaaactaaaaaaaaagtgtgtttaagtagggcccattatgacatatacaacaagttgggcccaaaagccccaaaaagggttatattgggatgactatagggtgaaaaattagcggggagtgcttttcgtctttattctcgttaagggttttaattctcatctctatctcattttgtactttgtagggatgggacgagaacgaggcagagaatcacttaatgtaaaaataaaatttatattaaaaaatttaatgtataaaaatatcaaatta

SEQ ID NO: 300407 - DNA, 871 bp, Cannabis indica
ttgtattaattaatttctacattggggttattaaagatgtcattaattgtcacatgtaatgatttttataacatcggaaaacgaatggtataacaaaatcaaatgcgtaaggtttgattgattattttccgaatagtagatggtagcttataccacaaatcatataacctcaaattataaatgatagaaagaatcaatatttacctacatgtcttttttttttaactaaattaatataatatatatgtgctttttttttaaaagtaaactaagttaattaagataaaggaaaaaagatgggaatcacggggggaaatttccaccccataaaacaaacccacattcttgctagagatattctagctcttttagcaatgtcgtccgcgaatttaaacgacgactcaaaaagaaaaacttgccgacactgaaattcttaattaaatctaaaacttaattaaaatgatacatttaaaagactccaatcagggagacacttgttcaaagaaaaacttaaaatagcaatttcagaattagagaaaacgtgaacttcattccaagaggaattggaagcccatgataaggcaagctgaattgctagagattctgtctcaaggcagaaaaagtagtcgtttgaagagaatagtaagcccatctggcatcgacacaattggtcattacacctgcaataccagccttaccagctgcccatgaagcatccgtgcaaataacaatatccacacccacacaacagctaggggccttttgcagcctctccaaagaaccaggaaccaaatcagcaaattcagagaatagagattcaactttgatagagactgagtcattccttacaaaattggtgggggaagtattt

SEQ ID NO: 300408 - DNA, 1731 bp, Cannabis indica
aaaatacagggtatacaaataagtattattaaaatacagagtaccaaacttatatttagataaaacgcagagtatcaaatgtatagacacccttttatatataaaaatactttttagatatatatatatatgtagtaattgaaaagaaaataggtatatatattaataatgggaatggaaattagaatactatattttaaaattaagcataactctttggctgtcttaatcataaatgtaggtaatgaaaacttattctttgacatagattaagattaaatatagtcttaaataatgaataatcactctgtcaaatttcttaattaattatacttatttattcttacttcttctatgattatagggttggacagcaataattagctatataccttttattttcttctcttcttcttcttttttaaataataataataatacaattaaaaattgaactaacaattaatatgtgtagatcgagctaggcttgcatgaggctacttttttttctctttacttttctttttttaataaaattatataaaaagtgtcaaaaatatattggtcatattcttaatacaaggaaagaaataattccaatatagtaacctcgtaattttttgtgtgatatgtatatctactgaagcaaaatataataaaatcaacatatatacacccaaaaagacaaataataaaatctaaaattaaagcattaatttggtgctaaatttaattcccatattgctgcaagaatattaattaacaaattcttacttaatttgaaaatcatatgtataaatatacatactttataattaataagtccacaacaaaactaatataggaaattcctttagtaaattattttaagggtcgttttggtaaattttttatctatttcgacattgaagaaagttttataatttattttttaaaaaaaaattcatatacgttataactatttaagaaaattttttgtaaaatatttaaatttttttgtaatagtttatataatgtcggtatattttaaaaggtagggaataataataatagtagtagtggtagtagtgatgatgaggatgctaataattgagtagcagttggttattcaaagataaaattatgtatagagaatttggtcagtaattgccaattgaaagcatattttacagagagcctacttatgtcgtattttgctataatatatattccaattgactttatataaatatatataaatagcatatcgattatatgtgccccacgatcatattcatatatattcattcaataattcatttgtaaacacaattaattgttttttaaaattatatactaattaattccactacgtaccttatataaatttctatttatttaattatttaatgtagttttgattaatttatttttgttgattctcttcgatgacaatatctcgtgaattatatctaatttacctattataaaaaaattatttttctttatataaaaaaaatccactaccttaaatttctatataatatttataaatatagcaataaactattattaaaattcttttattttaagtactttagctcgttcttctagttatatttctgtttttcgcgagacttttgtctctgctgatttgaaagctatcttgatagctgatttagtttaataaaaattaattttttggctaaaaaaaagaaataattacataaggcactatttttttttgtaaaa

SEQ ID NO: 300409 - DNA, 3356 bp, Cannabis indica
tagtggtccccaagaaacactagggtttctgtattctctccttccccatcagagaaaatactctagaaaatagtgtattcttggaagatcaaaaccttctctgcaatctccaacaatggcttcaggttagtgcttccgctcatattttatcatcatcttcttctttaatttagcaaaggctttatagatttatgatttagggttttctatattaaagcactttatgaatatgtttagatctgtgatttatatatttcttaagtgttttataaaccctaacaaaacttttcttcagctttccatgattgagaaatttgctttatttggaattcaaagtgttaactgactaaccattttcaccaacactttgtctcttcattcctttactatctctctctctctttgaactcttttttcagtcaactacttaattggtgctgataaaattgaagtgtaataatcagaaaagtaaaatgactatacatactaaatctgaaaatgaaaaagagttgcaatacacttaactctaatgttagatgagaagagaataatggagagagagttcattccatcacaaaaaagggtataattacaagaaaaataataataataattccatgcacttacattttggaaccttcaaattacaaaacaataatgtttcaatgggatacaattgtacacaatttatcaagagcttttataaacagcagcagaaaacttcaccatttttagcaccagaagatctctgctcaaattctttgtgaattggcagcagcctcgattggtcggttggctgtttcttgcttgacagtcttcctaatttcttggaatcctttgaaagcctttcttcttagaaatcaaagaacttttgaattgtttaaaagaaatgtaaatccaaagctttgatttgattgatgaatagtagtatagttctctctgtaaccaccaaaaccaaaccttggaattggaaaaagacttgtactgtttttttcatggtgggactctactctttcttagacacaaaatccaggagatatggttgagatgatatatatatacatatatatatgctctctctcttttttttttttttaataaagaaattaaacatagtttcaactttcaagtgcttctccagctaaaaagcatgtactctttagctcctaacgaggttgcttgacccacacaccaatacggcttgccttgccatccatccattccatttggccagtggaaactataagcttatcatagcttgtgaaactgacaccattttcgccgaaaaatttcaggtcaaatcccctctttggattcttcttgacaaacttttgtttaatcaatggtccaacaactaaccaactcaagggggtctctccagtgctgcaccgaaagagaaaagattaaattcaaaattgtagtcttcaaacacaaaagaagttttactcaactagtatttaacattactaaaaaatctatttcatactaatcttgaagagatgagcaagaaaagaaccaaataccctttaaaagtgcttcctctgattgattcttcataggatgagcagaaagtgtaaactaataagatggttaagtacttcataaaatgattttgacattgtcacccttaagatgaagtcaaagagaacaataaatgcttttggagttgatatatttggttgcaaatcacttcaagaacagaatcttttaaaattatatataaatatatatgttgaatcaattgggcagcaataaatggggcaagtatagtgacattactacaagcaagaaatttattttcttaaaggtgttcaccacactatagtctgatataactacacaagaagaaggaaaaaagaaagatgagtgaacaaaaagaatattgtatgcttgaaaacaaaggagatataaaaaaaccttcccctttataaaatattatttagaaattgaggtacaaaattttacaaggtctacttctatttatgcagcatcctctatcttcacaaacaagattttctttttcttcaaacccaaaaaactttgaaaaccaggctaaggtgaaaatggggggcagttgcttaaatccataagagactcaatctcctataatgactatttttttttcttcttcttctttcatcttttctgccccccaaaatgtctagagtaagtaaacaaggtacaacttaaaaatgagaaaaagtagaggaaagaattcaataaatcctacaaaattaaaaatttctacttcaaggagtgaaaaaataaaaatgaaatcaaatgtcacactgaggatgtatcaacaagaacatcatttagtacatcatcctcaccgtttgctaaggccaatagttctgcatccttatcttcatcacttgagaaatctctcctctcaagcttagaatgagctgcaatgaatattaacttttgtgccttttccataccaacccttgaatgtccatgagcaaaaacccatctcaacaatgaccaattgcatttgaatccacatgaagtagcatggagaaagatgagcctaactgcaacttttcctagtgacttgaattcagtgagataagtttcccacacaagcctactactctgtggattagcagccctcatcttgccggttatcgggtctctctctttcatttgtaccgcccgagcatagacaggatcaagcccttctgttctccatttcatgagctccatcaaagcgatatgagcctcctcccttgatacaagccttgttatgagcttgttcacttctttctcctgattagtagtcaaacacttgaatggaggaaggtatttaccactagtgtctctgatcaagtaaaggggatcgagtatgtatgctacaacccaaggtaaatgataattcttcttgaacattttttcaataatcctctccactggcctttcactaatgtgaaacttggagcaccagtctttcacttttgctctaagttcattccaaagaggaaggcattgccctactagtggtctctccacctatatctcttgagccatgtctttgatcaatttaactaacaaatgtctagcttcaacttcattccaaaaacccacttccccaatcatatcagattcctctctaaccataggttctgtcttaagatctttatgcattacttttgttaagtatatgattaaacttgttgctatcccaaagcaactcaacctctcactgaactcaattgctgcacacaataaaattcaacataaataatattaattgataattattttgttggatcatcatcaacattaaattcatttattttggataataacactcttacaataatttcataatttaataaaaatatatatatata

SEQ ID NO: 300410 - DNA, 1194 bp, Cannabis indica
acaatctacaatagttcagggggaatttttaacgaccaaaaaaattcaagttgtataattagtacatgttcaggaaaaaaaaaattacgtattaaaaaaactaccaaatactttcattaatgggcagagatattattaatagtctacatggcagtgacaaaccatgtaagtgttttggtgacccatcatatatgccgtttaataagagaaaatattaatatattattcaaatatattgtactattttatccttttactaatattcagtacaaactaaattaatgcactaaaatggctgatatgaaagaaagatcatttcactacttctctactccactttagaaaaagaaaaaagagattgtcactattaatggttaagactacattgtaggcagtcttaggtccacacatactataatattttcatttgttatcaactgattgttgtatgttcctttactggttttatttatttttctgcatgtttatctaaaaattaaaaaggtaaacaaaggaaaaagttctttctcatcaagttgatgatatgtaagtttttatatgactttggaactcccgtagggtatatccctttgctctggtagtttaccagctctttcgattgtgatgtaactccttattaaattagatatgttatcgtaattttaaattattatgcactcttttactagtaaaagggtttaatgaaaatcgtaaaataattaaaatttttataaataaattttaatatataaatacattacatgattcgagatcctgttataaagttacaacagtttttcataacatataattaagttactgttatactgaatttaaaacaataaaactagaacgaattaccgatagaagattctggctgattcccggacaatgtctctttctaattaagacttttcgcagctctacccgaagtgtgcacgacagtctagcaaccacggcgtccctaggataaaacagcctctgcatataaaaagttttgcaccgaactgtatcgttcaattacaccgtaatttttttgctttgagaaatattgtaaggaagaaaaaaaatgttgttggaaaggatatattcttacgtacgacttatatagtgaaatcgatccatgattaaacggtaatttaatcgcggaggagttggatcatgacagtgaaaagcggatcattgattgatcgc

SEQ ID NO: 300411 - DNA, 2871 bp, Cannabis indica
agggtcataactgaataagaaaaactaagtgcatttttgtttttctaataatagttgtccgcccctggttccaagcgaataaagaacaataaagactaacaaattatatgacaataacctaactttcagttaaaaatacactcttaatgactggaagcttaaaatttaattaagcccactaaatttaaattattattcatgtttatgccaaacttgcccataacaacaaaccaatccatacgattaattaattaagattaggctttggtcattcataaatttaatataatagttaattaaggttctaaatttgggaattttttttggctcatctatttgtcctcatatataaattatacattttcttctgcaatgatatagctaataatgaataatactaattattaaaaacaactgtcaatctcgataatctaatcatgatcatatatagatttatttctctttaaagaaagaaatgaaaagagagtcttttttttttttaggatgaacattaatcatttttttaattattccaataaaagatatcagatgcctcacttctctatcttgaagggtatcaataattacttttttctacagatcagctatagctttatatacagaagagatttattaagttcaaagaatattattatatgatatacatatatagtcatactaaggaataattaataaggaaataataaagaccatctttctcaattccgtatggcactgaaactcgaagtacgtactttatttatatttcaataagttaaataattataagaatattccgataataatattattatcaattaatacataaacatatacacgtacataatacactataacccctatccttctacagatgaatcttttataatttgaaaaataaaataaatcagtattattgttggtcacgaatatagtaaaagagcacgttgtttcacgtgcttagagaggattgtaggtgggaagtaattacaaatcatctaaactaaaaaaacaaaaaaaaaaaaaggaagaagaagtatatgtgtcaattagttagttaattaattaattaaactaagattaaaattaagcttaaattataagttttacagctgagagatgatgatatgaatcataagatcacgtgggttgacccggaatagtgggtcgacattgtccacgtcagttgagaacccagcaaccgtcaaagattttcaaaaatatcagaactttttttattcatttttatctactttattatcgtagttaattattatttacttaattatattattagatatttatatttatatataattaataaatatttatacacaatgtgaaaggttttagaaattttattaccatgtagaaaatcaagatatattataattttactataaaatattaatacaaaaataatataagagaaattgattaaacatatgttataatatatatatatatatacatgtttacactaaaagtagttaatgatgtggatatcaatgtttgataagtggcaagaagaaaacattttagaattgagtgatcccgagtcatagcagtcgacctgagagaggtccttagccttacgcacaggttgacttcgagaattctggaataggtgtttggatcccgccaagttatttttaatttactatctttcggtattatgtaccatgaagacataaagaatccaaatccaaggcctacgaaacaacatctcggaagtcaacccgggtacctagggtttcacctagcgcctgggttaacattccaactaggcttcagtatcctggaccgtcttagtgcaaatgggtcaaactttgtactgggacatgaattaaacatgtcacgatatatttgaggcatcagaattaaatttggagcacttttatttttgagcacttggagcaccaggtgcctcaggcacccaacgctcgagctaacatattgtcagcctggggcaagcattttttttgtcttcatccaaaatgagaaaataagtgcttttgggagtgaaacaaatcaacatggaggcctgaatggggaccgaacgcccaagatgacattttgtcaacttggaccatttccaaggtgcttttttgagacgccttccgggaatattccctgtttttgtcaatgattaagatataggtatttgtgggaatcaaacagagtcatctggtggtcaaaaaccgaacctagcacccaagttgacacctggtgctactcctagcgcctacattgacattttgtcaacctggatcgtttccaatcattttattgaaatagtgtttcgagcatttttcctgtcattagtaataatgaagatacaagtaacttagggagaaaacgagaatcctaaagggctaaaaattgaggctaacgcccaggttgaattggtgttgggcctagtgcctaggttgacaatcaacctggtgcgctggtttctgtcactcaaatgcaaattttaccttgggcattctctccggcatggtcaacaatggggtaggagaccttgtcctcgagttgaaagacctcagaaagttcaaaacgacatcccgaaagctttgaaaagagcacccatcacctaggttgacacatgatctggtgtgttgggttcttcttatccgattttgattccgtctcaagcattcatctagtttttcatagtaaacaagaggtatgaactcagacaagtcaaattcacaactttatattttcactttttcggcaaagtgacagtcgcaaataggacaattttgagttttgcaaaatagtaatatctctaagaactggagaataacctccgcaaaacaaagaaattggccaagtaatgtcaaaatatcacttaggaatcaaaaa

SEQ ID NO: 300412 - DNA, 2782 bp, Cannabis indica
gatccaagaaaatcgtgccagtgcaagcatataagcaatctatggtagcatctatgaaatatttgaaagaaatactgtcactccctaaagtttgccaatagaattgaagataacagttaaactatcgttaaaatcattcaaccataatcattgctgctattaagtgaattctacttttctaatactgtcttgcattgatttaaaataaaatacaagggtgtagaatttccacaagtatacaaaaaaaaaaaaagaaaaagaaattacaaaacggcggcccgttctctaagtaaagtgaaggaatccatttaaaaccccttatgtcatgcaaccagtgctaccaaagcctaatatttccccccaagtattcaaaattgctgctctgttcttcaaaaatcctcttattgctttccagccacaagccccaaaatagaattgacacagcagtggcccaaagaatttgtctttcttcgccctctttaacgcgaaacaacagcatttccacacaccttggaggtatacccccaatcaagccaaactcttttagtaatttgtgccacaatttcagggaaacatcacaatgaatgaaaaaaaataaaaaaaaaaaaaaatcaaaatgtggtaagctcactcatgatcaaatattttcagcctcggtaaattcagtactgagaattgatcattgttaacaagttttgtgcttgatagtgtttaatcgtgtttcatagtgcaaaaatcaattgtgccaaaaaactggtagaactgatagacttcattatgcatttactcaccgagtcacctcgcaaatcatggtacaaaacatgaaaattccgtatggatacttgtatgctgtcaaatatctattgaagcaaacaacaaagatcagtggtttttcatgcaacaataaatatcaacggaaaagcataaattatgcctcagtcctccgaaagaaatacgatataaaaaaaataggccaatctatactcataaataataagataacgttaccttagcataaatatatgatataaatgatcgcccggcccaattatctgcaataagcataatgaaatatgaatctccaatttgatccaagtcaatcaacaaaaagaaaaaactaacttctttagaagaattgtatttaaaataaagaagtcaaagcaccaaagagatggtatcctatccttgaactccttagatgtcaatgcccacaaagaaaacagaaaactgatgcagatagtatccttgaaaactgcagaagctagaattcttttcctttccttttctccaaaaataataataatagaaaacagaatagaaagcttaacataccagagacgtgttttgataatttagcaagctctgcagcagcaagttttgcctttttgctagcatattctctcttttcaacagcatcggcactccactacaagagatgaacatattagttagcttccaaaattttcagcattacaaagagttaagattagttacctcagcatcgtcccgctgggaagcacaaacaaatacatcctctaaacaaatgacaaaaggatcccaaccgagctttttccatggaatttttatgctcaactttccaacacgacctgatttacgtaaaatgaacataagtttgctattcattatcataataatagaatgttgaattacccaatatatgtaaaatgatcaaaagttgatattcataccttgtttgagagctaagggcaattccagatagtcgaaggcttcaagagtgagctccacattctccaagagcacttcctctgcaaataaatgaattaattaaatcaaaaagaaacaaggttttagggtttaataataacaattaaagaccgaaaaaaaaaaagaatattgattaccattccagacggtgatcttgagctgttctttctggatatctttgatgtagcgacccaaataccccaatatcaactggcgtacaagtccttccagcattatctctaccttatgataacacccaaagccagaaagcgtcgacctttatttcaaaataaccgtttggacttagcggccattgatagccaaaaaccctgaaaatcacaacaaaagaaaaattttacagtgttaatatacatatatataaagagagagagatttggaaatataccctggcgaagcggggtgtgagagagattattgcagatggacaaaattgaatgaagaagaaagtttgtttcagttctgaattctgacagacagccaaagagctccgcgtcgccgatcagaaattctttaaataataataataattctgtacgcccctcaacaacgacatgtcgtctttctcttttattaaaacaaaggctaattaagatttttaacccaaaactttgacatgtactaaatcataccttttgaatttttaagatcgttaaaaataccctctaaattattgagataattgaatttaaggagttttgtttaattttaataaaaataaaatctaacataaatgaaagttcaaatagcatgatttaatacatgtcgaagttcgatgggcatgatttagtagatatcaaagtctggggtgcatggtttagtacataaacaatcactgaaatagtaaatttgaatgaaaatagataaaagttcttaaatctaacaatctcaatagttcaaggggaatttttaatggccagaaaagttcagatggcatgatttattacatgttaaagtttaggagacaaaaattctaattagcctaaaacaaaactacattatattaaggtggcttcta

SEQ ID NO: 300413 - DNA, 3446 bp, Cannabis indica
aagacagtataaatatcaataatcaaaattatcatattacatatataatcaagccatatcacctattgtgtatttaatatagacctgcgtgttacgctcacacgcgtatttatgtttatgtggcatagacccacgtgttacgctcacatgtctaaatacaataaggccttagaatggttcatctcagttctaattaccgagtccaaccaaattatgccttgaacgcataattcttaatctcaatatatatagcatggcatagcatttaaacattaacaaatactagagtaacaaccctagaccataaaccgctcactttagggtaataatcctagtcccagctcttaatcacaaatataatattcaacataagcgccaccgcgtataactctacatgctaactactatcttacctgatgtctcgtaaacatggagattccaagtccccgggtgcttctgactaagtgtcagtaatcctagtcacaattttcaggattcacaaaatagggttaattcctaaatccacttccacataattataaaattggcattcaaatttcaaataaacacatagagctcagaacgagctttccaacgatacttggaacacccaaattgaagttcggatcaccaagctacgaatattcgaataacgtgttcgaaactgcccaaaaacaagggacgggctgcggcactcccgcggcacctgggttgaaaacccagactttcaacaggggcaggccgcgacacccaaagagtggggtcgcggcgcctaagtttcaaacccaggaaaccccaattttcaactagagaacatgagccaaaacacacctaactcacccaaatcatgcataaatctcaaaaccgtactttatagattaataagtagtaaagcagagcattagaaacatatttcacgcttaatcctcagccgaacatacatcataaattcagattaacaacattcaatataggctccaaacattgagctaaacatcaacacatatcaagctcaaaaccttgaaccacaaaactaaaacacaagctcaagaataacaaaatattcagagctgcaaaacagaattaaaacaccaatctaacctcaaaattctctcaaaaacataacacaaagtattttactccattcctctaacacaattaagcatagaatataaaaattacactaattcctacacacatgcatctcaagaacatttacaacaaaaatcatgctttccaatattcaatttcagaaataaaacaagactaaaaatggtagaaaaactacctcaaattctactcaaatccaagcaccaagaccatcaaacttcaagcttgatccaaaggaattttcaagacttaaccaaaatattgagatgagaaatagagagggtcagtttaggccaaggaaaatcagaaaaataaacatttaatttccttcaaattccattttattgaaaatacactaaatggtcaaaaagaccaaaatgcccctagtgccatacaccacctaaacatgcattcaagggcaataatgtcattctatcatattccacattaccaaataaatttagattattcatttaattataaaatgccaaaataaaatctcgatagtgtattttggcaccgaacccaatttggcccaaaatacccgattgtgactatactgcgccgacaagtcagaacacacctcaaaaaggacaaaacaagtatactatataataatatagtcccatgagcacgtaattaaattaaatttatagttctccccttctcggttcaaaaatacgaaaatgcccctaactcaccaacggggtcttaacatatcatttattagattaatttcacatataataaattatataataatataattctataataatacatatttaaccagtgagggtgtgttaatctgttttcttaatctttgggtattacatgatttgtgagaagagatgcaaaaagttcttgatctctctcgaaagctcttacaatgatttttgagtatttctctcttgaatctatgattcttttttctctaatttttctcgtgtccccgaacagtaaaatgactccactatttttatggaagaattgcatcaaattggttttccaaagctaataagaactaaaataagaaacttatttatgttccttaaataaatacaacaaaatgggaaactagctaggtttcctctcttctttgttactgcgaatctatcccatgaatttagggatattgtcataacttgcaagcttgcagatatatgtgttatatctctgaaagcatttaattcacattctctagttggtgtatgcgagtttcctgcataatggaagatgttagatgttattgtactaatcctcaaatatttctaacttcttttatgatttaagtaccaaatttctctataggcacattgtaggaggaattccccgcccaggttatagggtcttttccacgtgttactcagatgaatgccacctcacattgtataaaaattgagataacaaatttattgtcaaatcttaatctatagatgtccctcgaaggggccacataagatacaaaatgaataagaaaaagaatgcagctagaagatgaaggaaccgttggaggtgggaatgaaaaaaattaaaccaaaactcttttttttcttcatgaaaagtcatcatggattaagatagagaattgaggagtttgcgatggaacctaatcccaattgtttaatacacaattcccatatacgaattgatattcattactacttttagatatataataataataataatataaaattaattgaaaatattatattaaataatggtatattcttttaaagttaacaaataaaataaaaaaaacaatgttaaataaaaatttttgttacccatattttttagaataattagttttttcgctccttgaactttcgacactacctgattttgcattttaaaatatacaacttgttaaaaattctccttaaaatctaactgttacataattacgcctcttccgttaggtttcgtttctctcacctaatatgcaggtaaagccaataaacgagagcatgttcgaagtggtagaactaacaagatcatgggtgatcaatctaaaggagaagacatgcagtcgcaacagatttcaaattgacgaattaccgtgtgctcatgcactcgctatgataaaagagatgaacttaaatgtttataattactgttcacattattacacaacaagaacatggcttgacacatacaatgggtcaatatatttggtacacaatcacacaacatgggatgtaccacagaacataaaagatatccttgttctgccaccaaatcagaaaataagatttggaagaccaaggaaaagaagatttctagctgattgggatacaaaaaaacagaataggtgcagcaaatgtggtcaa

SEQ ID NO: 300414 - DNA, 4744 bp, Cannabis indica
ttgcttcataaattttcaattatttttttttatttatgtataaataataagaaaaaaaaaaaaaattgagccttaaaaaaatgggggccttgtgcaatggcccaagctgcccaatgcttgggccggccctgatagatggcgatttcaaattaaagatactatttagttgtaaatttattatttggagtaatatctagtttgatttaccaaaaaaaaaattatatatatttatatgtaataatacatatttaattctaaatcaaaattaaattaaatctaaacaaaatagttgaattagtttgcaagataattgctccattagcattttactatgccacggatccaagtgaagtatactacgaaaagaagaaggaatatgttaaaatcttttgaagagtttagtactaacattaatattaatgaaatcttttaataaaattttaacatgaatatacattaattattagaatttcacattggtgatatatacttgatcctataacttttctatcaatatacatgaatcctgtaatataagaaaaaggtggatggatacacgatccaataatgtcacatacatacattatatatatagtttatatagcctatatctatatttatgttgtttgaaatagatatggaatatataatacaaacttatatttaaattaccaactagtgtagttgttgctgactcggaaaggtacatataatgttttatgtcatatttatagtttaattattctctcactcacatatgacatatatcatatcatgaaacatatctactaacaaatcagaggatatatagagtactctatatcaagtctattaacgtaaatatcttaccaatttttttttgaaaaaaatatcttaccaattaatattccaaattaaagtattaaaattcccattatttattaataacaaagcactaataattaagacaaacaacacctacatagccaaccgagaggcatacaataataataatagtataatacattctaagcaaacaacaataacatcacaactttaaaagtaactatatatgtttatattaatagaagtgaattgagagtatataatttattagttgtaataacatttaattgagctgaacggttgagtcataaacagccccagctttccaatcctgaggaatggcatttgttgattgaacccaataagtgtagccaccactgcctgttgcttggaaccttaatgtcactgacccacttggtggatttgccatgtcccaaactcccccaaaagctctcctcataggtatccattccttgcaatcctcctacatatatataatcaaaattaagtatatatgttttcatttatgcatgttaatgtgaaaattaagtaattaattggctgaccctccatatctcgagggctgtaacatcgttttggccagctacatagataacaaccaaagccaagtagtgagggtagttgctgtgctcatggactttgtacataacattgtaaccagagtattggcaagagattcttctgtactcaacttcaaccacaccacatgcaaacaactcttttgctgcacttggaacaattgccaattttgagtaggctcttgggctcatgatgaaatcagttctgtctccttcaccatggtcagtcactactacatttactccatctgagttacaatactgaggatttttgcacctaacctgaatattaataatcaattaaggaaattcgttaagctagtgatctttattattaaattgcaattagtggattggacgcgcccccatacccatgattattgtgtagtgaaattaatctaaacaaataaaacttgtctcgctttctaaataaagtaattaattaaatataaaagttattaatgtcacctttagaatttgggttagactcacgtctcatgacgttgggcttacatcaaataataataacaatactataattactacttattaattcggtggtaaaaaaacttagtttagaggagacaattaataacttgtgtgtctcacgcggtaacatttctctcttttcattataaaatattgaaagcgacacaatattatatagagtactatatatatccttatgagatactttaaggtgctaacactgtcacgagtaatataaagagaattgttaaaatagcttttaacaaatatatctctaactaattattatagagtgccatctaataaaaaaaatatcactactaatataaattaaaatatttatggaattcagtattaaattatacttaaaatatatatatatttatatatatgacacctaattgtggtgttaacattgcgcatgtgctaaaaatttgtgcatagtaataataataagtacctgataacatgcaccacagccggatccattcataaagagcttataagaaactccggagacgtaaccatcattaacagttcttccatattcaccaaacccacaagctccccctaataatatttaatgcaccacaaattaatataattaataaaataagctcatttctgttgagtatatactttattaaaatgacaaaaacagtgggaaaaaaacactatacttggagtgccatagcagtcagggctaccataataggtagctctagagtcagtaaactgagaggtacaaaatgctggtaacaaaaccaccataataaaaccaaccaaggtagtactgcatagtgtaaacaaccccatttattttcttatatatatgtgatgtttttgtatacaaaacaaattgaagatgataagataaatggtagcacaaagattaataagcatatatataggtagaagagtttatgaatttggagtttgttgatatagaaaaagatagaattaacatgtatttatagtagaaagagagaaagagatagtaattaataataggctttggtgggatggtgtgaggtggctgctatacagaagaagttcataactaattaaaagagctgatcagagacggctcaacattagattagagtggtgatgtgtacgtccacttgtacacgtacttattcgtagaccattttcctattgggcaccatgcccaatacattttatagatgtcgtcctatgattggttagtggtatttctaaaaattatttttttaagttatatatatgaaacccgatatttaattatactgaagagggcatgttataagcactaatagtgttttttagcgattctcttattcatactctctccttaaatatgataaaagttaaaagatagtattgacactctcttagttgttatatcgttattggtacaattaaatattggatctcatataatttaatataataatttttaagaaatatcgctaattaattatagggtgtgccactaaaaagtattggacagtacttgtatccaatatcaatgctcctttaatatatgcaagcacaaattacatttaattatactacaataaatattaggagggacacttttgttacaagtcatatattgttattagtgtattttaatatcgaattttatatatattgatttgataaataatagaaagaattactaaccaattataatataatatgtgaatctaatattggaacaccctaagcctaaggtgtgaaatagaaatatgctcatatgacaatatttttaacccaatcatacttatcaaataaataagaactgatcactattttaaaatgagtaaaatgatgactgaaaattattgttagataattactagatctaataatttagtattattagtaatttagtattattaggactgtcttaaaaatcaatgtcatgtaactaataatgtgcacatattatagtatggtgttggaaatttcatgttcaatttcatattgatgtgacacgttatgagtaataatatagtttgtattatttattaaattataagtatgagacagaatattaaattatatcaataacaatttatcattttttataatacttgataccttattgttaactttcctcaaatcttaaatataatattcataagatattttttggattagttagagaagaatttatatttggatacgtggcagcctaacttttttgcctcatatattccttcactttttgttgggtctttttctacctctagctatgtttagagaattctctcttttaatcattacagttcggactaattttctccttttattccttccatagtttacttatttggactacaagtctagagtacctagaaatttcatttgtttattatccacaaaatattaatttataataatctacttgatttggtacagggatatattatatatacattcatgtatttgttcgttaaggtttgttttgagggttcatgaacataattaaatcataaataaataccactgggatagttggtaaacaattagacaatattttggaagataaaagttaagacttatactcttacatttttaatctttccaaagaaaatttataaattaacaataacagtgtattatatatgtacttcatgatttttttatcatcctaattttctgtcacctttttacttacatactcatttgtatatgggaaatttgaattttcatgcttaataaactcataaattggtcttttaaactaatattatgtataatttgtaaaataggataaccttttcctaaaccccaaaaaacccctcccacttttcccaaccgtccctctctcttcctctttt

SEQ ID NO: 300415 - DNA, 2105 bp, Cannabis indica
taggcaaatgaatactattttacttgaagctacaacaaataatataactaatttttaaagttaataaaaaaaaaaaaagtagaaatgataaagtaaaatagagagaaaaagagacaaaagaaaaaaaaaaaaaaataataggatgcaacacataggctgcagtagagtcagactaacaatattaaaaaatacaagttcatgatcaaattaaaaggtaaattatggtattaaaaatgagcaaaattatttttacaatttaattgtaaaatatgtgtgcatgtaaatttttctaaaaaaaactacttaatatacttacaaaaagctactactttaatagtgttataagaagtatgtgaaatttaatacgtattaaaacttgtactaaatttaaataattttgtgttaaatttgacacacaataaatactacttttttatttacattacttatgaaggaaactgaatttaataaatattaagctacacaaaatatgattaagaagaaaattagacactaatttttacgtagttagggtattaacgagttttagtaatcacaattatttagctcttggtttacactacatttccagtttttggacactagacattctaaccctttgcatgaatggttgattcaatatttatatgcatattatttgtaatgaccacatatagttaaatcatgaaaatttgcaaataaataaaagatttgattattattttatgattatgttcttcttagtagaaaattatggcttattgtgagaaataggccttaggagaatattttctcaattatggagatgtatataaattttaaatgtaaatatatattatatatgaaattttatgattttcatgttttatgctcggtaacagtaatgcaacgatttaatcattagagtcaaataaatatggttaagtatctcagaattagcaaaccaagatagtttttgggatttatttggaattatagttttagaccattttacctctagttagtgaggttacttcttagtgaaataaagggtaaaattgtcttttagcttttattttattagtggaaaattagtggaatttttagataactctctaggttttattggatagatacaagctgaataaaataaagatttttattaatgataaacatacacctgaatcaatgaattttctccctttctttttccctagctttggcccaaactagaatcaaggaaaacaaaattttccttcaacaatttctaatcaagctaagcttattttggcaccaactcatagcagctatggaggaagcaatctaaggtaagctttagcaacttatcctcttaaaattttaagtgtaaagttaagtttgaacatgttattttggggaattgtttctgtatgtgttggggatgttttaggatgttttgttaagttattttgagttattattgggtggttttgtggctaatgtggattttgagctaggtttgacttttaaagttcaaacttagctcaacaatagtgaatttagattcagggccttgatgatatttttactggttgaattatgttatttatgtcttgattgggtgttttggagctttgtacgaagtttggggtagttttctaggtagaaaacctagaaaaacaacctgccatttttaggaacttttcctagtcttattttttttttgtgtgatttctcgatatttagggtattttcatgccatttatcattaggaaaacttttagttttgagtttaaagtccctaaatgtgatttagcgggtcacttccagttttacgtaaattgttacttaggatcttaaattgtcgaacaacaatttccactcagggttaccgtcatacttgcattcggaattaaggtaagattagtataatagttgcatatatgaatacatgtttagtgtgcatgttattgggatttatacgctaaaagaaagtaattaaaggaaaatatattaatgaatatatgaaatacaattataagataaatgatacattaattataatagtataattattaaatatctaaaaattctttattcatatggagaaggtataatcttgtaagaatgtacaagagaattaagat

SEQ ID NO: 300416 - DNA, 1853 bp, Cannabis indica
tatttttttctttcttcttcttcccgatcacttcagcccaacatgtctagtcccgatttgttctactgaaactctccaatttccattaagaataggggcgacttaaaaacaaaaaaacaaaaaattgtctgagtaaaccttactctagaaaattcgatgtcaagaattggccaccaaaactcactactcaccactacccatatctctctttctatactgcatactacatccatatctctcggttttttagaaatataaagtaaaagaaaagttttatctttctctaagatcctaattcctatcacgataatatctcttcttttttcttttacttaaattaatttttggggatagtgggataggacgaggaagaaggtagagatgaagggatggtactagtctgcagtaagtgttgtgattatgtgttttcaagtagaaattagggcttattgtcagaaataggtatataaaaataatttctcaattatagatatatatttgaattctaagtaattatatatgttatatataaaattttatgtttttcatgttttgtgcccagtgatagtggagtgcaacggtttggtcattagagtcacttaaatactgttgagtatcttagaattagcgaggtaagataatttgacatttggaatgttgggatgtcacgtggttatgattttagactattttatccctaagttattagaatacttcttagtgaagtaaatggcaaatcagtcttttggcctttaattgattttgttgggagatagtggattttttgtagtaacctttagattattttaggataagctttgctgaataaaataaaagctttattattgataaatatcagtctaaaagaaaaagccaacttctccattttgagaccataagtcaaggagtattcaatgtatgattcaaggattgtgatagccaagctaaggtaagcttttaaactcatattttctttgattttttaagtgtaaaagttaggtttgagcatgctgttttgagaattagtttttgtagtgtttgggatgtttgagggttgatttctaatgttgtttgaagatgtttggagctagttcctctagttttggtgagagtttggtgttggttagttaagtttgagtttatgagctcaaacttagctcattaatggcaaaactcaattcagaggctttttgggttttgttgtggttgaaatatgtttattggactcaaattaggtgttttggagagtttcacgaaatttggggtagaattgagattggaatcaaattttgggtgtttttttgtagaaaaatggtccattgtttttccagaaatggtgaaccgttttccaagacagaaccccataaaatagttcaccgtttggggtttcgattcactagatttttcaaattttagtgtttagtttttcatgttttatcgatatttcaggtattgccacagtatttatcaataagaatttttttagttttaagtctaagtcctcaaaaaagtgagttagcgggtcacttatcagttttacgtaaatttgtgacttagggccttaaatcgtcgagcaacagtttccattcagagttacctatatactttcattcagaatcaaggtaagattagtataaatagatggatatatgtatacatatttagcatgcatgtttagcatccattcagagttacctttacactttcattcagaatcaaggtaagattagtataaatagatgcatatatgtatacatatttagcatgcatgtttagttgccatcagattagcatatcaggatattggtgaagtgtgcatagagttgcactgagatatcaatagatatatgcta

SEQ ID NO: 300417 - DNA, 1257 bp, Cannabis indica
ctaaatttatttaaatgtaaaagatcgggataattcttaacaagccttataatttagagggcaaaatcaatattgtcaaaagttcagcgagcaaaattgctaattattttttttttagaaaaatatatatgggaaaaaagcgtatatatatttgaaagaaatatatatttttctaacatataaaaatacaattgtagtatgactaaaatgttagaaaaatacagagatatcaataaaagaaaattaataagataaataaaagaccaaaagaaatacaactcaatacaaaatatatatatatatatatataaagactaatagattaaataagggatatttgatataccatgcttaaacattgtgtatggcctcgtaatataccaccttataaaatatgagacaaaatatgctaccttaattttttagttccaattataccctccaataacaaaactaaactcatctccccctctttctcgtcacgctctctctatctctctctagaaactaacacacacaaacaccaattggagcacctcttgccaaagtttcaatttaggtagaccaccagactccacatcaagtgcaaaggaccaacccaaactctcattataccaacacttacttaaaaaaaaactatgagtatgtaatttgtttatcaattattgtcgtgtttagttgtattttgtatgataagaatagatctacccatattcttcttttcctatgtctttttagtgcctaaaatgaacttgagtaaatttgcatttttttagttttttcgtgttttaacaatgttttgcaatgttttacaataagtataagattttaaggtccaggatatcgcctagcgacgtgtcgcgatgtctagcaatgttgttgccgacatatagtggctcaatcacctttaataatttctgtcaatatgttgcgacgtagtttgcgatagtcatgtttggatttgagatgtaccgcgataatttaatttagcgacgcggtttgcgatgtttcgcgatatggccataatatgtcgctataagtgggttttagcgacgaattttgtgttattttttgcgataagttgtaataacaatgcatttctcgacatttttcacatctgaatatattatttgttctatttttgtttgcagattcaactgtatttgtggttgtattatatgatggggcttgagcagttgaaggtttcaattggatattcaatacccaaaaagtagatgttaatgtttgaggttgaca

SEQ ID NO: 300418 - DNA, 4839 bp, Cannabis indica
ggttatatctgattttgggtgtcttttccccaatagttttttattagtaaagtttattcttataaaaaaaatcaatcatcaatgtcggccctcggctatacgtaagtattatttggatcaacggatgagattcaaagttggagttcattgtttgtacttgaaggcgggagcgggacataatgatttgaattttttataaattgaaagttggagtttactgtgaagaaagtaagacagagtgtgtctgactgtcatggccttcgcctcagaaccaactccaataacagacgacgatatcgttcggttggcacaaacctgctcgcctctcccctccttcctcctttcatcaaattcacacccaattctcctttctcacctcacttctcgctcttcctcttcttcttctccctctcttgctgtcaccgaatacacacactctctcctctacttcatctctctctcccctcaaacctcatccctttcttctcttctcgcttctcttctcctttcctatactcacctctttacctctgctcgtattccccacgaccataactctctcaaaaccattcaattcttcaacacccttatcgatcatgtacctgttactgctctaccccagattgctgattcgattgtttcgtattttccccaagttgttgattccgacgatacccagatcatcgaacttcttcccaggtgcctgaacttgattcgggaagcggatgagattgaatgcggcggggatctggtgaactcggtcgtcgaccgggttctaggttgcagttggtcaaaagggttatcagtgaaaatggtttcgctcattcgggagtttccccttctcgacaagggaagggttagtgagtttgtagacaaggtatttgtggaaatgacccgtgtggatttacaggatttgccttcgttcgtttatcagttgttggttttggcatccaaagggttttgcaagagagagttgatcgagaggattgttatgttttttgggtccaaaatggagagaaaggtaagctccatagttaggcaagttgaaggtactattttgctccacttaaactttgcggtgaagcaggatccttcattggcccaagaggctatgggcattgtaaggtcagattttagagctttcaatcatttcacagtagttattctgttatcactcgcaagggttcggaagtttggcgacagttcaattgggattttgaaaacagctcttcttacagcatacagtgattacaagtttgctaagtatgtcagttttctattacttgctgtaacttataagctgaatctattagataatttgatagatacatcaatcatgtaatagatatttctttttagatttttttccctctcttatataaagaatgttagtcatcttttccttttcttaaagagattgcaagtggctatctgatgacttgaaggaggagtaccggcaaaatgtcaaagttgttgaaaaagctatgttaagagctgtaatttccaatttcttaaagtctcttcatatacctcaaaattcagctcacaaatgaattgagatagtgtcattgtcaactatattacttgctttattgattttcagattaatgagagcaactatggaagagaacatatagtgcctagcattgtgcagtttgcttttctgctcttagaatctgtggaagaggcaaattgtaaagatctctgccactcaaatggtctcttaggcatggaaggtcttgcttctgagatgctgaaaactctatttgaggtccaagatatggctagaaatgaggttaatgccactgtatgaccatggatataatattagtacctcttttccggttgtggagcacaaaaatgcatctacacctttaatttcatatctttctttttccaaaatataaaataatggctgatacagttatggttctatagataattgagcaatgcaaatttcggatcctgtctttgaagcctgagcagagtgcagcaattacaaggtaactggcctagatgtaacattttggttttcttttggactagtattagtattatgtctgaatcctttatgatgaagcgtgctttattaaaactttgacatccaggttgcttggtagtctggtacaaagttatccatatcttttattagaccatgtatctcgtctcaaggagttgctggattattttactttcatgaatggaaaggttgcttctggcattgtttctgctcttgtacccctaaccaaattcagccgtgatcttcaggtgcttccaccattaaagttagattacaattcagcttggaggttcttacgttgataatatttgataatagaatgcttaagttttcgaactaactgatattcatcatctaaaaagtgttaaaatgaaattagctcaccaggacctgaagtaaagctcctttggatttatatgcaatgtacagacatcaaatttatcttgtgaaacatatctgaaatcttttagaatccttacttaccaagaacttttgttaccatgtaacagaaatcaagaattgtatttcttgatttgagaagaaagtaaaaacagagaattgaaatggggaagaatgactgaaatgaaactgaccaattaaactttgagctagagaaactttatttataagcagacttttacaacagaaaaatgatgcagctcaatgtgagctgtcaaagtccaaaccgttacaatttgtttgttgaatgcttaactgattttctaattgtgttgaatcacctatttctctatttccaatagcccccctcaagtgacataggtgaacaccaagtgtcaacttgtctctaaaataggtgaagttagaaactggtaaaggtttggtaaaaatgtcgcgacttgaaactcagtttccgcataatgcacatcatgttggtttgctagaactcgatcccgaatgaaatgaagatcgatcttaatatgttttgtgtgtgtggaacattggaattgaggctaaagaaccagctccaagattatcacaccatagcacatgacaacatggcaggaacagagacaactaagtgagtatggattgtatccatattagctcagatgtagccaaagcgagggcacgatattcagactctgtgctcgatttggcaacaacgaattgcttcttagaacacgagctaatcagattagcaccaagaaatatgctataacccgaggtggacttacgatcatcaaagcatccagcccgataagagtctgtgaaaccttgcagatcaagtcgataagtaggagtaaaagtaagaccgagatgcagagttcctgctaagtatctgagtattcttttacatacaccctagtgctctattgtgggactttgcatatattgactgaggttatttacaataaatgcaatatctggccgagtgtaacacaaatactggagaggccctagaacacttctggattcagtggggttgggtaaaggtgtgcctgattgtgaagaaagcttggagctagagcacatgggagtggattgaggctttgaatccaacatttttgttctgactaatagatctttgcatacttatgttgagtcaagaaaatagtggactcatcttggagaacctcaaatcctaggaagtaattaattggtccaagtttcttaagagcaaactgttgatgcagctgttcagttttacgattgacttgagcttgatctgcaccagtgattagtatgtcatcgacatacacaagaaggagaagtttcccatttgtattggtaaagaacaagcttgtatgtgacttagaatttgtaaaaccccactgtaatagagaagattttagtttgaaaaacagggcccttggtgcctgtttgagcccgtatattgctttgttgagcttgcaaacatgattagggaagttggagtctatgaatccaggggtgtgatgcatataaacaatctctttgagctcaccattgaggaaagcattattaatgtcaacttgctggatttcacaattattggttgctgcaagggtaatatagttcacattgtgcaaagttttatgaatggactgtatgtttcagtaaaatccaattcgggaatctgttgaaaacttttagcaaccaaacgagccttatacatgttaactgtgccatctttgttatatttgacctgatatacccacttattgcttataatagtaacatcaagtggtggaggaactaaaacccaaattttactccgaattaaagcatgaaactccacattcattgctttattccaaattggattggcaagagcaacttttatggttgttggtttagtaactggggagatgttggcaatataagttttgggtttgaagatgccaagcttaggtctggtaaccatagggtgaagattttgagtattaagaggagttgcagtggttgaagtagagcttgaactggttgattcaggattgtgactttgagatgagatattgtttgaggaatgagtgtgagagctagagctgtttgatgattggtgagagggcccatgtgtgggttgagttgaatttgaaggaggtggtaagggcgcaggattggggaacacagtggctgaaggaatcacataagctcctgtgtcaattacgttgggagcagtttgcttgattgagttttgagtgggagcaaatagagttttgtaggagaactcagactcattgaaagttacactatgagctacataaatcctaccactaggatgtaaacacctttaccctttggaatttagacagtatcccaaaataagcatttggatcaatgtttaaaattgcggatttaagcctcatggcctttttttt

SEQ ID NO: 300419 - DNA, 2672 bp, Cannabis indica
tctctctctctctcttgtattttttgtttcagtctctgtctcatctatggtcctgtgagttagtcactttagtccaatgtatcagaaagtacatctgtcattctgagacacaaagagttagattcagccttgattcgtggccaaaacagattctttgagagagttgtgtgagctgagtagagttattacctaataacaatgtttgtatttttatgttagtcaatacagattctttaagaaagttgtgtgaactgagttattactccaagattctaggatctgttgtaaaaggatcttggctccaaagttaggactctgttcttacttgtccaattcaatcttgatcactctaattgtttgaatcacaacaatcattatcatcataatcatcatctcactatttatactcatgtactcatttgctcatctgaatctgttcctcatcaaacattgtctatcacacatttcggctctatcataaatggagttagaaaaaagagagaaagaaattaatatgcattttagcaatcaaacccaacaaaaaagcttttcatgtaaattgtttggatatgattttacaccttgaaaattttgaactggaattttaggattcccacatcggtaacataattaattagaaattgtaaatttattatataaattatttgagttgctaaaatcaagcttcaaagaatctagagttttaagatattatgaacactcttaaggtgtccctataaaacatataaactttaaaagagtttcaagaaaatttatgaattattttaatttattttttaatttgtagtttcaaaatttttaatataatctatcaacctctatcgagtgataataaatttaacttcagttaattaacaagatatttctatttaatgttaatcaattaagcaataataaaacaatgtgattctctttaaatgaaactcatagaattagtgaaatctctcaatctcgtacttttcctatatcatgcaattctaaaccaattttagattacctttctcaagtgtgaaacttaaaatctctatactaattaataataatcatacattaacaagatgataattaacacaaaattgcataaacaaataccaaaaaaaaaaagaaaaaaaaaaaaaaaaaatttaattcataatttaaaatagttctatcaacactttagaaaaagtatttagttcataattacaaacataataaccataataatcatgttcattattaaataactaaatggaagaataaagaagaaaaagaagaaaagaactttaataatcctagttgatgttgattgcttgaaatctcttttcttttacttttcaatgtgttttttaatctcaaagttacttgtttgtatctcttcagtcgtcctaaaaatcaaattacatcattccttataatttagaatagaaagaatcaatttagaattaggatttaaaatttaaaaatacacgtacgacgctatagtgccatgcggtactcccgaggcttcgttttagtgcaagaaaaataattttttccagaatcggcgctatagcgctacaagccattttttcgtggctcttttattactttgaccttgctcaataaatcatgcataacttttgtgtttggactctaaatgagatgatttaacatgttttgaaaagctaagaatggactctattattttgaatttttaagctcttagagaaaataataaaaatactgtcaaaaattagctcaaagatctcggtcaatcacaaaattgtcttttaggcacaaacctacacacttagagaaaatacatcaaatttttacaaaaataaatactaatttacctaataattgactaagaatgagtatatgaatgtacactcatcaatgtatcactgggtatttaaaatgcctttaatactcttactgaaatacaacttacaaccaaaaataaaagaagctcaaaatacattcaagaacatataaactgtaaaagagcttctgtagagagagaacactttattttgtgtatctcagattgtatttgcaaaagaaaaggagaaaaaaagttagtgaaactttcaaagagagaaattgtaaagaaaaatcaaaaagagaaaggctgtaataccatttgtacacctgatattgatgaatgcaaatcaagctctgaggtagcttgacggaggtgtaaccatatttgggcgaactacgagatcaaattttggtgtccttgtctttaggattttttatttctatttctaaatcctaactctctttgtatttttatgatgcttttccacatattggtaccttcgagcctcatgtaggaaaggcatggccttttcctttgccttcggttgtggttcaggaatgttacaactttctccgattgtttttgtatggttcttgttgtcaatggtaaagatgttcattataatgagtttgatgttgtgcttaatgatacttctaatgtttgaaaatcattttaaagtatttctttgtttcattacagtaggtctaagaatataattgctcattctcttgcaaaaacctcgcttgttgttatagtgagatttctctcacctagaaactcgagaccagactcctctttaaaaggacacgtgtattcagattcccaatgaaagctgaaatgtccgtgagagacttctcgaagt

SEQ ID NO: 300420 - DNA, 4241 bp, Cannabis indica
aaaaacctggaagcaaaatctctaccaagtagtctgtagtggtcaaattccccaaaacctagaaaacaagatattacttacatgttcattaaaaactgtgcaattgggttagcatatgaacaagttcatcacttgaaggtctctcagcaggcacatctgaaaggcatacaacagctattctcactgccattaacatctcatcttcctcaccttcttctcctacttcacctacaatactcttatccaaagcttctcttgcctcccctgcttgctgcaagtgccgcaaccactgccccaaactacccccattagatgcttccccgaagaacggctcggttgggtttctaccagttaacagaactgccaatatcatcccaaagctgaaaatatcacttttatctgtatacctgcagcatgagaaaaagaaagtgatccaccatcagtttcaggatatcatgaattcttcttctcttttttacttgcaaaattcaaccagatattaacaatttcctaattctgatgtggcactacgtctagtttctaccaagtagcatttgtaacaataggattaggtgtttttcgtctcacgatatcatgaattcttcttttcttttttacttacaaaactcaatcagagaataacaagttcttaattccaatgtggcactaactcttgtttccatcagatttgatttttctttaacttaatctactgaaaaatgaagctcacaacatcaaactaagaactcaacatgccctcatgtaagttataaagacaagtagaaataaatactactactatgatatgatatgacgatcctacataacacttcaacatacttgatgaaagttaaaacctcaggattattctaatagcaaacaaattcatcccattatccattaaagctgcacataaaatggagaaacattagaatgaaaaagagaaaagtggtgggaagaatcacctgccattttgaaaacactctggagcactataaccagaagttgggcgatcaatatggggagtaagcttaaccaaggcacaatcagccaacctgggctcaaactgtgcatccaacaagacatttgtaggttttaaattgtagtggagaatctgaggaacagccgagtgaagatactgaagccctttaatcacaccaacagcaattcgaagacgaaaatcccagccaagctgcaattcattctccctaactctactcatagcatcttccaagctcccgctctgcatataatcataaaccaaaaagaacctatctttatcacgaacataagctcttaaactcatcaaattcctgtctctgaggctagcaagaacttccagctcctgctgtatgagtctcttcattgacttagacttgcctttaccctccagtgagccgttctcagaaaagggttcgagcctcttgactgctatagtgagcccattgtctagcacggtcctgtagtacttaccagtcgagcttgaccccagtagctgattttcgctcgacaaagccgattgcagcgttttggggtcgattttgggagagaatattactgggcctttgagaattggggttctgttattgtacctgacaaagcaaccgaccatgaaagcaacgacaagggctcccccaactccggtcaaaacacctaaagcaatgctcagaatgactctgcgaacgccgctttggaagtgagagggtctggaactagaagaaggtgatggaggctcagaggagattttgttggttctgctggtaccactactctcttggcaacgcagagttggctggtgaagaaaaagtaacaatagaaacaaaagcagagtagagatgttgtgggtaggccttgtgtcatccatgaaagcatccaaggaacaaggtaataagagagttaaagagaaaacccacatctcatatggtcttcctggatggagcttccttcttcaagccattttgctttagctctccaatactcagtaaatattggtccttttaagaatttgaagagagagaaagagagagaagggtaaaagctttctggggttgtctttttaagagctgttaatttaaagagaagaaaaatccaactcactcccaaaatgctccactggtaatgtataataagatgagaagaagatagggtagagaaggctgcatggaaaaatgtgagaatatcataagggaaaaatggaattttgagaagaaatcttgacaaggaagacgaaaagaatcggttccggttggtcaccgaatcccatctttgtctgtctgctcaaaaaatgtgaacatgcaaaaaaaatgccactgggacacccgtagagacactattatatactatagctacacacaaaaaaaagaaatttaaaataatcaaaagaaattcttatagaaaaaagaagcatttgattgtgggctttaataaaatctttcaatcaaggtaaaatagaatagaattgaggaggagaggaccccagctcaatcagattatgttgaattattacacaaaaacataaaaattgaaatgatttttagagcaaaaaatccaaaacagtggaaccaaacaaaagtaagtaaactccgttccgtttgttttggtttttgattaattttctttcttttttgtatttaaattttctttgtttctctcgactctcatctcaatgacaaaagctggggcttcccgcctttctggcctgaggctctgtgttgtgagtgtggggtccaaagccacgtcacctcacggggccgaaagtgatacatcgaacttagtgagcacaaagattacccttttagtttacaacccctctaacatctacgccgttggtccatctgtgacattacatcctcaccgtccgtgacaaaccacgggtatttgtggtgtgctgttccttttcatcgttgcaaattacgaagtttacaactaaattcccattttcgttttttgctggggaactaaattcacaattagaatattgtgtgcataggcatagttagtctaagtatttgtttgttggatcatatttaatctatttaactccaatgattcaactcaattattaattagatgatagattttgttaactatctaattcaatagaattaatttaacccatcaaatttgatccaataaatatattaaattgaattggttttaattcattaaatattttaattaattttttatcgaattggattagatctttctatcttttttaacaaccatttaaactgagtttcatcacaaatatatataaataaaaatataattcaatatttaatgctcataagaaaatttgaatatttatacgtttattggacaaaaattagtcctctaaacataagctattcaatattagtaaaatatataaatttttactaaaatctcattttacccttcttttttcaaaaacgggctctttctcttcctccctttctctctctttctctaactctcccgaacccatctgagcacgaagatatcgaccgaacccaccatctaagcaccacttgaccgaacccaccatctgagcacgaagacccactcgagccaccaccctcgtctccctcgctcttagaccacgaagacgaccaaaaaactcgacccaccacaacgcaatgttggccaaggtaagatttcctccctatggtatttttgaatgtttttcttattgatttagagttaaaatgttgtttattgatagatttagggtctgatatgtgagttttggattagattttgtatctgtgatttttgggcgagaaaatataattttaggcaagcccgatgcatcctaatgcaaagatggatctagggttgaagataaaggtctgatatagggcccgattgtttgcccattttttcaaaattttgagttggcatggtgggtccaatataaggtacgatggtaggccctgattgattttctcttttgttattttttagatgagggtcttataggcccgacataggacccgatagtaagcccgatggtaatgttgaattttaattttttgttatggcccgatatatggtacgatattaggctcgatgaattttctctttcgtaatttttaggtgagggtccgatagtgttgggattttataccctaaataaaactcatttcaatataatctgacttgttatcaatagaatattagaagtcattcatgtttacatgtagtttttatgtttatggtttaatatatacaatttttgttaagtccaaaacatatag

SEQ ID NO: 300421 - DNA, 3343 bp, Cannabis indica
ttaaaaatttattttaatttctctcctaatgcatgactgggtgagttatatttaattccaaatccatttgaacatctaaagtggaaaaaaaaatgaatgcaaaagtatttaattctatagataacaatattatataattataaagtctataaatatagatctaaataaatcttttactaattcaaagggaagaacatgaatttaattcaagacgatcttttgttgtaattttaggtaatgatcttccaataatacaaaatttaaaatttaagattatttagttttctctcaagaaaaatgagaatagtgactcttgtttctttagaaccactactaatttataactttataaatatgttattcatcttaagtatttctattttattaatcaagaaaggaaattatcattattcacggaacaaatacaaacacaaccaaacaactaaaaccagtctagcttacaacaaaccagctccagctattaatttcttaataaactatacatttaagcagaaagtgttgatcattagtgttaaccttccttctagcaatattaagcaatttataagataacgtcttttgaacctcagcaacaatcgacttagttgacctagaataacctttaaacacacttatttcgatttttccatctcatacactgttacggccatcaaacaatttataactgcaatagccaagcctttcctggtattgcagatccacatgttccagctttcaaacacttgaggccaagaaataggccccaaccaactgaacatcatctgaatcactcgatcagacaaagtgcaatcaaagaataaatgagcgtgactttcttttgttaaatcacaaataggatagtttaaattttcaacagagatgcagaacttgaccgacttgtctctagtaaaaagatgggagttcaaagcttgccaaaaaaaaaacttatgtttaggagcacgtagttgacaccaaacatttctttgataactaatagcaggttgctaaataagactgttatagagttttgcagctctaaatttgtcagaacttccttcagtagttatagtacctctacaaaatattttcctcaaatgacaaagttttctccaatatcagctcgaatcctgcttcaaattataattctagaaattagctcctttgagttatattgaactaactcatttaacccataacaagtcttgcttctccattatagcccaaatatacttaaccaaagttgttttgttccacaaagggccctctcgaaatcccaaacctccaaacaacttaggaagacagccccaaagaaattctctacaaagtttctcaacttttttaataacactctgaggaagaagaaaaatgctcatccaatagttccttaagcctataagaactgaatggatcaattggactctcccaacaaacgataaatgcctagaagcccaagtgtaaatcatgagttttatttttctcaagataacatcactatcttccaactttcacttggtaggtcttaataggactcctaaatactttaaagaaaatctactttcctcaaaatattgaacaaaatggtcaacaacctcactataatggtcagccaaatctccctgctcattaacaaaagaagcaatcctattttcctcccttctcttcttaatacaagcatgaaaataagcattattttcatttccctttctcaacaaatcgactttacttcattgcaccagaaaactttgaagcatacccgatttaacattataatccttagcagcctctaattcagcttgaaaacaaacatctcttgggtgagcttgagcaacagctttagcttcttgataatactctttagctttatgaaaaatagcctgtacatgaccaactaactccctattgaatcttttaagaacatacttcagtctcattaactttaaataaagagctttaagcccaaaacttcttagcggtaaattccaactagccataacagaatctttaaaactaatatgttgggaccagaaatcaaagaagcgaaatggtttagttccaatattctgaggttgagttgaagaaacaatacaagagcagtggtctgagataatttccaactagaatatagctgatgaattagggaaaacatctaacgaatcttcatttttgaacacatgatcaatcctagaataaattctatcttgaccatcttaattattagtccaagtaaaatgagaacctgaactagataaccaatcaactaacctcaaagcaagcccaaatattgtcacgaatacacataaaacttaagattagaaaggtatcaacacttcttttccttaagcgagttagagccataaacaaaaagtagcacaaaaaacttgagaaatccctgccatttttataaagcaatgaacaaactaatctgatttccactgcaatgactcgctcatatactttcctctacaaaatcaaaataagaccttcagtaacagagctagtatagtaatcccaaccctaaaactgagaattaatcatttcaacaacttttggattcttcattttagtttccaataaacctataactcctaccttcttaatactgtaggtatctacaactgcatcctacttattagtattattcaaccctttcatatttcaacttattattctgcaattttccatgatcaacaagaagaaaaagtacctcccttaagttaggctgctcttataaggcctcatgagcattctttgaacttcctggttgactgtttgtctcttgaacaatattcttcagactatttctcaaatttgatcttctcataatggccttctttggggtttgccaatagattcctttattagttccaatcccaaaacactaattatagtattactatcttccatttgagcttcaagaacaacagtagcagcctgtttttctaaattaagagcatcagattcaacaccagtctctacttttttctcttcctcaacttttgccttttttacccacagaggcttttttttcttcttacaatcgaccattccatggccataaccaccacagttcttgcattttattgggagccattcataatccttattttaatcaacaagtctgtcatgctcattaagaaacttcacaattcggggaggtgaatctaaaatttccatctcaaccgaaacccgagcaaacttcaccatagatttttctttagtaactctatcaaccattatcagcttcccaatagtgctaacaatagcactaagacatttagaaccccaatattgcaagactaagggcccgtttggcacaacatttgaaaaaactaaaagttgcttt

SEQ ID NO: 300422 - DNA, 3827 bp, Cannabis indica
taaacatgccattaaagtattggtgctttaagtagatggaattaatccatttagcccaaataacatcttgctttatggtaagagcccatacaaattgggcaatcgaggctttgttctacttggttccatcacagaatcccaagcctccataatacttaggcttacaaacaaggtctcaagatgcaatgtgaattttactagtattccctttcgcacccctagaaagtccttatagagtttgctagctttcttgaccacttcttgggggatcataaagatgctcatctaataacaacgaattgcctaacagtattgactaaatcaattgcgtcccaccagcaaataagaggtggcgagttgcccaattatggagcttcaattgaatcttctttagaaaaagcttacaatcctatgccttctattttgtcagtcttatagtgccccaaaatacttcagaggaaaatgtcatcttcaaacaaaactatatctgaaatgccttatttaaacacttcatcaaccccaccaaattaaatatgagactaatttagattagcattgaggctagagcaactactaaacataacgaaggcatcttgaattacataggcttttgttgaccacttagaaaataagatcaaattattagcgaaacaaagactaaaaatcttcaaatatttacacattagagttacaattgaaaatttaaagaaagaatagactaagatatgtagtagaaatacaataaaaagaaaatacatgcttattcttgtatagaaaaaactaccaaaagagagatttattatgtcaaaatatcagagctgtaaatatgtgtgtgtcgtgttggtccaaccagtattttgaaaagcctatgaaaatacatatcgtacctattgacctcacttttagctaacgacagtgagtcaaattaaagcgtttaaaataattgaataacaataatgataataataataaagaaaaaaaatatcaaaattatagaggttcaaccccttggtgacggtaatagcctactccccattagtttgtactaacttgagtagagaatcaagaaggccttgatctctctcgaaagctcttacagtgatctctgagtatttcaatcttaagtctatatttttctcatgtgttttctttatatgaatttcgtgtcactgaatagtgagatgattctactatttatagggataaattacattagtaggttttccaaaactaataagaaataaaatgaaaaacctatttactttctataattacaataaataaaatgggaaacaaggtaggttttctttcttccttgatactgcgtatttatcccatgaaattagggatattatcgtgtcttgcaagcatgatgatgggatatatctatagaaatgttcaacttgcagtccttggtcggcttattcgagctgcctttatgatgaaagctagttgggtgctctttcatgctctactcggatgtctcaacttcaactgactttgaatatcgaatctccctgaacggaccaccacagttagaataacccatccaggttgtaggattctccatgtgtcacccagatagatgccacattaccttgtgtaaaaattaggataatatttttcccccaagtccgtgcaagaacttcttggtcacacgtggacttattcggtcattaagttgactgatccggttgacacgtgttcagtcctttcatttgagcccatgtgactgattgaatgtccctacaatatctggggaatttaataccttttcttgaaagctaaacctcgagacacgtaatgacagttgtgtgacacatgtgtgacgtttgacaccaccgcaatagaggttgtcgttactgttgcgaggcacacttctgagttgaatccactgtctaaagatagaaggatggcaaaaacaaaacaaaccttgaggaagaatttagaatctgaccctcactttgcttcgctattagcaatggctgggatggagcaggctagacccccgaatgaggatgttaaagttgttactggggacgccaaagtccaaaaaattgaggactagggtgaggtctgccctgctggcccttctgatatcaaaaaaggaaaaaggagttcaagttttcccttttggtagatacaataaagttggagagcctgtctccgagctgagtgatatcctggtggcgggccaagattatgtctaggtggaatacgaggaagactggcccttgagcaccgaaggaaagaagggtcctcggttgattttgcctccgtccatactcacttaaaagaggaagaagaacctcttagacgagggtatcctcggggaagtagaggctttattaccctgttctgggcaattggcaatgaacctaggaaaagggctatgtgaatggtctgggccccatgcaaaaataagtgaaatctttcccttgcatccgtactttaagaaaatagccaaatactacaagatttgtctgacccacctcactcccaagggcattaagtatttggccacagtgtttgtgctgccacacacagatgaggccagccttcggcccatgataccaactagctttttcacttgaagtcaagtttgaagcaggattggtctgaaatttttatttatcccaaaatgagcactagtggctaagcggtactacggataaggaggtatccaagattggtggatttcttgaggattaatacattgtcaaagacatggatactaaccacctttctttctaacagatcccctactgtcgtcctcatttcaccttaaggctaaggtctagagctcaagaaattcttgaactgtcgaagtcagctcgaaacatttcttccttggaaacgacaaatttttttcttaagtatgggctttacccatccaatgaggtttaagaatctgaacaggaagttaaggagattatcactgagaaggaggctccaggatagaagaaaactccaaatgggcatcaggtgccaactaaccggtctatgaagatcagagatgaccccgaggtatccattcgtcatgttgtctatgtaatagggaatgggaaggtcgtagtagtggaagatgatggggattcttaaaacgaggatgctccgtcttttcttgtttgggagggtgctccccctgaagtctagggtagccattgctttacttatctttgtttatttttacttgttctaatttttaacaaatgttttcttttgtgtagccatgtcagagaagatgaaacaagcgctttcaaaaaaaggatcggtgatgcatccgaccaaaattacctacaaaatgaccaaaggttaatgctgctcttccaacaagtattggctcgaactccaaaacacctaagtagaagttgagaggagctcgacaactgtcgtcatggacatttattagtcccttcctctagccaagaagacttcaaaagattaacttcccactgctccagccaaaagttctaaaggggccaatgttgaatggcctgacctgccaaagccaaatgccactacacccaccatccagttagagatgaagaaggctaaagaaatgtttggcttctactaggattgtaacgtccccgcttcaagcctccattggatccttacacccacggactaatggctcatatacacgagtacgccactctagatgctttatggactgatgactgaccctacagaccaacacgagtatttccagtgcgctttgtcctcactcgcacgctttctgggaaaacttcccaggaggtcacccatcctaaaattgctccaggccaagcacgcttaactgtggagttctttcgagatgggct

SEQ ID NO: 300423 - DNA, 576 bp, Cannabis indica
gatattatatttatatagttttcttgttattttcgtgttgtataataaaaaaaaaaatatttaaacgtaaaaatgtaattattttttataaaagataatgtcttaagtaattattccttaattaatcgcaaatttattatatagtcagttccaaaagaaaaaatcttactacttgcaattgttttgcatgatttgttcttcgagctctacttctcatttacccttgttcctattctaccgttccaaacaagatcatatgttaataagtgtttcacgtgctaattcgatttatatttttttggactttaaaaatataggtcgtgtcgtatcgagctataagaaaatatggaccatattgtactgtactataaaaaattatgaattatgttgtactgtgcaataattttatatggtaggcctggtacaacctacaagttcagtaatttcgtgtcgtgctcgaaatcgtgtcgtatttcattcaggtcggctcatttttcttacacagaccaacttattttttttatacgacacaaattcgtgctttatatttttgtatttttattacaattaatgagc

SEQ ID NO: 300424 - DNA, 1527 bp, Cannabis indica
ctttgttagagcctctatattattttttgattgtagtttcagtttagagtctggtcctagtgatttttgttaccttgtttgataactgagatggttatttaataaagtcgtgattttccattcaaaaaaaaagtattctaatttcattctaatggaataatctttccattattttggtaaaatgattattccattttaaatagaaagaaagaccattctaatgtaagataagaaaaaatttaataattatttttattaattttaaatttgattctcattcttatattttcatttcttctaaccaaaaatcacgttagatagtgacattgctaatcctctctcttatttattagactacaccgcgtgagaggaaagtgattgagaaggaataataaacaaacaaacaatagaaatttcagctttaaattgctacctcaagtttttttttataagtcgttgtgattagatatccaagtcaatgcacaaataatagaaataacatgcatgttataataacccattccatcaccaaatactccaaaagaaaaaggaaatcatgagtactaagctgatgaaatttatgttgttcttcatttggatggctaccattttgtgttgttcactagcacaaaaagccatagataatttaagatacaaagcttgtgcaccaaaatcatgcggtaccggtcccaacataagctaccctttttacattgaaggcgcgggaacacactactgtgggcgccaaggcttccgaatcacttgtcaaaataacaaaccaatttttcgaaccgacggaggtccttacatcataaaccacatcttctacaaaaacaattccttaaagatagccgatttggatgtagttgacgctgattgtgttgctccaagacactatttccaatttagtagagatcaaaatttcaatttcagctcgaaccacgggaatgttcaattcttctaccaatgcacaacaaactcgttcttaccaaatttggagaaatctttggttccttgtgcctcgaattccactcattcaactctagttgcggtggttccaaacgaccacaatttggggactactattaatgtttcgaagcagtattgtaagaaacaaattgctgtgcctgtcgatctgagtggaaataataataataataataatcaaagtattaaaagggtgaactatactaaacttttaaaggaagggtttagtctcgtatggtatggattagattctcacccgtgtgaagcatgcgagagtaacggtggacgatgtgggtttcagaataatggttttgtttgtttctatcctaacgaaactcacgatgttaatattggtaagtttcattattaatttccataatcaccattctaattttgttattagacaatgttttcagcataaaattagtttacatttaaggggataatgtttaggcacagttcttatatattatatattaaatttaagggcattttacaatattgtatacattatattaattaattacaaaatatgtgcaa

SEQ ID NO: 300425 - DNA, 3421 bp, Cannabis indica
ttaataaaagtgatatttttcaatttagagaatatacacgtttctaccgtgcactccaaaaatgaaatttatatacatatatgggcttctacagtgtcttctctaaaaaatataagtttatatatccatccaattcggccccttcatgccttagaatttctgcccaaaccattataaactttaaatggtgccctccaatttttcatgctattaaatattgttcgcactatctgaactgctggtaccaaattttgcaccatctcaactcccatttacgtactcaacataataatgataactatccctttgtaggaagtctttcatgaagagctaaccaatgaataactctatgtttgggagtcattacaaatttttttacttttagttacaataaaatttgtgactaaaagtaaaaaagttgtgactaattataaattatcattcttatgttgttactaaaaagtctgtggctaaaagtattagtcacaaaaatctctatttgttgtgactaaaattaaattagcgacaaattatatctaaatattatattttagtcacaaataatattttgttatagctaaaagtcacatttagtcacaaaaagagtatgtttgactaaaaaattgtcactaaaaattgactctttttgtagtgagtactagctctatcccatagcatagaaaaattctacctgccatttgaatgattctacaatttatggcaaaagggaagaaatagagagaactgaaagttttgaaactcacttagagaaaacatgtacagctttgattttgctttttgttggcactatgcttccaataccaactagcatgtagtggggtttcatagttccacaatgtgacctgaattagttattacaactatcaaaaatgtgaccctaaattttagacaagggaacacaattcaattgttgtaataatagcttgagggaaattaatttgtaataatgtaaaacttatttgagtagaataatttaaaaggccggggtaattaattattaaaagaaaagtattataatgacatgttataactattattttattaatttataatttaactttttagataaatataagtgttgccacataattatatttatagacttatacctgatcaattttctcttgtgtgtgattagatggatgtaataactaaaattattgtgatacatttcatagatacaaagtttatcatcatgcacatgaagcagtccactttcaagatccataataatattcgatcgaggatatatatttagcacttgggcattaatcaatggttcgaaccgaaagaagctgtcttgtatgtatatacatatatatatatatatatattgatctgcaggtacaaaagtacagctttttcttatatgcacatttctgacctaaatggataaacctatactagctaagtatatactcgtataaagtacttcgtagtcaaatattctatagtactatatatgcaaattattacgacagggcatggtgatgatcatatatatattattattcatgatcctcattaaaacaagtggccaatccacttagctagccacttgttatgtatacatataatacctgtatatataggtttattgtggcgactcctattcagatacaaccaagttgtttgccttgtcatcccaaatccccaagtttcaagtgaagctacacccaaagaaattataatcgagagatccatatggaaaattaaattaaagtacatactttttacattttatccagatcatattggaattttgttatatatattcgtgatttcaatgttgtaatgaactttcacatcgtaacaggaaacatcaccattattactgttattattataaccatattgatccatatatgagcacatgaaaatgaccaaatagttttcttttgaagtgatccaataacaaaaccatgcaacccaaacttgtctagtgccataatattattctgttgtaaagtctctctctttcttttgtatgcatgtcatatgatctttccctctccaaatattaatttcttctataatattgatcatcattgacttatttgttttcccatatattgtacgtgactgtgtcagcatttcactcaagaaacttcttaccaagtgctccttcttctccaacaccaatttataacagtactatatattaagcttctatgtagacacaatactactctcccatattatgactctgtctcgtatatcttgtctcgtaatggcctaagcgctgttgaccacaatggttaaaagtcaacatgaaaaagtatgatgaagaaaaaaaagaaaaaaaaaacctataacaccatagaattaatgtcaagctatatagaaagtgggccaaaactaatttcaagaatataattttaatgtgtacgctaaaagaaaaagtgtttgaatttattttatttatgtaaaatctaatgtcaagtcaaatgggaactgttttggttgattattaacgtcactatgcacccggtcgatcacttactaaaagcttttatatttgcaggttaatatagtaaagatatatcaatatgttctttgcaaatatatttatataaataaatgtgttaattaaaaaaaagagagaaaagctaattaattataagagacgacttcgatatcataggacaatgtgttataaatgcaagtcatattcatatctaataaacttcatgattatcatcatcttgagtatagaatattaataattgtgcatggaatgcaattagggactgcgactttttgtattgtcattattgtgttacaaatagtaccttgtattacttcttgtttttttgtttaatttgttttgtagttattaatcggttcaaatcgaccccttttaagtgaagtgggatgccaactagctaaagttatacatgtgtgtattttagcaaagataagtcatttatatgtaagctataaccaagtaaatattcactaatagctacgataaatcattatggctaaaatgcctaagaaaagcatatgattctcaaatatttaatatcacttaggcaatatatcgttatatatatagcctatatatatcacttaggcaaaaatcattatctagctaaatttagcctagctaggaaaaagacattataatatgctaatataaatctttatatatatatatatctatatatatatatagctgatgatatatggaactgccgacaaagtcactatatatattacatccaacatttttaagcatatatatttatataaatatagagatacgaattttgcctcgtaatgtacttttacggaatgtattctgtgatatacgacaaccgttagatgagaaagttatttgatctaagggtaattagggttaaaaaatggtaacgagactcatctaatgtactacgaa

SEQ ID NO: 300426 - DNA, 3053 bp, Cannabis indica
tttttttaatgaacattccactttaacttatgtttcctttcacgaatcgaattgaactgaatagattcaatccaatttaattataaaaaaaaaattaaatatccaattacaattagattggattggatgttaaaaattagattctaattggattggatcaattattagatgtcaatctcaacatctaattaaaaactcactacaagaattttgatttttgtcagcgaggaaaggcataactcgtcataatagttttgtcagcgaaaaaactcgccagcaaagcctaccgtcaataactagttgggagaagagtttttgtcagcaaattaagtactttcgctggtaatagaattttcacctgtgagtttcattgtcggtgtaggtgccaccgccgccatttcttggtcgactgaggagttttccaacgtgttttaccagtgaagtaagtcgtcaacaaaacttttgttctcttttttagtttttcgcaaaaattttgtcggggcattttacttcgccaacaaaagtatttttactttttaaaaaattatttttcatgttttaccgacgtaattaacttcatcgaaaaaaacctttttttgggaagttttaaatgaaatataatatacataattgaattaaactaaaacaatttttttttaatataatataatccaaactatattataaaactaaaattcatgtataattacaaaactaaataaagtttccaaaactaaataaagtgttgttagtttataaaaattagtaagatttatactaaaaattataaactaaaaataaaagtacaagtcaacaacatggtcatcgtcaacctgagtgggaggggcagcctgtgaagaagacccagtgccagggggctaaaatggtggaatcggagccatcgggggcatgttgaagctaggaacgatgttaaacagatacctgaactgctcatgaaacgtgctcatgtaatgattctaagtctgtatcatttgtttttgtcggtcgtttcatgtttcctgctcttccaccctttgcttcagcgcctcatattcctctagggtgatagtaggttacccagagggacctgccctcatagttgttctcttggcccccgtcctaagtctcgataattggctcattcctttcaagtggtgtgaccgctcacccaacataataggcatgtctgtcgaaaactagatgaggtctacatcgtactgtcgggagacatcggtcggcactggttgaatttcacgaatctcaactattttggcatgcaaataatattaataaactattaaagttgaaaataaatgaaataaaaaactagtttcttaaagatataaagttacttacatgtagttgttttgtgtgttcatcgcgcgatttgttgttcttgtagtgaaattttttaaaactgtccatagtactgggaagttcttccgtctctggattagcctatttttatacataaaaaaattagtaatgtattattcaaaaattattaatttttaggtaataatatttataacatcataccccgctgacgatgtggccgactatggtcttagacccccatccaccttaaattttcatttgactttagtttttttgcattctgtgcggcacttgcctgtaatttaaagtaaatttattgtcaacaaaatgcgccacaaagtataatttaatggaagtttaattttacaattttcattttctacctgttgtttttggtctttctagtatgcaatgacgtttgccttcacctccggtgtgacccctctagacgtgatctcctagttgaatcttcctctccatatttctcagtattaagcttccatgcctttttcatgtctgctctccagtcgtgtagcccttttgacattaataagtgatcgtagtccacaaacttaggattgttaagtgagaacacaaatttggtctaaaaaaataaacattaaaaatcatatatatttttttgtagagtagttttgtttgatttgttacaataaaaactaaatgttacagcatatcctagatagactgaacgtcctttctgtcaacgtcctcaaactcaaatttttttcataggaatggtgttgagaacaaagaacttgaccatgttgttaaacttgctcccatagtcgtctatgggagacccaatccttgtatgccatctaaattttaactattgccccgcaggcagcttgactagtgcttcttccacattttccccttatacttttctctacctccatttttcttactcttgcttgtacttgtgtcagtcattctatacatagaagatatatttattaatataataaaaaaaagtaattaatcaacttattaataaaaggtacatgtgttttatttaattaatggtggatttaaattttaaaatactttaaagtctacaagtcatcataagcatcatcatcatcataatcaataacggttacatcattttcattatcattatcgctagtgtctttatcattactataaataataaaattatctaaatcttgacggtcaggctgcgaacggtccttataggtcaattcagtcaggttgacatcatcacagacatatttgacatcatccagttatggaagttgtacgactaactagattttggaagagtttctttcttgtatagtcatggtttcttcatcatcctcatctggaaaatcccaaacattgcagggttgtaagctttgacaagcttccaatcaactctattcttcacgtcgagaatgtaatacatcaaattttcttgggatgcaagtataaatggttcattttggtaccattggcagtcgacacatacactagtgaaaaatcattactttgtatcatgctactgtttgtgtcctaccacttgcactttaaaatgataacactacaatgttgattttatggtactaaatctggtacgcaacagaagatttcatatatcttattatcattgtatcatagcccaatggatctccagatgtatatacattaaataaaataataatttactagaaaagaatatatacctcttg

SEQ ID NO: 300427 - DNA, 1630 bp, Cannabis indica
agggtgcaccagtacatctcttttaggggggtgcattgtagaatcacccaaaaataacgacacccttttaaatgtggtttatttcagttgtgaataaggtaatgtctaaaccttttcctagttgttttcgaccaaaagtgatagagacgtatagtctgtataaattgtaatatcttaaaaatcttcaattaccagttcataatctactcaagctaatgcttttgattttcattagtgtccaattttcctagagtataaattaccaatatatatatagatatgtgaatactgctattcatttattagctaagtatgttctcggatgattaataattagaggaattactacttcctttcatgtctattgtattatgaagctttgtattaatatgatagcaatttatctcaaaaaaacagaaagttgtgaataaggcaatttattcatttgaggagaaaaatagaaggtaacttgctattgattttcacactttatttgattaactttctacaaatttgcaaagtgagagagaatacatggatgaacattatgacaaagcaatacaattttttgaagaatttcaaagtaaaaactaaaaagtggtcattttttcagagcctttaagtctccaaaggacattaaatttttgagccattttcaatttcttctgtagtagtagtagtaatagaatctctggttaaagtatttttcttggccttctcagcctcaagttttctcaatgtagttgaactaagcttatctccactagaaccttcagaaacaagatccaccacttcaatctgcattaaatttccccaacaacaatacatgattaaaatctagaactgggtttgataatccaatatcagaagagggtaagaaagaaaaaacaaagtcaaaaccttcagttgtgaaagacctctttcagctctctttttatttactgaaattccacctggtaaagtctccttactgccataaccaaaatcagtcaaacttttcttcttctatttcaataaaacccaaaacaatatttcaactaattcatttgaaaaccccactataatgactaaatcatattagttatcatcataatatatagatttcaatgaagtgtgaaaactaacctgaccactattgcttccaaattttcatcaactatagaagggccataagggtctatgattggcacagcttccacaacgagctctggttttatagactatcaccccatatgtattgttggtcacttagtcatataattataatataaacaatcaacataaaagaaaagaaattcgaactttgaatttagttaccttaatataatctttaacattaccaatcctttcctcaatgggctgtattaattcagcaaactgcaatatatatatatataaatacataaactaattttgttaaagaaaaaaattgaatctttacataatttcatctgaactggcaaagcaaaattacctgtttcttgatcaacatgggctggtcacaaactccaatcacaatccgactccttgcgagctcggccgatgcctgaaaaatatcaattctaccattcaaactttcgagaaataaaaatcaaaatcaaaaggtgtgtgtgagagagagagagagaga

SEQ ID NO: 300428 - DNA, 3222 bp, Cannabis indica
tttttttttttttaattttcagttttccttacacggttacagttattattttggaatttattacgcttttaagctgttttttctctttaaatcatgcatttgtgtgactgcccaacaaattaaaaattttattgtatgtcaatgttttgaccaacacaagctatttcatacaagattaaacagcaaataataagaccaaaatgacaattaataaggataataacttgtagtaataataataacaaaaaattactgcatggaatgtgattaattaccagaaaaattacaaacagtaattttcttttatattaaagaaagaaaaaggaaattgccagtgatcatagattttattggagtcaatgaatacgacagtaattttacacaaccaagttgattgtatgtaattatccaaaccatgcttttctccattttaaattaaaaaaaaatgtttatgcagcaaatattaatgaatcattttcactttcatcagcatgaggacatcaaagtcattttccaaattattttccattccccatttacataaactaaaaaatatatatatatatttctgtcacgcattatcatataccgcaaaaataaataaatatatatatattactctaccatttctatattaccggttctccactggggtaggagagagatctctataaataccaacatttccaccatcaaaatgagttcctgccttgttcaaagaaaatttcaacacactcttttaaatcactctacaaatccttaatcacgaaagtttaatattacttccgacaaaataatctatctccaaactagtactcctgctgctactactgctactacttctgctactgctattactatagtgtttatatatttttgttattattacaagagtatacaatataggatttggatccaagttaatttctgaatcgatcgaaccatggtgaagacagaaaagaagataatggagcaaaacccatcaaagccaacgccattgacattgacaactgggaaaaagaagtacaagggtgtaagaatgagaacctggggctcttgggtctcagaaataagggcacctaatcagaagacgagaatatggttagggtcttattcaacggctgaggcagcagccagagcatacgacgccgctttgttgtgccttaaaggatcttcggccaatctcaacttccctctcagcagtagtactatctcttctcatcatcacaccatgttcccaaacgacgtccttttatccccaaagtccatccagagagtcgccgcagccgctgcccatactacaacaaccactttccttaacgacaacattattagtatcaataatgctgccactacctctactgccactgccgctgccactgctccctcgccgtcgccgtcgtcttcggcggtgtcatcgccgtttgatctggttgataatgatattgatgaagcctttttattgaggggttcatcatttgggtcccacatcgatatgtctaatagctatgatcatcataatcaggaacagcacaaggctcagggtggttttattacaaatagttatatggatcaatcaacggctatgatggaagcttggtacaattttgacggtctacaatcgccaaagtgctttgatcagatgctattcaataatgggtgttttgacccacaatttatggaagatccatatgaagaaagtgacattcctttgtggagcttctgctgattgagagaacgttgttagtttatttgatggaataaacacccaaagaaacacaaaatttaaatattcatcatcaacatttacattccattattctttaatatatatatcttctatattcattttcattgacgatctttatctagcttaaagatttactgaccagtcgaccccctccctacccccccccgacccccccccccccccccaaaaaaaaaaaacccaatacatcatatatgttatttagtctaagtgtattattatgaatcataattaggaaaattcactctatgagatgagacattggtttttttggactctctcatgtgggtttaatttatatgtcaaatatatgtaagatttttccctttttcttttcatacatattttgtttattgtatgattataatgcaaaactatgtagctttttgtttattctggtgttagtaattatatataatatatgtgcaaatgtcatcattaatagtcttccattacataaaaatttactttgagaaaatttgaggttatatcattacacataatcacaaaacatcttttgtgcttacaactcttcttaacaaaagaagaagttctcagttctttccaaccaaaattaaaaaaaaaaaaaaaacccttcaattgaaaaaataggcctcctctttaattagtactaatcttgtaaaacttttattttagacttacattaattttttaaatattttattaaaatatgagttgataaatagttaattatctacaattaataggcttggcatgaaaatgataggtttttttttttaaggtatggatttctatagactttctagggtcattttagcacaggtgtgctgtaggaaaaacaaatatagctgtactgtgagaaaaaaaaacagttatagtagaattgtgcaaaaatattgagtttgatgtttggtgaattataaattttaaagtgccattactgagctttagaggcggtcttttagggccttcaacattggttttagcgaaactcgctaccgacattgttctaggtaacaccgtagggagaagcattaaccaacgatagaaggagaccctatgtcgtcgattattatgaaataaccgacgacatatggggttatttgtagaatgacgcctttatagcattggttattcactaataacctacgacgtagtgttttatggcgttggttattagcaaataatcgacaacataagaattttatataactaaatatttttttttattttcacatatttatttttgttttttttattaatttatttaacttaaatattaatttcatacaattaacaattaaattaaccatataattaaatgtatatatatacattattctaggtaaatatattacataaatattttaaaactaattcaaatatttacaagttattatctaactaaacaaagaaatataagggtgttgaccgagtttttcggcaactaattaaatattataagtttatag

SEQ ID NO: 300429 - DNA, 4798 bp, Cannabis indica
gggttatctccatggtggagaaagaagggactagaaggatcttccattggattcttggcagctgcgattcgaagactttgattagtagaagaatcgtcgagatcgacaatagttgcaggagttctggtttgatctttttctgtagccattgcgcggaatcaatgtatagaacgaaaagaggatcactggagaaggagaagacaaagcttagaagaacacagcaacaccggagaagcagacacgacggctggaaggatcggacgggagggcttatctctcccgctctgataccatattgagaaaaaggaaaaatgaattttcattacttacagaacaaagagaggtcaagcctataaatagagcttgaaccatggtacaaaagagtgaataaacggttttaactaacaaaccgttattacagcaaacaaactaaccgactaagggtaacaaccaaactaactaattaagtgtaatgaaatacaaccaactaaacaagacctatactaaaccagtaaatacagtagagtaaaactagggaaacagagtaaaatagagtaaaacttaatacctttggttgaagaagcttgttcattgttagtgtcatgggctgaagaagaggcttggtccatccactcctttactttttggtgcaaggcatttgggttaattagcattgggcttttgttttgggccttgctatcactactcccttcctcaaaatcaaccttgtcctcaaggttgtgtaaatcatagagctgaacaaatgattcaaagtcttcccaagtggagtcttccggagaagacaacgaccattgaacaagaacatgtcgaatgggtttgttgttgatgatcttggtgcaagcagccagaatagctatggggatcatcattggcttgttagcaaggctagtttcaggcaacgggaaagaaactggagctgtggtaccatgaaagggtttcagcaaggatacatggaaagtaggatgaatcttactctcttgtggcagtcctaacgtgtacgctaacggacctcaacgggcaactattgggaatggtccgaagtaacgccgacatagctttgtattgagtcgtttagccacagttgattggcagtaaggctggagtttgaccaacaccaagtcaccaacttgaaattcgatgtctctgcattttttattagcttgttgaaccatcctattctgagcttgttgcaagttaaccttgagtctccgcagaatgtcatctcttgagagcaaatcatcttcaactgcttgtatggaagtggagcctcgagtatagtctggaattgttggtggtgatcttccatacaccgcttcgaaaggagtcatgccaatggctgaatgaaagcttgtattgtaatgaaattcagcccgtgaaagaaacttgctccattttttggggttctcagcggtaaaagctcgaagatattgctccacatatctattggtaacctccgtctgtccatcggtttgggggtgataggcggaactcatcttcaatgttgcacccataaattcaaacaactttttctagaaagcactggtgaaaattggatcacgatctgaaacaattgttcggggtaccccatccaaatgaatcaccatgttagtgaaaagttcagctaccttagtggctgagtagtaatctgaaggagcaccgaaatgagcatacttggtaaacctatcaatgaccactagaatattggtgaccccattagaatttggtaagcccacaataaaatccattgcaagatcctcccaaaccctctctggcatttcaagtggctgcatcaaaccataaggagctgtaggggagtatttgatggtttggcaaactaaacattgtcgcacatagttgaacacatcttgtttcattcattgccaaaaaagttagcacttaggcgaaggaaagtttgctggctaccaacatggccaccaataggcgaatcatgaaattctcgcagcaaatggctcttaagatgagagtgtttgctgatcaccaacttatgttggaagtaaagcaacccatctcttacctcgtaacctgttagcgtaatagaatcggccattaactgttcatgaataagtctcaaatctgggcaggtaatgttttcttgcttcagttcttccaagaattcaaaacatcccgaagtgatggcagttctaagagatgataatgagtgttcatgctgtctagacagggcatccgctgccttattctcctttcccgacttgtattggatagagaattgaaaccccatcagtttgcgaaggaaaaattgttggtctggagtttgtatgactcgtgtaaggagttcttttaggcttttgtgatcagtacggatcacaaaatgacgaccaagaaggtattgtccccactttgtgactgctgcgacaatagcttgtagctctcgcttatatgcagatgtgccaagaaattgaggtcctaagtttttgctgaaaaaagcaattggatgtccctcctgcatcaggacacccccaattcctgtgtgagaagcatcagtttcaataatgaattccttagagaaatcgggcaaagctagaaccggtgtggttgtcatcacattttttaactgttgaacggtcactgctgtttgttcagaccattcgaaattatcttttttgagtagttctgtcaacggggcagcaatgcttgcataatgagccacgaaacgtcaataataccccgttagcccaagaaaaacccgcagctgcttcaaattttttggttggggccactaaaccattgctgatatctttgttgggccagcttgaactcccttagctgatacaacatggcctaagtaatcaatggtggtttggaaaatttgacacttctttccattagcatagaacttgttttcttgaagtagatgtaagacctttttcaaatgaagcatatgttcctgaatatctttgctataaaccagtatatcatcaaagaaaacaattacacaacttctaataacaggtttgaatagtttattcatggcagcttgaaaagtggaaggtgcgttagtgaggccaaaaggcattaccagaaactcgtagtgcccttcatgtgtttgaaacgctgttttgtgaatgtcacgtcgatccattcgtatttgatgataacctacttgaagatcaagtttagagaacactgttgcaccacccaattcatctagcaactcatcaatcgtgggaatgagaaaacgatccttgaccgtaacgttgttaagagctctatagtcaacacagaagcgccaggtactgtccttctttctcactagcagtactggtgaagaataggggctattgctatgttgaataaacccccaagatgacatctcccgaatcagtttttcaatgatatctttttgataatatggatagcggtatggcctcacattgactggagacgatcccgattctaaaaaaattcggtggtctatgtccaagtacagaggcagagtagtgggttcgaaaaaaacatcttggaattcatggattagttctctacactccccaggcagaatttctaaccaagttgaaatggatcctgaagattggtcttccatcttggcgagtgatgtaatgcgatatgcttcccttatctctccatctcgcaatatggcatggaattgagtgaatgtcagatgatgtggcgccgaatcagtggaacctgccaacttaactgtcttcccattccaagtaaattccatcgtgagtgccttatggtcatggatacatggccccaaggtttgtagccactgcattcccaacaccacatctaatccccatattggcaagacatagagatcaacatagaactgatgaccttggagtagtaattccaccccatgacagatcttagaacacaacagagagttaccatttcccatgtaaaccttgaaacattttgtatcttcagcagcaaggcctaacttgctggctaaggattcatgtataaagttgttattactgccagtatcaatcaaaacttccaaggtttccttaccatgatttgcccatattcgaaatatttgagggttcgctgaatttgacaaggaattcaggcttacttcatctactaaagtctcatccacctcgttcaagtctaattctcctactaggcttcgctgcccttcttcctcctcctcggtgccacaaagaattaataccctgttcttgcatttatgtctgagactgtacttttcctcacaagtaaaacaaaggcccttctcacgcttctccctgatttctgcaggagttaatttcttaacaggcagtgtattagtacctgacttagtggattttggatcgttggtatttgttgaggttgccccaaaagtagaagtgttgaccgtagcttgagctgaaggttgaggataagttatggtgcactgagaccaacctgatcgaatactttctctttgaacgtcccaacaaatcatcattacggtcttcgaacaattgagctttcgccatagcatccgctaaatcaactggtttagctagcagtaactcccttcgaattttcatcttcagaccccaaataaaaaaattcatgaataaatgctcagaaataccagttactcgagtcatcaaattttcaaatacttttcgatcttctaggttctaaatcacatgttctctaattaatctctcaattaaactaacatgaaatcagcattaagcaataatccaattgtcacataagtcatgcaaatactttcgtttcacatagagcctcgattatccaattttagcat

SEQ ID NO: 300430 - DNA, 5060 bp, Cannabis indica
tcaacacctatgatgaaaatgagttcgttaacatataaactttggacttgtatgatttattaagcaatgaaataaaattaaagttacaagcactgacatagcatctctcgtagaagcagcttcatcatcaagaagtaatccacgctcatccttgtaaatacgctcagcttcttcttccatgctttgtaaagccttatcgacctacatataatcatataaaaaaccccaaataaatgacaaaatattgaagttctttgtcattcagttattaaatgatacaaactacagtatatgtcacctttacgccaaaattactaggataaatttgatgttttccagtagaaatgttacttgtagattgtaaagcagaaatcaaatgtaaacccccaaataaatgacaaaatattgaagttctttgtcattcagttatttaatgatacaaactacagtatatgtcacctttacgccaaaattactaggataaatttgaagttttccagtagaaatgttacttgtagattgtaaagcagaaatcaaatgcatctattttttttttattattattattattattatgactaaactccttacatagctctcaattaaaactataacaattattgtgtacgtacccaaaacttgaacctcaaaattaatgagaacttaaatcatgtctaaccgtttgaaatacacctcttactcataaaatgtattattaagggcctaaaactttgaaaaagaacaaatctatcacaagtgcttgcactgaagagtaggaaatgacacaaaaatagatatttcacagcatttaagagcatattaattatatatcacatccataggtttgtttaaagaacatttgggatttactatccataaagagaacgttgattttccttgtttcttcttttgtgctccatagtcctagtttctgactcttactctactcttgtatttccatgtgcttcattgtagacaattattaaaaatagcattcggtaaaaatatacagaaaagatcgaagtggaactacctcttgttgatgtgtctcaaccaactccagttgccgctccaggctagattgggtttctaccacttttgccacttcaatctaaattatgaaaatacatttgaaaagacaacaagtaaaagatataacattaaataagacaacgagtaaatgctgcctgatatagatgcaaacagagcaaattacatcagtacaacaattgtgcatggacacagcataggtagttaactaaaaaagaacagatacataacaattcaaatcagacaggaagagcattgcatctaaaactgtaataactgatcagaaaactagtcttcttcaagtcaagagaaagaaaagtgggattaagacccacacatattggagggtatatacataaggatatgccaaactgcaataagaaaaatgtcaatgatgcataactttgaagaacatcttgctttgacaaaattataaatagcctacaaccattgtattataaatagcaaacagactacctcaagcctcagaagaacatcacgattctgcaaaatcctcctgtcccactcagctattgtattagcctgctttcgaaactttccagttcgttcttgcagctccaaattccattccttgataatctttagaacaagaaaagaaaaatacaaacactataagagactgaaactgctactcaaaaaaagcagattcagtaataatacagcgtagtgaaacttgaatagactttcaagtatatttccaaaaatattaaagaaatatgcatgtggagttcaagaaacaacagcaaaagggaggctttatgtcttttttcagcctactcaagtctgaaccgttgggactatttgaaattcagaagaactacgcgggagggagtacaatttcatagtttggaagggcaacttatgattcaatttcaaatgaatcagcattacattatgtgtttctacttcttcatcaaaattgggaacatcattgaaggaatacatatcttcactgaagttaatgaaagtatgttaccatacaaaaccacacatatatgatatgtagatttacataaacataataaattaatcccaaatggggtgttcacagcaatactctccaactttagttatcatgcaaaaggtttttacgtttagaaaaggaaatgtgaaagatatgttcgggtgcatattttaagtgcaatactctcaaaatgtacaaacatctttacaggttttttgtaaaccagaaactagaaggaaatagaagatgatacaaaggttcaagcatgtagagtacctcttcaacagtcttcccagtaatctcagatggcaattttggtgcaccagctacagcagtgataacacttgaggttgttctgaaaaagaaccgacgaaaatgatgacaagtcagatattaaatgcctatatgttaaacgggaaatagaaatatagtataatcttaggaacttggtttctgcctgaaataagatatattgtaaaattcatactgcgtttacctcttggggaatcattagcaagtatactaactaagatatactagaacgaaaccctataaactactagagcaaaaattggacaataataattttacaaaaataggactttattacaacagcccttacatttaaaagaaattccacttgcatccacctaaaattcctaatgacacgaaaagaaaatgaaataacaagtaatgatattgtacaaaagaaacatatagcagtaatctccaggaatagcataattttccaggaagtatacagacccactactagatgctacggtaagagaagttgacgtttgagttgtagttgtgccagaagtggatgttgttaaagctaaagacgctgaagtggggactcctgcaaagttatctcatgcaaatgtcatacatggaaacatggataacaactagctactagattatggaacgtcagtaaaagcagaccttgataagtaaaattgtcatatttaaaatttgttataataaaagttatctaagaaaagcaatcagtatgatatagatgaaaccccacaaaaattctatttaacactgttttcgtaatttcatttacttctttaaggttttagcaatgaaattcaacaaaataacagatggagaatacaatcttgtatgaatatctccccctaaacaaagtccagtgcttaatttacaatgtacctataggttatacactgcaggctatcaactactatcaagtatcaaccatcaaaataaattaagccagataatacaatacaatacaataacagtaacgatacctattaaacaatttccactacatataacttacatatacatatataaaaatatattatgtatacaatgaaataaatatgcccaattatgtaaagaacatgtcatttataaagaaaacgttgcaaactaaccaatcgaaggcacagtagaggtcgattgtgcttgtgtcgatccagcagcaggtgtagttgctttggtcgacaatgaaaaactcggagaagaaccagcagtgccagatgaggcagctttggtggctagactaaaaccagtaaacgtcccagaggtggtcgatggagcaactgagctggaagtggctcccgcagcagtagtagtagacgaagaggttgctccaaaagcaggcactgagaaagaaggttgaggtgcactattagaagccggagttgaagaagcggtcgttgttgtcaccgttgaaaacgatggcgctgcggacgttgcgaatgataatgaactgggcttcgctgccggtgtgctagaaagagcggtggccgatgaggctgcattggctgacccaaatggagactgggaagctgaagctccaaacgagaaggctgaagaatttgtagacgaggatgcaataggagctgaagaagttacggtagtggcggtagaatctgttgagggctttccaaaagccgaagcagtagagaatgaaaaccctgacgaagacgctgagaaaggtgaagcggagcttgaatttgaagcagaactgctcgtggacaagtttgggaatgcaggagtggttgaagcagaagatgaagacgaagaagagccaaagaaggaagaggaagaaaacggagatgaagcagctgatgacccaaacaaagatgaagaagagcttggtgttgatgtaggagccccgaacagggtctgactagaacttgacccaaacaaagaaggcccggaactagtcacagtagatgtcccaagaagggcggagctagatcccgatatggataaagaggcaccgaaagcagtagagcctgaactcgcagcgggaaaggtcggaccagtagttgttccaaacaatgacgaagatgaagtcgccgtggtcgaagctgaaccaaacaagggcgaagctgaaggcgtagatgatgttgctgttccaaactggagaggactcgaagttggcgcagcagtggaaccaaacagagagccggcagtggaggaggacccaaagagggacggagcagaggcaggcgcggaggaaggggtcccaaagagaggtgctgaagagggagaagaagatacgaagccaaagggagacggagcgggggcgctagggtttgctgaagagagaggagaagatccgaatgaagaggcggtgggagcggaggatccaaatgcaaatggagagtttgatgagaatgaggaggaagaggaagaagaagaagaagggtttgagaatgagaaacccgaagacggttgtgtagcggcggcaggtgcggaggagccgaaagagaagcctgacattttcgccctctattatttggtatgagctctcactgtttttgctgaggggttttagtttaaaccaaccaaggttttgacaatcggcctaatttgcttagggtgtgattggtttaggatttgaaagctcttctatgtttttaaaaattaaaatgtgcctcacataagatttttgattgattaagtgttttcaaaagtaaaatttgaatattattttgagttttagactaaaaaaaacactatttttatgtttttt

SEQ ID NO: 300431 - DNA, 2283 bp, Cannabis indica
aaaactttttaaaaaaaaaatatatatatgtacatattggtaaaatacttttaattagtattttgatactcgggatcccgatctatatgattattaatatataaattattaaaaataattttcgagtttattattataaaatacgggcgttacagtacctcaaagtgtaagaaaataaagaggctcctgcaaataaaaactaaaataatggtcgtagttgaagtttttatgaaattataataaaagttaaatacaattttagattttatattttttaaaatttatcgattgaaactttcattttgttaaacaataatatgaaccttatatttttcaaaaatagtacaaaatttaacaataacttgaactgaatgtgttataattaaattgattacattttcattaaaaattgacttcgagttgtttgatctatttaaataagatgataaaaattaagctcgtaatattattttatattattttaaaaatataatctatttattatttaacaaaataaaaaaaaattattaatttttacaaaacataaagtaatatttatctataataaaataaaacaaaattattaaaagaaaacaaaaaagcgaatatattgccgttcttgagcaatgaataaagttgacataatcttttggaccatactatactagatcggctgcccactaatattatttttattatataaaaaagtaatactaattcccataggaaattcgaattaacataaactcattcaactttattttatctttattattcaatgaatatgtatatatatatttatataacaataatgatgatcatgaacttcctatgcaaaaaatgatgatcatgaatcatgagtataaccttttaattttctttttattttaaaaatttttcataaaagtcgagctgagaagaggaagcctaataagaaatcaaaatctttatgttaattatttcaaaaaaaaaatctttatgttaattggtgttttatgatttaaacgcaatgcgttttaatatcaaaaagcacaattaatgtcataattttattattaatgattattttttcaaaaatgatgcgatatagtgaaacaaaacaaacccataataagggtcttagctgtaaacggtttttatgttcggccaataataagacccttcaatatggtaattatttattttttattattgaatgtattaaatttggattatcttcctaaaatgttaaattgttaaaaaaaaaagcataataataataataatatatctcatgtgcctaatgatagcaaagtcaaatgaacagctaccataatcttgaagatctgatttattaattttgtaatgtgtgactgtgagtatgtgataaaagaaataataaatattaatatgaacaaactatttttctttttgaacaaattaataaaatatttatatattatctagtttcatgttcttaaatttttaatagttcaaagttgttttttttcattggctaaactcactattttttttttttggatttaggcatgacttggtatgagatctgtggttttgctactgcgattaaatcacgaatagttttgtctatgtaatataattttgagtgtcttttatttagattattgcaattgatcttatttttgtgatataattttttttttagtttttttgttggtttgtcttatttgctattcgatggctcatcatcaaattattgttggtggttaggaataataaattttctaccagtgaaaagattgttagtagtacagttaagcacattgtacaataattaaatgctcaagttaaagagttaaatgaacaacaatttttagtgttgtattttttaagtggttgaagtaactgaataaaaatatttttactgtaatgttgtaattttttttatttaatttattttgtggaaaacaattggcttgttattttaattttaattttcctcagaaaacatatcttgatttaactaattactattaccgtgtcaaaaaaactaattactattaataaaatttcattatttttttaaaaaaattaattatttttcaaataataatacatgatttggcacaatattcaatatctttagcttttttttttctttgaatacaatccattactttttacactcattttccttttttacttaaacacctttttcatttaccaatacaaaataaacaaatatatattattacattaccttacactacacagattaactttaaaacctttttttttttttttttttctttttacttgttt

SEQ ID NO: 300432 - DNA, 2279 bp, Cannabis indica
taaaataatttccaacaagtatcccatagtacctttgtcgatggtgatacaaggtccagttgtggtccccaactatgtccactgggccatcggttgggaggctgatgatatgcactcgtctatgggatgtgtccaacacttgggaaagattgttgatgagaacaggatcatgcctcgagaacctagggtttatcaccgtctggctcgagaaatcgagacccctaatcacaactacggaggattcggggcatagagccagatgcatctcatgtccgacgcaatgctaccaccccaaaattacttcattggttttttagtctttatatgactcgctccataccaactcatccctcaaggatacctcctattgccatgccttttcatttttatgctttttggggctggcctgctcccagccccgctcaaatcttgtacttttatgaatttgtttctactccaaaaaagggggacatgcgtaagtatggtttttattctttgtaatctcactcggccaatgagactctagtaccatttaatttccaaatgaacgttaaggactgccaccattggtttttcttctcctccagctttaggacttttgagcatccggacctattgaacgagtggacccaaattcctccaatgctttggaaggcccccactattgttccttaaccatgttgttgtttttgcaatcctttctaaagaagagcttaacatgggagacttggtgactaccataaattgtcaaaagtctatgctcctacaaggccatcagtcggtcaaggatactaatttttccacagtgacttatctgaatcctcagaataaagaggctaaaaagaagctctagcttgagtatattcgggaggtagagacaaagtaccaagcataaaggaggagaaaggagcaggaggatctttatgtccgtgcctggagtgaggcagagcgaaagataaggaagaagactgataagaagatggtggctccaagattgtcttttccttccccactcccaaactctggcacttctagagggagtacattggatgcctgtaagtctcctttaacttttcattatatcccttctgttcagagctacactcgttgaaggtcgattagctttgataggaggttgtatagattacgaatgcctcactcctagtggggctatagggaaaaaagttatattttttaaacattggagattttttgggtaggtcttagatgaggtcagaccctctggtattttcctggaccattcttgcttcattaattcaagctggttcctcccttcagatagtttcttagaagatggcgacactagcaatataatttatgaatttgctagggcagaattagaccatctaggtagaattagctcttctcgtatgttttatccttatgctttttcatgtaagcgttcctcatgtttctttatttgcagctgaaccaatggatgaaacctttaccatgttagatgctttggatagtcccggagatggccatacccttccaccagcagacttctcgaaagtcatagtgaccctcaaaggcccccattaaaacactacttctagtccgaaggtggtctgtatagatgagaaagaggaagtggtcccgttagaatgcaagcagaagaacgtggttgtcaactaagagtcctctaagaaacataagccgtccaggatgccctcatagagtactaacgactcaggggttccctctaaagcatatatttatccttgtgtcccatctatccctctgactcctgtccaccctaatgaagctcacttgtagcttcgaatagccaagcacaacttcactgttgatgagcagactaaggggaacactgaagcagaagccttaaggaaatggctgatggagaaccaagacagacctctctgggggcaatatgctggctaggtctgggacctgaatctggaccccatgacaaacaagttctttaacttcttgggatcttgcttggcttcctttgcatctgaaatgattagccattttgcttctaacttagtccagctccctacaaagagatttgttatttatgcctcctccaacccaatttaccaaatcaggatattagtgtggctttaacctcagtgagtccttgctccccttgttactgtttacttgctactttatatttctaacctcttttggtgtggagggacctaatgaggtcagtcccccatattacaaaggaccatgggcttattgtaacgccctaatgataaggcacgctacagtgctttttcaat

SEQ ID NO: 300433 - DNA, 3152 bp, Cannabis indica
aaaaaaaaaaagaattagttgaccagaattttatttcacgtttcaattgttaagtaaatacatttcttaatgttatttttgtaccagtatgtaaagaccagagaacactattccagctgccccagctgtgaaacatacgtagctgaagctgtataattgtttgtttataggaatagctgcaatctcattataaaaaaaaattcagtatcagattgaataaaaatctgatatgttcatacatgtatttgtatgtgtgaggttgattgtttgtgaagaaagctcaccatcagtaaagtgaaggattatagctatgataagcaagccaaaccccattgacatccattgcttcagcctctcagagtgaccctgcaaattttggtacacaaatttatcttaaaacatctgtactaattttctgtatcatttaattcatttgagtagagtcaaaccttgaaatgaaccaaaatgtgtccataatggattcctattgtcccagaaaggatagctgagattgagctgtagaaggaaaatatttcacacaatgctcaaaatccatattgagtattgacaaaactctttctctggtttttgagtgaactttacctcaagaggccttcgggttcaaatggagctcgacaccaaattggagcgccttcccttaggggacctccgcttggtgaactcagcgtgcaagccttgacaagttttgaaaaggaaagacaagttagttaacatattacatgtatagcaaacaaaactaattgatttgaacatataaaatatatattgagttgtttagatcaaaacctttaagcgtatccaaacaggttgagaatagagatggttaacaccccaaacttgtctatctacatatccaactgcattgcaggctggtccaaaatgtcctctcattccacactttacctgaaaaagaagaaagtaaagaaagactagtagaatgtgttaaaagaacatcataccaataatggtgacactttcattaaaattactaattataggacattattacaaaccgtgtatctctctgtttcatcaataaagctccagtcaggaacatacaatgcaaaggtagttatcatgtaaattaagaacgagatgaacctccgatccttgatgaagacaatagcatataattattagaaagatgtttttttaatcatggaaggtgtttgatcaaactagtagttaccattgccatctgtatgcagtgaaaatggatactggtcttgagtctatagctgttggtctgcctttggttgtgaatgtctctattaaagctacaaccaagtacactaaagctattctctgctcacatacaaacattaaaagctttgttatagagaatttgaacaaaatagaattattttcggtttttgaatacctgaagtattccacaccatctaatttgcttcatgtcaacgccataaattagatcactcggtgcatgagagtacccgcctgcataacaacattagcaaaaattcacaagtgtttttactaacaatataagctttgacactaacaacagaccttgcaagagaatcccccaaaagagaagctttaatgtcctgagaatgatttttttcactgcatcgttgatctttggaaccctctgaacagccaaaaataagacattagtggtaaccaaaatagtgaaattaaaactgaggtaagaggtataccttgagagcaagggctatagccaccccaacaatgaagagaaagaagggcataacaaagtcagccaaagtacaaccattccatggtgagtgatcaatgcgtggatagaattctccaccatcatctaccaatatcatcaactacatgtacatgtacacacattactacacatctacacacacacatgcacacataatacagaaaaaataataaaaaaaaaactattgtttattatatataccactatggtgaggcctctaaaggcatctaaggtagcaattcgcttgctcttttttgcctgcttaaccatggtaatagcttgttcctcaacaatacctccttgggtcttcttaggctcattctgatctttttgctcaatgacatctcctctttcaatcttattgaccacttcatgatcatgagaatgagtagtagtagtaacaatatctttactgtactgtttatgatattccttgactaattctgtgtcacttccaagagtaccctcttccaacttcttagcatcctccatgatcagttatgatttagttctcttcaataggaaaatcaagttagtggatataaatgtactatatagtgaaatttattatcaatatttgcactaatgtcatgatagtagtaaaattagtgagtagagagaaagacaagaaagagatcaacaggccggcaatagttggcttctggtggagaactgggccacagagaggcccaacacgaagataaagacagatagagaaacttaggttcatggcaatgaaagacaggaataaggtccaaactccatggtggtatatggtagctagttactgtcaagacatatataatgttttgatatgttttttaattgaggaatgtatgttctttaactaatagtttataatactttttattttcaatatttttcaatatcagactgcaaattaagacagcaccatctcaatatatatatatatatatatatatataataaataggacaaacaacagtatttcctttctttttcctatagtttcttcatttttttaatgaaaaatatataccacaatttactaatctgctactaatttaagaatctattggaaaattcccgtttgcatttgattgctggagccaatgtgcaactccagtagtttttgatcctggcggttctttcggcaattggttggagactatttttagcaagttgaagctgatatgatttgtcttattgccatgtatagctgggcaatctggaagcctagaacaaggttgtttggaaaatgaaacactcatctgttaatgacgtacttacttcggcacaagtagctcttgatcactggaataaagctcaggataaaatttcgttgtcatcaatctatctggaaagcatcggtgatggcgctgagtcatggactagacccgcagaaaacacaatcaagattaatgtagat

SEQ ID NO: 300434 - DNA, 3275 bp, Cannabis indica
ttcattttgtgattaaaaaattgaaaaacaaaagtgttaccaaacggcaccttaatgaacagaactcgttctgcactgttccaaggtagcacctcctatgaacaacttcataacaaatcacctaattatgactgcctaagatgttttggatgtttagcttatgcttctactctaacatctacaagacacaaattctcaccaagaagtcttgcctccatattcattggctatccccatggcatgaaagcatacactcttcttggcattgaaactaaaaaaatttatcactctcgagatgtcatcttccacgaacacatttttcccctcactggttaaagttcacataaggaaatacatcagtttttccaataactaattactctagttcacataccaataactcgagatacaacaactacaactactggtgtcaagcacacaccaattcatactactgaggtaccaccaactacttcctcttctggttcaacaatcaaatcaacctccactactgaggcaccatcaagaaacaatagctcttttaccacaccagacaaagctaatgaagtcaagcctatcaccttaaaaattggtcgacacataaacagacctcctcatttgaaagactatgtctgtcatactacatcaatagctcatcccattgaggagttcatatcttatgcaaaactcagttcccaattcagggctgctgttcttacaacatactctcaactcgaaccccatttctatactgaagcctcccaattcaaacattgtctacaagccttggataatgaaactcaaactcttgagaaaaataaaacttggaaccaaactacccctgggcataaagccattgaatgtaaatggatatacaaagttaaatacaatcaaaaaggtgaagttgagaggtttaaagcttgtctagtagctaaaggattcactcaaaaataaggcatagactatgtacaaacttatgcccctgtagctaaatttaacacactaaaaattttccttgcactagctgcaatgtacaattggaatgtccaccaacttgacattaacaatgcatttcttcattgtgatctccatgaagaagtgtacatgaaaattttcccagggtatactgccccacccaactttgtttgtaagctcaacaagagtatctatggccttaaataagcctctagacaatggtacaaaaagctcaataccacactcaaaactgaaggctttcatcaatccctttcagaaaactccttattcatcaaaagaacaccaacaatcctcctagctatgttaatctatgtagatgacataattgtagctagcaacaatgagtcggccatcactcatttcaaacaattctgggacaaaaaattcaagctcaaggatattggctcgctcaggttctttcttggcctaaaaataggtagaaccaaacaaggcatttctgtatcacaacgacctttcagcctgcaattattaactgacacaagttaccttggagctcaaccagcctctattctaatggaacctaacctaaaacttagcaaggataaaggcaaatttttaccatatcctaccaattacaaaaacctcattggtaagtctccaacatatacacgccatcttaaaagagaatattacaacattagtgttagttacaattcagttaaagtcattcttagcttagttagttaggccaattttgaactaagttaagttagccatacctctaattaacttagttcttgtatatctctgtatatacttctctacctgtaatattcaaagtaaagaataataacataagcttcaagcttttttctttctcttccactctatttttttatatgaaccctaacctttcttttctttttgatggaatgaatacttttatttttgaaaatatctgataaataacaaatatataaatatatattttaaaaatataagaaaatattgatttgaaaattggctttgtgaagttttcatttgaaccgtttataattatttaaataatttaatctagtatatttactttttaagaaagaaaataaagaaaaattatattaatatccacatggaaatatccatgcaaacattgatacttatagaaaatatcaatgctagatatatagagtaatatatatggtgatagaaaaattattattattatgaaaattattattattattattattattattattatcatgcctatataaaagaaaacaattagctagtagataaaatcataaattcacattcacatgcattatattataactacttcacaatatatatttcctaaaatatcttttagaatgcagccaaattagtatctaaaacagaataatgtacaactataaaaatatgctatatcataatatgtttctttgagctatagccgtacattcaaaaaattattaatactataaataatgatatttccgtacacaaattttagactgcattttttttggaacaatatatagtattcatttaaaatagtcacatacacttatttaaataacttgctatgcaaatatatatttatatatatataaatatataataataataatatggtattaaataacaagaaatattatattttttagataaaattttatattgtattaattatgatcaccataaattttaaatataatgtggattatataaattaatataaaataataatccgtattatcttgtattacaatataagaaaaaatagttcactacaaaaatttttactttagtcacaacataacttgtgactaaaagtaaaaaaattgtgactaattataaaacatttctatattgtaactaattaaaaagttcatggttataagtataattaatcgcaataatatactatttgtatttttagtcacaatataattataatataaatatatttttagttataatatacttgtatcaaaattagtatattgtcacagtatactttgtgacaatgtaattataatataaatgtatttttagtcataatatacttgttaaaactaaaattaaattagtaacaacttgtatctaaatattatattttagtcacaagtaattttttgttgtgaataaaaatcacatttagtcacaaaaaaattgtattatgactaaaagatcagtaatcgcatgtgcaacaaaatatgtaaattttattttcagcattataaactactcaaaatttttttaaaaaaaattacgtacaagtagttttaaataacaataacatacacaattat

SEQ ID NO: 300435 - DNA, 1673 bp, Cannabis indica
ttcctaatttttttttttcaaatgaatttcataacttttgaaagatgaattagttgaagagtattgttattaggcattagtggtgtccaacaccttctataagtattgctcgacgattagttagcgatattctttaaaagttattttcttaagttatatgagatctgatatttaattacaacaataactgtataacaccgaagatggtattaagtatcagtggtattttttagcaattttcttagttaaattagagaaattttaatacaatcatgttaaaatttctctatgcaaataaattttaatgatcaattgtgtaatcttatgttaaactttgttcatcactcttttcttggaatgaactatattttattgacctattaatgcttaccattcattttgaaaaaaatgataaaatcttgcccatgcaactataattaattgtaaagataagaaatccttaataaagagtagaattatatcttctaagagataaccttaagtcaatcgtttcttagacaccaattccatttttatattattgtagcaaatgataggatttattcaaatgtattcataattctttttatttttttaaatgtagtagactaataaatgaaaaaaaaccatataataaactttgagagaaaaacttatacgtagaaaaataaaaaaaaaattataataaatacaaatttgtattttgaatttcgataaatacttacaagagatgtactaattaattttgcatgaatattattgtattcttttgtactatatttgttattgcagaataacgaattaatctgtcaattataaaattcatccgttataaaatacttttgaaagatacgagttaataagaaagtaaatgtaatgaatttttcatttatttctaagcttttcactaattgtgtaagacacgcaaataacatttttaattaagccacattaaaaaataaatctatattataaagtgctctgataccataaaaataataaaattataataaataaaaatttgtattttgaatttcgataaatacttacaagagatgtactaaccaatttcgcatcaatattattgtattctttcatactatatttgttattacagagtaacaaattaatttgtcaattataaaattcacccgttacaaaatacttttaaaagatacgagttgataagaaagcaaatgtaattaatttttcacttatttctaagattctcactaattatgtaaaacatgcaaataacatttttaattatgccacattaaaaaataaatctatattatagagtgttttaatatcataaaagtatttaataacacttttatgtatttcattcatagaaagagaaaatgatgcaaaagtacataaaaacaaaataacttctttcactgtccaactactaacttttgttcccgtttcttttgtttatgaaagacgattcctcctactaggggtgtacgtcggtcggtttagtcgggttatagcatatttttatcaacccaatataaatatcgggttgcaaatatttaaccataacccgcccaatcaaaaattagagaaagttcaacccgcccaatgatttcgtcggtttggtcgggttaacccgtccaaaccgttcttcactttttttttataattattattgttagtttctacta

SEQ ID NO: 300436 - DNA, 4785 bp, Cannabis indica
aaaagttttctgaaggagcgtgtgagtgaagacaaagcacgttgaaaacactcgcattggtctgcaagaccagtcgtcaatccaagaagcaaccggagtggcgtacttgtgtataagagccatcatttcgtcagtgaaaggacatattggaggcttaaagtggggatgttacagttgcaaagactcaaaaactcaaaaaaaaagtattgtcaatgcttatttatttcttatttcaaaatgaatttccaagccttttcttacacattgattttatatgtcatgcctttgaataatacatgtgtgtatatctaccccgcttgttagggttaggtaagttcacaaacttgacttgatattataactcaaagtcttttgactttggtaaagtcctaagaacataaatggctttaattccactaaaccttgcagtgcaatttctttctttaaacacactaaattttaaaattagtttacaattccaatttactttcctctaagaaatatatcttgggttaacaaaggtgacatgactatttagaatgtatatgttgatgatattatagtcattgacaagaatacaaaagagatgaattcaattaaagaattattagtaaaatagcttgaattcgaagattttggaacacttggaaattttttgggtaaggattttgttaggagtaaaaagagtatttctgtatcataataatatactcttgatctcctaaaagaaataagaatgctagattgtaaggcttgcaaaactggaatcaaactttggaacaaagttcgaatgctcaaaagaaaagcagatgataaaggaagataccaaaaatttggcaaagcttatttgtctctcacatattaggacaaagtgcatcgagttttgaggtatttaaagagaaaaccgggcaaaaagttatttttcaagaaaacattcaaatgtaaatgtattcatcgatgcaaaataggttggatcgattgacgataaacaatcaacatctagctattgtactttagtgtggggcgaaaaagtaagaaacaaattagtgtcgcaaggagtaatgtagaatctgaatatagaatcaagactcatggagtgtgcgaggcaatttagcttaggagactgaatataggagaagtgttcaaccctactatgacaaatagtatacaaaataacaggaaacaaaacacttgaaagtgattcatcaccaaagaattatgtgagagtatttaatttccttgcagacaagcttaggctcatcaacatctataatccagcttgagtgggagtattgaaaaaataggaaatcaaatcttaaacaatttgtttgtatgaagcatttgaaaaattataccaaaattatatacattattctcctaattttacaaattttacagcatatcttagatttgtaatgcaagaagtttcatcctctagccaatgaatggctaattcagtgtgaatagttgcacaataaatttctttacacaaaatgactcattaacaaagttttttttgttgagaaaattacgcaaatttgataacaaattttggtaggtctctaaatctcctacaaatcttttattgaaatcaagaaataaaaatacacagtgttttacaacactcctcacaacgtacatatgcccaagaatttttctcacaaaaatttctcttgaaagcttttctctctctaagcttctaactaaatcatttcttctttttgttttgtgatatgtgagaatgaatacataacattaatttataggtttttctaaaccatataagtacacatttttagtcgtcctatattaactaattaacataagccttgctttattttagtaaaactatattaataactcttaatataagagtatcaaaatataatatttattttcttaatagtcttccaattaaagattgatttcgatttgttttcacatttcacctctatgcagtcttctcattcttgttactcttgcaggcccactaaaggtgaacacaactttagcttctcaatcaactaaagttgaacacttcatcttccaacaaagatatgataaaataataacgaagtcaaatatgcttagttctagaaagaaatgctaaattatttatcaactatcacctatgcaaaacattattctcttgcttgaattctagctttcaacaaaccttgaagccatttgagtttagacttgagtttttaaactgtttgggttctttgccccttctcccctcctcccagcaagacattttggtttggaaggattcacaggatgggaggttttctgttaaggctgcttatcattcgatttccaaagggaggcagggtggagtggatcgtcttttcaagagtttgtggaaatcctctctcagtgaaagggtcaagctctttctttggaaggttgagagagacattctcccctgcgggcagaggcttcattgtttgtttgagaattcttctttctgtgttctttgtgatggtgatgtcgactccctggaacatctgttcttccactgtcatgtggctcatttttgttggtttagaagttcgtggggtattcggagtgatctccttcacttcgggtccccgcgggacattgtggaatggatcttcttccctccttttgctgactgtgttgactcaaatcaattctccctttttgcggcgtacctctgtttttatctgtggaagattcgtaatctgtgttatcacgaaggtgtgcgagaaccccctgaggttatttttaaattctacacttagtgaactcctgtgatctcaggaatcgagatgatccccctcccctggtacagtgcgactccttgtcttcggttgatcttggtttgggcaatcgggtgaatatcttcgttgatgctactgtgagagacaatgtcgctttctacgcggttcttgttcttgattattcggggaaggttttggaggcctttgctggtaaggagaatgttgtttcgtctcttgatgatgaggctcgtgccatcctcaatgctatctcgagatgtctttcttgtggctggtccggggctatgatattttttcagattgtaaagtggcggtggatgcgattctggctaggcaggtcccttcttggaggctttatcctgtttttctgcaactgtttaactctttttaataatggtacttcttgtaatgtctgttggatttctagtgtgaacaatggcgcagctcataagcttgctgccagggctgcgtcccagagtttttgtggcttttttgatcagtcggttgtgtactctgtgttgtaagccctgttttgtgtttgtttctcgtttactgttttaatgaaagtttgttttctatcaaaaaaaaaaaaaccttgaagccatattatctctttattggctcaatctctacgacatacttagcctatgtagtggataaagctaaaatcttttgcaattgagacatccaactaacaactgtatttccaacagtgaatatgtaacctgtggtgcctcgtagatacctcaaaagccacttcactgcttcccaataagctttccctggatttgacataaacctggtaaaaactacaactgcatgtccattatttggtcttgtacaaacaatcgtgtacatcaaactcccaatagttgaggcataatgaatttgacccttggataagtgaaaatgacttgccaagggtgtactaactggcttggcatcacccatgttgaatctctacaaaatatgtttgatgtactctgactgagataactatgaaatccctatatgcttatctcttatgatttgtattccaagaatcttctttgctggacctaagtccatcatgtcaaactcttttgacaattgttgcttgcacgttttgatatccttcatatttaaactttcttttaacatatcatcttctgaaatagcaacagtggtcagtattgtacctttggaagccttatgcacaaaactgtcaaactttttgtaccattgccttggggctggttttaagacatacaaacttttcttaagttttcataccatactcacattttctaaaaaatattctgattgatgcatgtatatctcctcatccaagtctccctgaagaaatgcagtcttcctgaagcaatcttcacgtctaactgttcaagatgatcttcaatggcaacaatactcaacattgatctaataatattgagcatcacaacaggagaaaaatctcaatatagtcaactccttccttttgcaaaaatcttttaactactaaacgagttttatatctcttagagccatcgtattctttctttactcggtacccatttgttgtaaagtgccttcttatccatgggcaactcaactagttcccatgtctggttggaaatcaaagactgcatctcatcttttatggaaaactcccacttgcttacatcactagtcttacatgtttcatcataacattcaagatctccttcatcagtcaacaacaattagttcatatatctcctgttaggcacatgaggccaagaagaccttctcaatacaggagctggagtaggaagtagtgttgcatcagattgttggatatcgctttgtccaataagttcctcttgctgaggacttgtctcaatcatctctgtcatagaactatttggatcataatctccatctacaaatattggcccagtacgctctgagtcgctagtgtcaattttgtctctatccttgttcactctttcatttgaaaatcacatctctactcgaatgaccattttgtttttcatcatcc

SEQ ID NO: 300437 - DNA, 3285 bp, Cannabis indica
ctagagtattctattggtgtaatagaatctttctaaattaataacacaagtttctccaaagggaaaaaaaagaagcttttgtttgccttgaaattgaatagaagcaaacaaaacgtgtcacccatcgacatgaatctgataaatcacgtgtccacttcacacacataaaaaaagaattctcctttttctctttctaggtctaagttttctcaaaatgttggactcaaaaagaccaaactacccatgtggttatccactcagcacgagtcaacttctccatcagttgggggtaaatccgtaaataaaactcctggacgagaattgcttggtcacagcacaacagatgatatcgtccatcaatttgattttcaggggtccaagtaggactggattcgacacgtggaccaatgagaaagcagttttagatggagcagtctcagccactagtctagagtctcagttctcagccacaaattcccatgagtgaaaacctggactcactctactcgttatatatatttcattattatttattattatataatttttagatacaaattctctatacactcgctttggttaattttcatttttgtgataaaagaaaccgaaaactctgttaaagaaccaaaagccgccttcttttcatttgccactctctctttctctctcacttgttcttagttacatcgtttcttgatctgggtcttcttatttttctcaatcatcaactgggttctttcttttctcctataattcatcacaggtatgtgtttttctatctgggtttaaactttaaagtgttctttttctgtgttgatctgtctgtctgtctgtccgtacagaaccaaggaaaagtcttcttagaatttggtaagaagctttgaacttgagattcaaaattcagagcacatataagattttaaggttattaaatatgttatcttgaatatttagggttgagacaaattctcaatctagaaaaaaaaaattacaaaaattaaggcataagtaggaaaattagttgaattgagtaattggtttgtttatttatttgcttttatagttggggaaaacagttaattaatattaagaacgatttatttattgttaagaaattaatattttgtataatgggctctcatattaataagcccagaaaattacagttaacctaatattacttttataaatttagagttatggtcttattcccaagactaatcattgactagttctctttctccaccataggagagagaactctttcaacttgatcagtctatggaagacctcaacttcacaacttgtaaagtaaccattgtctcaggtacgttttctacatgatagtttccactttttacaagatagtttttgcaaattatgtgtattgtttgtaagtaagtaaaggttttcttgtcaatttacatgtttggagatatagtacaattctcatataacttaattatgttgtaattgttgttattttcttgttttggtacagatttgaagtaatggattggtgtcttaagagtggcggcggtggtagtgccggcggtgctaatgatgagtgtatggttccagttcaaaaaggtagaagaatattgccagatagacttccatcacctgatagatggtcggaatggggaagagtaggtgagtttgaaacatttcaaacacattacaaagatggtgattctgatcaaaaattctatgctgaagaaaattgcttcaatggaacagctcatcatgagatggaagaagatagtttttatgataagtatcaatctaccagtcctactaatcatcagcttggcctagcagaatccactcagactgatgacatgttcttgtaccaatctttaactcttcattttttgcctaactttttcattcccattgccttgtttgctttcctcttgcttacatgaatcacttgttttgttgttttcttaatacagttcttatttttctgagatggataatcaagagagatcctactgtttttcgcctaaatctcaatgtggtgggatagagttcaatagaaattccctacaagacatgacttcagattctagaaatacttcaactgattttccaagtctgcacccaacatatctttcaacatttgacatcgacgataacaatgcctcgatgtttgttgttcctcgcaatttgcagaaaaatgatttcttaccagatcaggtgagatacaatattccctttcagttgcccatttctcaaattctgctgttgttaaaagtttatttaccaataatttttttgttttttaaaggcaactggaatggagttctctgtcaattctgagagtagcagcatgactaggtctgatgaagagccatcccccgaagaaactgtactgcaaggacttcaatcagtaacgaaacaggtgattttttcagtttgttttttatattgaaaaagaaatgtagacaggtctcagtatagtattggatttatttcttgagcaagtttttgacaaaaactcaaacacagctcaatgtaagtactcgactttcactccgtgatgcattgtatcgccttgcaaaaagctcagaaaaacgtcccatgagacagaatcaagatggaaaccactgtgtggaaaataattctttgtggactcctggcatggaaacaacaaggtattttacatagtttctacaagctatgttttatatgccaattttagttcatgtcaagtttaccctttacacaattctgtgggattgcagagaagggaatggttacaattagtcaatctttgttcctttctgttttttcagtttataaaatattgttaggatacttttgtacaaggagcattgttgcttggccccgaggcagagttcagcccgagccaagtgactctcacttattgggtcatgtggccgaataagtgaggttcacacatatgttatttcataagaatgtgttcaataattataagctttctgatcacaacttttgatgatctcaggtgtggaacaaagaaaggaactgagacagagaccaacatcattgacagagctattgcgaacttgatgttcaacaaaaccgagttggactaccaagatcttactggtgcaacatcctcaagctccaaagacgaggttgaaccgtcatcatctgagtaccaatcctacacatctcaatctcaacaacaacagcagcagcattcaaatgtacttgatgattctgactttccaatgttaatgtatccgggcgggatagatatggaaatggaaagcttgagttgcgattttt

SEQ ID NO: 300438 - DNA, 1626 bp, Cannabis indica
ttttgtgaaataatcccttataactttctctctttttgttttaactgtttttctctccttttacaagttactaactctctctttttcatagtttttacaaatacacactaaggaaataacacataaaagtattctctctttcttacaatggctctctactggaaaagctctctcaatggctctctctcaaaggcactgccacaattggaaaaaaaaaatgtatcctttaaatagaaataagatctgtgaaatgatctatggttgtaactgtttgagccctagagatttgttgtaacttattttgtacttgtctatatcttgattccggtagagaatgtctttgtaattgtctttttgtcttgtgttagaaatgtaatttcatacccaaggatttgcttttgaaacttaggttatattaggggatctaattttaacaaattctacccaaattcccttatataaccaaggatagttgatgatgctttgagggtcttagcttgaatgaccactagggttagcttcctttgtctatccctagcaagttcatgcaatgtttgaacttagctagggttaccactttggtctccatgtctgcagggttatgttcagtgggaaccttttccactgtgacctctccctgtgtcaccttgtctctaataaagtggcacttaatctcaacatgctttgttatatcatgaaaggctggatttttgcagagatgaacacaactttggctgttaaagtacactataggcacactactcagcaagtttaactcttttagtactcctttaatctacactgcctcttttatcgcttttgttgctgagatatactatgcttaagtggtttatagggccaccactggttgtagtactttccagctcacacaattgcctccaatcataaaatagtaagttgaagtagacttttttgtgtctctatcccctgcatagtttgagtcactaaatccttccaccaaagtttggttttgtgactatctaaacataagtccaacatttgttgtcccctttaagtacctaaaaagctacttcatagccaaccattgtatctttctagaatttcccatatacttgttaagaacacgtatagcatttgcaatattcaatctggtactcaccataagatatattatcgaaccaactgcattagagtaggagatctgactcatctcctctttctcctgctctgtcttagagcatcgatccttccttaaaaatcttgtacttgcttgtaatacgttggctagtcttctaggcactagtcatttggaacttcttattgggtttttgtgtcttaaataaaactaatttcaatataatcagatttactaattaatatgttgcatggctcacatgatttatttcatgattatatttaatatataaattttattaagtctagaatatatataaatatatataaataatatttaatatagctaagctcgagcctaaccttcccagaacatttatatatatatatatttgatattgtaccaataatttataaactactactgttacttcctgactaacatataagtatttgctaaaaagtaaagaatccagtaaccctagaggagtagacatatatagaagaatt

SEQ ID NO: 300439 - DNA, 1165 bp, Cannabis indica
aaacatagtaaaaaagtaaaaaataccgcctgacagtatttttataaaaaaatgacaaaagttagtatgccatgtaaatttctctaaaaaaagacaggtatttttgaacttttttagttaggatacgtgggccggttctgtgcttactcgttcagctccaaaattctggtggatttgccagcgtcgaatacgaattgggtttgggctgcttcagttcttaaaattgggctgttatgtccttaatactaaaggcccaaatctgttattgtaattagttgaacaaaactttacatttatgtcgttaatacaaaaatatcttattgtttattgttaatattgttattgtacattattattgctttctcatcatctccctctccttatcacagtgccatcaccacgatttttgcacgcataatcactgagttttatttgataaaaaacattgatttatttatattaattgttcaccatattattgtacacatagtcactgtctaaactattattaacacatgcgacatgactgtcttattattatcatttcttttaatcataataataaatacaacattatattttatcaaacaattatcataagacaaatacagcaatggactattaaacaaagttgctaatgatctatttgtgtagccattaattatcaaatataattgaagagaaaaaatatataaaaaatattgtgagaggggcaaataaatacaaatgtactaaattattaaaaaaaaaaacaatgagggggcaattctacgcaccacataggtccacccatgtgtagcttagtttaatggggactttttctgttatatgattatgaattttacaattgtggtttgcttaaatatgggaatatacatttcccaaattttataacatttttttttaaaaaaaaaatggattactacttattatcaaaaatggaaatatatgaaagcgaagtcttatttccaccttaaaaatttataaaagtattctatttaataatttttatacaatatttattttatatatataaaaatggaattattacatagaaaatataaattaacattttatctacaaaaatacctccataagataaagacaacatttatatcttttatgtaattttaattactaaaataccacttacactatcatcact

SEQ ID NO: 300440 - DNA, 3119 bp, Cannabis indica
atcgagatgggataaatttaccgtttccacccctcaatgtatttggccccttaaaacacttagttacctgtaaatgatgttttagtaatctaatatatagtcactgaaacaagacttgacttctatacaccagtagaagctatagattctatatttatgttcagcgctcccactcagtcatgctatcgattcttgttgcccattcgcttgtcgaactgtctagctaaaaaatggcagccaaatagcccatttggcagaaagccatggatacttaaattgatgtccttaaatccaatgacacttggattgttgtcactcttcttgatggacaccacgctattggatgtatggtgtgtataaaataaaatacaatgttgatagcattgttgaacgattcaaagaacgattggttgtcaaaggctacaatcaaaaataaggtattgttacaaagtttaataccttaaaattattgcttgctattgcaaccatgaacaattgttctttgtacgaacttgatattaaccaactcctttcttcatggcaatttaaatgaaagtttctatatgacgcttcccaaaggatataaacctaaggaacatattcctccgaacgctatatgtaaattaaccaaaagcctctatggcttgaaacaatcctctagacaatggttcacaaaacacaacaactaccttttatccactagttttactcaattaattttgataacactttttcattaaaaatcataaaagtgtttttcttgaccttttaatatatgttcatgtcattgtgattacttccaataataatgttggtgttactttttttaaatagaaattcaattcagtcttttagcttaaggaccatggtccttcacagtttttcttaaatttagagattggtcgtcctcaactggcatttatgtgtttcaatgaccattcaccctacaacttttgctaaaacaggttacttaggagcttccattgctcctacacccatggaacctaacatttggctttcatccgacgttggggaatcattaaaaaatccaaaagtctatcgtagtgtcattagtaaactgatttacttaaccattagatgccttgatatttcctttgctataaataagttaagtcagtttttatctagtcctagagctcctcatcttactgcagctcatagaattttacaatatctgaaaggcacttctagccaaagattagattttcattcgacatattccactaatttgtgcgcttacgttgaaacaaacatatccaatgtagattttaacctcaaaatctttttagatgccgattgagcttcatgtagtgacacgtttatggctatcatgtctttcttgggagataattaatttcttagaaatccaaaaagcaatccaccgtctctcgtttgtcagtcaaagcagaatatcgggttatgaccaatgcccctagtgagatgacctagttgttaccactagttttggattcgacatcaatcacaaagattctgccatcttttttgtgacaatacagtcaccattcacatttttcgagaacctcgtattctatgaacaaacaaaacatattgaaattgattgtcatgttgttcaagagaaagtccaagaaggcacattaaagctcattcatgtcaccaccaagaataacattgttggtatatttacaaagcttttatttcctagttacttctacaaatttgtatccaagatgaacatgaaaaatttatacatttcatcttaagaggaggcactaggtttaccatttagttgcccactttatctttggacctcttctttttaccctacatatatatcaactttgtaaatgtaatagaccgttttgacattttctgtcatttttcataaatgagaaaggattttctctcacacacgaaacacgatttgtttttaaatttatatcaaacatttgagattttagatggtctagaaagcgtttttggaaataagcgttagtagttggaatttgtaggaggttttggtattggtgcaactttggtgaaacagtactcatcaaagctcgagagttggccacttttgactccatcaaagtttgggtcatttttttgttactttctttgctggaaatgtaagcaaagataaaggcaattctactttttgaagtacgcaccactcgccgcccaatcctattactaacttttcttttctttttttccttttataccactgttttcttagtacagttaaaattacttgttttatttttttaatagaaacagttaaaaaatatgagagagctgtataaataggtagctaatattaagccttgaatatgatatgcaattaattaattaattaattaataataagtaagcatagtacttaagtccttaccctactcctgtaataactactactactaataatatgctgcaaagtcatatgattcaaagtcaaaagtagtgggaaaacaaaatcaaacgtatgcatcatcaatttggaataaatcaatggaatttttcccatgtagagaagactacgccaaaagtaataaccacataagatccacttgatcatactcaaatgactaaaaaagcctttttggcatgatcataattgtatttctactaatgatgataagttctttaatcacatgtgttaattatacatatattttatatataggatagagcaagttatatttttcaatttcgatacaaaaaaaaaaaagaactatacttttcaatccttctatagtaaataaaaagacaaaaaatgaaaggaaaaagaaaaagcaaaacaatgaatctgtttataatatatgtgaccacgtaatgataatattgtaatatattaaaagaaaaaaaatatgatataataatgataacttgtcaaattaataagataaaaacgacttttttttattttcattcttcaataaatatagggtaaatattatgtaaaatgacatgtttactaataagtaatgagaattaatggtaagttaatcattctcttatatttgtttacttacattattaaaattaagaaaggaagaacttgattaaaaagaaaagaagaacttcccccactaatttgtaaggaatgccattaaggg

SEQ ID NO: 300441 - DNA, 4276 bp, Cannabis indica
aaacccaacagatacaaaccctttaaaagattcctaagtgatcaaggtatcttattttctcatccttgtcctcatacacatgaacaacatgggagggctgaaagaaagcattgacacatcgtggaaactggccttactttgcttgctcaaagcaaattggacttaacttattggtggcatgcttttcaatatgccacattcactattaatcggctgcctacagttgttctcaacaacattagtcattttgagtgtctctttggcacaccacccgattatcatattatgaagccttttggttgtgaatgctttccccatctcaggccgtatcattctcataaaatggatttcaggtatgaacaatgtctctttattggttattcgtcctatcacaaatgttttctatgtgaaaatgctcaaggtcgaatctttaaagcacgcaatgtggttttcaatgaaaattgctatcctggaattctttcacaatgtgcaccagatcaggtacaattttcttctccttctcctcctactgctagctttactactaattgtccattacctaatacaaatcttgtgtctgatgctgcaatacaaccatctggtgctgagacattaccaaccaactcacccaatttaatagctactgaaacagccacaccagtttccactactccccatattacacctgttactgaacctattatccctaccacatccgctccatcccaatcccatgttacaccctcaaatctcatcattcatccaccagtacctcctcccatcagcaccactacaataaacactgccccgtcttcagaaatttctgtgcctactgtctctgcaccagaaccatatgcttcatctttaccttgtgcaggaacaaccatacaagctgcctttactcacactcatgccatgatcacaagatccctcaatggtatagccaagccgaagtcatatttggctacaaagcatcctctttccataatcactacttcctacagaaccgagaacattaaaagaggctctcatgaatcccaagtggctcgcatctatgaacactgaaattgcagctctaaaaaggctggcacatggtccttggttccttacaaagagggaatgcatgtcattgataataagtgggtgcatcgtctcaaattaaatgctgatggttcattagatcgattcaagtcgagacttgtggctaaaggatttttacaaaccccaggtattgactatgctgaaactttttcaccagttgtcaaaccggttacagttcgcacagtcttgtctcttgctgtcactaagaattgggttgtcaaacaacttgatgttagtaatgcctttctcaatggcactctaactgaaaccgtatacatgaaacatccacctggcttcctcgattccagcaaacctgaacatgtatgtctcctacacaagtccatttatggacttaaacaagccccccgtgcatggaacgacaagttgaaaaacagtcttttaaattggggttttgtggcatccaaagtagatacatcattgttcacttatcattctgcacaagactttatcatattactggtttacgttgatgatatactagttacaggctcaagtaactccctcatcaacaaactcatctctgatctaaatcatgacttctctctaaacgatttaggtgaagtctattactttttgggggtggaaatcttcagagattcatcgggaatgtatctttctcaaacaaaatacatcaccgatctacttacaaggcttaatatggaaggagctaaaagtattcacaatccctctagtgcttccaccaaactgttcctcaatgatggtgaacccttctgtgattcgactttgtacagaagctctatcggtgtattacattacctgtctttaacaagacctgacatagcatatattgtcaataaactcagtcagtttatcaaggctcccaccgtgtgtcactggaatgcttgtaagagacttttacgatatctaaaagggactatcactgagggtttagtgcttcgacctacatcagatatgacacttcacagctactctgatgccgactgggcaagtagcattgatgatcgaaaatcgactggagggtatgttgtttttctagggggaaatctgatatcatggactacaaaaaagcagcaagttgtcgcacgttcgagcacggaaagtgagttcagggcccttgccaatacggctgctgaactcaaatggatagcgtcactgttgtctgaacttcatattccacttcaacattttccgattatatgggtggataatcaaagcgcagctgctcttgcagcgaatctggtgtttcatgcgcgttcaaaacatattgaacttgatttatattttgtccgtgatcaaatattagctcatcaacttgctgtccaatttgttcgctcagttgatcaagtggcagatctcctcacaatgtctctgtccacaaacagatttcactacctaaaatccaaacttaacatggctatctccaagttcagtttgaggggggatgttaataactaatcttggctttctgttaattctgttaattagttattagttaggtagttattttttctgttatatcctcttgctgtgtaatgactttgtaacagctctatataaataaagtctcgctaatcactttgattagcttttgccttttactttgttttctctctgtttttcttttcctctgttcctgtggttccatggtattgttcttacacaaaagactcggtaggaataccttgaataacctccctgatgaaaggttcggtctcctttggcactggaatcttcctgttcaaataggatgccatgggagccaagaaactcatgttgtctacaaagaacaaaagacaagcagttagtaaaataaaagaagagcaagacaacaaggtataactactgaatagggagcattaataatctgttgattccctagctctttctagaacattttgagtagaagtaacttcttcatcatcctggtctaaaactacaaatactctccttgaatattctgggtcatttcgaactgaactctcatcttttgacattgtcctagacaagatgacagtggcactctgaccatcctcttcatcttgttcgattggcatcgtccaagagtcatcagagaagcgagtatccacataaacttatcgacaaaacattataaggccaaaattgtagaggtttttcaatggtaaacaaagtcctcccatctctttcccatgcatcaattttaataagcatggtatatactttcctattcataccaatcaatggagaggtcttttgaaagggctagccttttggaaggtaatatgtcttgatggaaggactgtggtataacagtattcttcatggtaaaggccacaattacttttagtcatgttttctatacgtggagtgaattgatggaagggatagaatccctcctctttttgagtcagatttctgttcaagtcacaaaagaagttaatttcatggggatttaggacagaccaatttctcaagcagcaaaaaatgaagaaggttgacatgattctataaccatttagatttatttggtaggtaaaaactccaaagaaagctgcaattgatataaaccatgggtgcaaaggtaagtaagcacccacattcatatggaacctcgaccaagctatcaagaaccattgggacatccagatcatggtttcgtgacaacagtttctgggaaaagataatcatctttgatcagttgaacttgatgttcagagatggtgctaaacacaagaggtctcaacttgaaagcctgatttcttgggtcatcactcgcaatgataattttgagaagttcagttatcatcactttcccaccacgtgccttgtctaagttcttagatttaggcacaattagcttagctctaatgaattgagtcacatggggatcatattcatcaagaattcttctgcttctcttcattcgaggcatagtgacttcaaaattcggttacttacaactcaagaaaagtctctttggctttggaaaggcgaatccaaggtaatttcaagagaagaaattttcaacttaaaattcttgcatggaagtattttggaggtctcaattaaagaattcaaggatttttggggagttctagaatccttgaaacaagctcagcaaaggaagaagaaaaaaattgaaaaaaaataatgaaatgatgaatatgaaaatttcaaaggctactcaaaaagg

SEQ ID NO: 300442 - DNA, 4598 bp, Cannabis indica
atcggaatttgaagaaggggaagaaggagtcctcgacccataacggatagaggaggatttattcaatcacatagtttgggctcctagaatatggcacccttggacacagaattcccccaatctattatctaggacagaagcaaagccaaaactattcaaacttaaagagacaataattaagaaaagaacagtctatcacccataaattaactgacaaatagaggcagttaacagagcattgaaaacttatgtcgtgtgctttaccaataacaagtattggtaaagttcattttttgagctcaacaacaagtgaagtattatactgacatggaggaatacaaggtggacgacatggtccatcctaagctacgtcacaacagcccctacctagaagactgtaagacctattcggtacacatactctaaaagggctacaccacatatcacttaattagtttatttagttatattagtcgctgactagacttgttagctatttctaactagacaaattaattaaataagtccatgtcacttaagttctttggggagggtataagtagaggattagagaatatattaaagggggtggaataatttgtaaagtttacagattaatatctggtttgggagtttccaagtaacgcgaatgcttgggcaaaattgtatcttattacttaccaaattgatatcatatctgaggcatacactctcgagaggaactgatgtcacaataggggcaaaagcccagagtgggccattgtggacattggctctaaattgaggtgtgtagttaaattctcaagtcggtttattaactacttgggcaccatcttctcttaggctgttcttttggcagtgagtcaatcaaaatggttgtaaaaaacactttgaaaagttggctaccaagtattataggcttttgaaggtgcttgcttgcactgggccagtggctgaatgttgtactgaatgtcgaaaaaagactactagcagtaccagccagattgaatttctcatcaactggaagacctacctaagtttgaaccacttggtagacttcaagatgatccacactcagttactaaaggtttacctagaaaacaaggtgaatgtgtagacctgtggtaatgttagatcctggctagactggcttattctacgtgatctaaggatactaacaataggtcagattttgactgtattaatggttgaggtgccatgtttataagtgtacattgattcccaaacatcttgaatagcttggaataattgaaagggttatcttttttatcaatacaatacctattacagattctttcaagaactaactttgtagtttaggctcagaaattgtagtccaatttccattcacttgtgcttaatgtttagtctatagatgtgtggcaaagagaaagtatgtttttagcaacaaacgactacatagcaatagaaatgttttaatgctgagatacaaatctgctaaagaagctaagcagccaaataatactaaccacatcatagactggcatttgattgcgccagaattccatcacaggtagtagtagcctccctgtaacatatttgattgaagcagacttatgttaacggcattaggaatagacataacgatgacaattattactctaatcccaagaaatattctaggttggcttaaaagacattagaaatgttatctgaaatttcaagaaagtgacggtagtagagggtaacaaagtcacctgatctggatcgtccataactcaaacaatcaggggaaactacagacactttaattttgttgtcccgaagcggtggtgtagcctgaacaaatgcagaaaaacaaacaaaatatgtgaacaacaaacagccaaaaaaattgaacttaagcattttacacatccgcataaacactcaaaaaataaacaaccttgtattctctcttgaataacattatactaagcatgtagcaagaattctatagtactctcttgcagaacaatccaatgaagaatagattggattacaacttcaataaatcataagaagcagctccatgctgaaataaatactaaatgacatcaagttttgacacagtatgcattatctccaatgcttgtctcagtactgtaaaacattaattattaaataagcgaaaattggccaatctgaatgaatttgtgcatggcagcaggtcaacagttaagaaggatcaagatactaaataaataggaccatgatcactttatcatgattatacccaacttgtaatatgtgatacacaatagactacaggtcaacagaatctaattcaataacacaaaagaaataaagtgacaatatgtaaaaataaaaatatgcacgttgccatcttaagataaaagccctccccttccccactcacccccttaaacatagacagttgaactaggctcaactgcttgtgtacctaagtgacagaaaattaactacttctactgtaaccaaccaacttactgctgtatcagagaaatttttcctctttcttgtctttgtgtcctttcttccttctttaaaaccagtttcctgtctagctgcaataaataattcattaacttgataaaaaaatctgactattatgagtaaagataaacaaataaattggctgacaaccatagaacgccaacctgtgtcaaatacctttagtctcagcatttccagaatcatgtccccgttttgaattagaagtctgctccagacctatgctcaaagattcatcacctagttttactgtcacatttgtatccactggcttctgcttccttttgctccctacataagaaatttcgggcactctgtctgttgagtgaatggttgcagctatagaactgttcaacttctcatcgtctagcatttgaacaggactaacattttgctgttcttgatctaaagaacacccagatggaagggagttcctctgactgcctttgagatttttcaatctatcactacatttctgaaaaccaataggtctgtctctgagatttctcaatctagcactacatttacgaaaaccaattggtgtaacatccagttggtgtttcttctcatcactcaggttagaaacttttgaattattgagggtattaccattctcagaaaccttatgagattcggaggtttcaacatgtttcccatgtttcagagtgacacaaccttgtttctcaagagttttttcttgtagagtagaagtttcaggcccagatactactccacatttcccaaagatagctgaacaaaataataaaaaaacaaactaagaactggtatatacaaaatggactaataattatgtataaaatcagtagcagtagcagtaccaggagattctgtattgaggataccattctcagaaaccttatgagattctgaagtttcaacttgtttcctatgtttcgaagtgacacaaccttgtttttctaggagtttttttactttgaaaatcttgtacagaacatggagtaaaagtttcaggacagcattccataacaaaagagaaaaaaaattaaagatgttgtataaacaaaatgaactagtaatgatgaatgctttcactgacacctttccttgctcggctcaagggttcgaatcacaccacactctcatagagagattatactagacccacttgctcgggtcaagggttcgaatcacccaagtgatccttaatagaatggaacccttgaggtgcataccgatgacagtctcgggattatctaagctagactggggaataaatctacaccaagtgatccccttttttcacagcaaaaaaacaaaatgatgaatacaaaagcagaagtagtaccaggaggagcatatgtagaaaactgtcgccaattcgaaggaaagccaaataaaaagcttctagaaacctgggaaggaaagccattgagagtggtgcggtgctggttgatgacacccttaagactgatacagacattatcggtagtctcaagagtgaaaacatcatatcttttggctataggagcagaggtaaatacacgaactgcttcttgttgtctggatgttaagccggcaacgccaaggttgttgccatggaagtgattttgggtgtgaatcaaccaccaatcgaacaagcatacctacttagtttgcagatgagatgagagtataaaaacatcatacactcaatcaaagaaacatccaaatgaaaacacacttactgttctttcaaaatgagagaaagaggttgctcctcctgctgctgctgctgctggtatttctgtggagctccgagaagtagccatggcccatggaatcaaaagattcaaaaaccccaaacacttttccacgctgagccgcgggaatctgaagtgttctgagtttataaacctttttactttgttttaaacactcgcaacttttaaactagcgatggaaatcgaacggctaataggtaagtagttttccctcttctctttcacattaaatatttggctaattaataattttttcttcaatagtgtctctgaacttttttggccgttaaaaattcccctgaactattgagattgttaaatttaaggacttttgtctaa

SEQ ID NO: 300443 - DNA, 5763 bp, Cannabis indica
ccatgcaacattaaatattatttctgatctatattaataagtatatttgattatattgaaatgagttttatttagggcataaaacccaacagtgtgaagcatccacaaaaaggagtggacatggtagcaataatttgtctagaactattccttagatattctccaaaacctaaaattcgattcattgtgtcgatggctacatctgtgttcaatttgaggtggcccgaaggaggattcatccagtcaacaacccgagagactgctgctggtgcagaagaagcagcaggtttgttggtgttggcagcatggtaatcttctataaaagagagagcataatatagaaagacatcatgtggttttggtttggtaccatgtctctctttatttcttttagtccaaatgctccaaaggattgttgcaaactgctcaatttttaaggaggaccattcagtggatatatgaagaaatagttccttcaggttcatgtgctgagagatgacagccttatttcaaagtccgaacaatgccacactcgtttggcacgcttacagtaaaataaagcatggaatgttgtctcatttgctctattgcataaagagcataaaccaaaatctgatatatgccaagtgtgaagaatgttcgctacaggaaggcaatcgtgaatggctcgccacaagaagatacaaatttttgaaggaattttcaatccccaaaattttttcaaccattattgagcttgtattccgctagttgtaggttgttgttcttcaagttttgttgctagtgaataaccagatttaactgtataaacaccagtagcttcatgatgccatgtcaaagtatcatgatgtttagttaaagttaatggaatcctttgaatcttagcaacatctgaaggaagaaacaggctgtcaattaagtcatgatcccattgttgacaatttaagatgagatctcatactttcattgtggtatcttgacctgtgaattgtagaggttgaaaagaagtaatacctggcagctaagggtcagatgcacaaaaatttttttcaccattaccaaccttccatcgaagtccttttgaaagcaattctttaccccaaacaatgcctctccaagttaaggaagggtatgaacctaaatcggcatcaaggaaagaggaatgcttgaagtatcttggcttgagtattcggtggatgagtgaatttggattggaaaagattagccatgcttgctttggcaaaagggcctggtcgaaatggacaaaactcttagaacccaaccctccttcaactttcgaatgagtgagagctttccaagtttttcaattaatgcctgaagacgatgagttagatcccccccagaaggttgttgcatataacctctatttggttaataagagatttggaaagctgaaaaacaactcatggcataagttggtatagcttgctcaacctctttgagtaagacttccttgaccaccaattgaaaataacttttcttgccaagatgagaggagattccataacttgtctttgatttcaccaaataataccttcttatccctacccgaataggaggaaagacccaaatatctttcatgacaggctgtattgccatttgtaaaatctgttgaaagttggattgggatggctggtagtgtattaggcgagaaggagagtactaacttctctggattaaggcattgacctgatgcacggcagtaataatccaaggaacgcttgatcaccattgctggccttttatttgctctacaaagaacaaggctatcatcgacaaaaagtaaatgagataccataggagcttcgcgagctattcgaagaccttgaaggttgccaccattttcttcaccctgaaataatcttgaaagaccttctacacagattataaagagaaagggagacaacggatcaccttgtcgaataccactgattggaataacatgaccttgagtagagccattggctgaaaaggagtaagtgacgctgctgatgcatcgaagaatgagatccacaattaaagaagcaaaacccatagtagtcataatattctgaataaaatgccattccaccctattaaaggctttactcatatcaagcttcatggcagcataaccttctttacccctttttaaatgctttaatgaatggagaagctcaaaagcaaccaagacattgtccgtaataagtcgtgattgaagaaaagcactctgagattctgaaattaccaaagagagaaaaggcttcaatcagatcacaatggctttggaaaccagtttataaagcacgttgcagaggctaataggtcttaattgggacatagtagtaggatttttgactttaggaattagggtgatcaaagtttggttaaagcatgtagggtccccccctcattgagtactttcaacactgttttagacactaattcactaactatatgaccagtaaataatgacaaaacattactgacatatcgtctaacccgggactactatcatcactcatggaggaaagtgcagcaaaaacatcctcttcagtatacggcaaggtaaaaagctagttgatttttgctgtgatagttcttggaaccgtatgtagaacctggtgtagagcatttgaatcaatgcctgttgttgtaaagatattctgaaagtaactctcaataatgtgcccaatttctgaatgtgttttttgcagtacaccttgatcatcttgaagagaagtgattatgttgctgtgatgcctgctgttggctcgttgatggaagaatttggtgttcgaatcaccagattttaaccaagaaacacgggcacgttgatgccagtaatcttcttcttgagctaaaagttcatcaagtatgttctcacttgtcttaagttcttcaaagtgcgagcgactaacatcggatgagttgtgaagagcttctactttctgttggctttattttaatttttttttcggaagatcaccgaatttctgcctgtgccaagcttgtaattgatgagagcattctgacaaattttacagaacttgtgtaattggatagactgaagcagcattccaattcttaggaataatttatgtacaagcatcttcatataatcaaagcttttcaaagcagaatcgagacttaaatttttggtttgaatttgacagcagagatgtaattggaaccaaaagggctctgtgatctgattggaagaaatccaaatgagtaactgtttgaacattgaaagtgtttaaccattctgaattgataaagccatagtccaatctttccttcacatttgttatattggtgttcttgtaatgccaagtgaacctttcaccatcaaaaaccagttcttgtaatccacacatgtcaattgtattcctaaaataatcaatttgagcttcattctttaagtgacctccaagtttattcgagtgagagatgatttcattaaagtcccccatgagtaaccatggcaataggggtgccgagtctttgagtttggtcaacagttcccatgtgaatttcccttaagaaacaataggagaaccataaaatcccaaaaaatgaaaagaagggccatcatcaaaggccatataacaatcaataaagttttgtccataattgataacagttacacttacattagatttctaaagaaaaagcaaaccaccacttaaacctatcctaggaacttctataccattaggaaatttaaaagcattgcgaaatttagaaatagaaccttaactaagcttagtttccataataaagataacatcaggtttatgttgcgagatgagcaaacgtaattgacggaatgctctcggattgctcaagccgcgagcattccaggatacaacattcatggtgattggcaaggctgagaatcagccttcgccaaaggagcaccattaccatcagccaacagtgaaagataagacatctcaaaggtgggatccgattgctggtgcagattagagttggcaatatcatccaatggagacattctagtacgacatcgtttcagaacattgcgaacattatcgccggaggtaactagttgtcgtttggaaacaaggaggccatcctattgtcactagccgaagcctggctattatccaaatcagaatttgagtctttggttgctgcattattttggggaatgaaaggtgtagtggtagaggttttggatattgaataattccgagaaggagatgcggaatttacagtagatgagtgaatatgtgtatatgctggaggagtggccaccgaaagtctaatggaggagttaattgatgccgatgtcgaactgtttgaatgtggaatgtgggagttggtcattgaacttgtagcagcagtaggttgtaatatcacttcagggacatgcgtggtgcttgaaaaagatacaatgtctttggtacaatgcttgtcatcattggagggggtagatgtagtggcaatatcctgggagtgtttgaaaatactaagtgtttgatcatgactatgattggaaggatagtcaattggatctttttgcaatggattttcccttctcgcggctagaagtgtgggatggtaaagcaggaaagggcctaggatgagcaatgattaaagcaatagtattacgagcaagttgcgtgataaaaggccagggtccagacttggagaaatcttgtctatacctgtcataacttgacttaggaagaggagatccttccaaccagggaccataagggagatccgatctcttccttcatcaatcttttccaagaaagaagggcatttatcaaaaacatgtccaatgattccacattcataacaaaaattaggaagcctttcataacgatactccagccataattcatcttccatccaacgaaaaagtgacagtttatccatgcaacaatggcttcgaaacatcaatacctacctgaattcaaagaaaaggtccccatccttgattaagagaatcatcataaacctctaggaaggaaccaatcaaattacctatcaccttagccaaggattccgatttgcttaaaaagggtagacgatagacttgcatccaaaagggggtgatggtgtaagaattgaaagggacattctgcagagtacttggtgggcataaaatcaaatgttgattatgtaaatgccaaggttccttagaaagaacccttcttaaatatccttcgcatccaaacgtaatcatgaaggaatcttattcataagaggatacagaaacttcaaatctacatttccattgtgtagagattagattggtcagctgttttggattgaagcctcttttagagaagactctacaaaggacacagtgagatactggtcgttgagggggtattgcaatatttgatagattaaaaaattttctttctctgacagatagagcacgagagaagtctgggtggaaagaatccatggagaaaggcaagaaagatgataaaaagtatactgaaatagggaacaaaccagagaattgggggggggggggagaggagtggtggtctgagagaaaacagggaggcgcaggggaggttatactcaaagtaggaggaaaactgacactaactgcttatagaaaatactaagtgccacagagcaacataaagggcagacaatactctacttgtaaaaattaattttacttaagaaaaagggaatgttgattacaattaatggtaataaataaaaaatttaggtacattcacataattattaatatttataaca

SEQ ID NO: 300444 - DNA, 1306 bp, Cannabis indica
cacacagatgctaagcccattaacaattgatcaccaacaacatgggctaacacagcaaagaactatccaatcaacccaagttttaataaaaccaataaaatttaatgtaagcccaaataaaagtctaacacttctcccatagaaaattttaaaaataaataaataaataaaatgcttattaaatttgcctatgcatatataaacggtagatgtatattactgagtgtaaaatgatatgaaaatgattaatatagtttttcattcttcaatgatttaatagttccctaatattaacatgcatcaagtaatctcatcaaccatgcatagtacttgagtacagaattcccgccagcaaactttggtgttccacaattaatatgtatatataaaattctttattttttaatggtaatggaattcgaataaaatcaactctatttatataagacaaattataagaaaattctactttaatgttttcttttattacagtcaaaacattgttactaggcactatatatatgcttaattagcataccttcctaataatatatagttgtatatcatcattaaaaaaaaaataaaagacatccgaattttgacattcaattgtacaccgtacacgccatgccatatttaatgtttgaaacgtgattacatatatacagatattttttatcagtaaattaagaaaaatataaatccatgtccatcaaaactattataaattaagagctaaatcagtaatgaattataattttttgtgcactatatatcattgatcaacctctgtggtgctctctatgatgatttcgatcgaaagaaaacaaaatgggattatggccgggcggggcgggtgggtctccgtcttaatttggatatatataggttgcttaaatgaattgacaacttatttaatttgttttcaaatatttgtgtgaagaagtcttagccttatactcatgttttcaacctttttatccacaactacactatataaatatatatatatatgtacattacaatgcatacatatataaatatagatcatgatcatgcctgtccttctccaacccactggttctcagttctcactccaaacgtgtccactttagatttaaatttagttgattgttacaataaataattataagaaggagaaagaaattcaaagaagaagtaattaatttgaaatattaaatatctcaatgagttgaaaaattatcttttgaacacactcttatatgaggaatttatacatgttatataaatatatctttatatattaaaagtgcctatttaacgg

SEQ ID NO: 300445 - DNA, 3444 bp, Cannabis indica
attaattaataaatctcctgatttattaaaaaaaaataaataatataggagatgataattatattattatataaaaaaataatgttaatcaaaaataacataaattattatattttggaaagagaaatttttaaccaatttaaaaaagggtaaatagcggtataagtaccaaagttttgagtttgtaagcggcataaacccaatgatttttttagtggcataagtactcaatgcttgtaaaactgtaatttttctctattttcgtcagtacaggctccgttttaaatttattgaaaaaaaatttggaagtaactgatactacatatttttcgtcgagactaaataatctaaaattttggtcttatatgtgttctgtttaagataataatagagtctcttatgataaaactggaaaagaattacagttttataaattggatacttatgtcttaaaaaaaaaatcatttaatttatgccgcttacattaggtagttatgacactatttatcctttacaaaattctcctattcgtaaaaaaaaattacaaaataaagaagttacccacaacctcatgcatgttactgtgttacccacaaattcacaataacacaagcaaatgagccccacaaccagttcactctcttactaaaaaagccttaatccatcgaagcaaagtaagaaaatgccttaaaccaacataacagacaaaagtgcattactttactttcatcagttcccatttgactatttggatttctcactttgctttctctcttttctcatctccatttttttgaatccaccatggaaatcaaatgccctttccgcttcctctctctcatctttctcttcgccggttacttctccactctcggcgattccgcatattccatcggcatcaactatggaaccgtcgcaaacaaccttccgccgccttcccaagtcgctaagttcatcaagactcaaacaaccatcgaccgggtcaagatcttcgatgccaacccggatatactccgagcttttgcaaataccggcatcgccatcactgtaactgtcggaaacggcgacgttccggccctcgctaagctttccgatgctcagtcatgggttgcaaacaacattttaccgttccaccctaagacggtaattaatcgaatcgccgtcggtaatgaaatccttgccacatcggataaggacctcatcgcccatctattaccggccatgaaatctcttcactctgctctaaaactagctaacgttaccagtgttcaagtctcgactcctcactcgctgggcatactcgccgtaaactcggacccaccgagttcggctcagtttcgaagcggttacgacaaggtagtttttgctccgatgcttgagtaccacagagaaaccaaatccccgtttatgataaatccgtacccgttttttgggtacgcagactcggttagtaattacgctctctttaagccaaacggcggcgttttcgacaaggtgacgggaattaactacaccaacatgttcgatgcccagatggacgcagttttcacggccatgaagaagttgggattcgaagacgtggatatcgtcgttgccgaaacgggttggccctcagcgggtgacccgaaccagccaggtgtgagcctagaaaacgccttgtcgtataacggaaaccttgtgaagcacgtgagttctggtaagggaacgcccttaatgccaaacaggactttcgagacctacattttctctctattcaatgagaatctcaaacccactatctcggagcagaattatgggttgttcaagccggatctaacccctgtctacgatgtgggcattttacgaaatgatcaggtatttttttctattttaactacatttgttcaccgattataaattgacacgtgctcgtgtttatatatgctttcatgttcattaccttagacaatcataacctttctaaagagctctgacacttgccagcataactctagtggaagacagagagaacaccatgcaagttgttgaattacgaaaatgtcctgtactaattgttttgtcactctaccttttagggttattttagtcctggaaagtttacttttgagactccttaggcaacattttaaacgaagattcctttaacttgcggcgggggcaacggtcatatatataattcactaccaattaaatttttcaaaaaagataattaaaaaactattctttttctcatcataatattcttatttgttccaggcattgggtccatcttcttctgtggcgcaagccccatcttccgtcggtgaagccccatcttccgtcggtgaagccccatcttccgtcggtgaagccccatccgccgttggcgaagccccgtcggccccacccgccttcggccaatctccaacggccccatcagtcgttggtcaaggcccatcatctaacgttgatcaagaaaagaggtggtgcgtgcctaaatcgaacgtgtctgatgaggaattacagaagaacatagactacgtgtgtagcgtcaaagtggactgcaagcccatacaatctggtgggccgtgcttcgagcccaacacaatcagatcacatgcgtcatatgcaatgaacgcttactatctgaaatttggacctcaggattccaattgtgacttcaaccacactggagtagttacctcaaccgaccctagtaagttccagcgttattttccttgttacttttactgttttacatttattattttgttttttctcttttaagaaaaagagtaggttaaaaaaataataataattaagtttgagttcacacacctattcttttgtttattaaagaaataaacatgtgacgttactttgtttttttttacttgtggtaggttataagacttgcacgtatccatttcatagtgtggattcaaagttggaaaagtcggccgcagaaggtggccctgccaaattgtggaccctcgttcagatatttattggagctgcttgttatacaatatctagattctagacacctcacttaataatttgtaattttattgtttatttattatctatttattttgttgggctatttttcttgtaaagtatgatggggacacgtggcaaatttttgagtgttagagctggggctgctcgattgcattggctcgtattttatagatatctaataatattacagacgggatattggcggctaaaccacctaaactttacggtttgtaacacttaaccaccaaaactgaatttttggcggctaaactacctaaactctggttccgttttgctctgcacacctccgtccaaaaatcaccgttaagtgccacagtggactgtccacgtgtacacacttgtacacgtggcaaatttttagtggtccacgtaatattaatttttttaaaaaaattaaaaatattataaaaaattaaaaaa

SEQ ID NO: 300446 - DNA, 4675 bp, Cannabis indica
aataactaatactaaaaaataagtatattgtactaaaaataaagtataatagttaaaaagaaatctaacaatttaatagtttaaaagcaaccacaattcaactcttgagaattcaaaaaacatcactagcaaaaatccaattcgattgatcacgatgctgttcatcagcattattttcaatcaatcaaacgacatatcaccaagatatgaggcatagagacaataagacatatattgaggagaactatacgtggattaactgggtcctcatgcaaagaagcaagactgtgagctagagaatatgtttgagtctgccatatttatatttgactgaaactatcattggttgaagtctaacttaaccaatattgtcccattgcttactaggtaccaattcatcagtgtaccctatatttttgtaattgtgtggttaaattatttgcatttgtttaaattcatgcaattctagtacttttgtatttgtaggatagaaataaaatcataattttcaattgtcttgcttctaaagcttttgcaagctttacttcctagctccctctgtttccaaggaattctatcgtcctagttttttttctctacaacttttccccttccactgtgtttatttttattggtatgattgtggcacaactatgtgtactccgtttaataagagaattggtaaaagacattactggtgcctaccaccctcctcggtatcatattactattggtataattaagtattcggtcccatataacttaagaaaataattttttaagaatattgttaaccaactgtgggatgccacttataaaagatgttgggacactggtgcccaatagcaatacttgtttgataattatgtacgtttgttttgtttctctcaatattatacattgtattgtttattggttagttacatacaattaatggacttagaattgtgttcctaaatacttggaaatgttctctttaggtatgttttttctaaaataaaaataaattattttttcaggagccacttacttgacaagtgggattatggcaatcgttttcaaagactgtgtcaagatcacgaaaaagtctgtgttctggagtatcatatcttccatcacacaaatccaaaccaccaataaatgcagttatttttcggttggctccatcagctgcggcactatcaagaactacacacttttgatgatgtgtaaatagggttcccacaacctgaactagaggaatcgattcaaataatcagagaagaagtaaaaaggcataacaaactcaaatagctaactgttagcttgttggcctatcaatttcttatatcacaagaggtaataaagattcaagaataaattaagaagtatcaatcaattttaacacaaatttcttacctgctgcttaaacatgctgagtttattacttgcatagcgtggacaaagtacacaatgaacgctagaatgtttaaagaacttcttggtttcttcatcatgagtctgcatgactccatcctgcattggaattgtgaccaataatcaaaagagttcactactctatttgttttaagtttatctaagagactatagtattactatttgtacaattctttgattaatgaacttgcatgatcatagaactcatattaacatatcgactgtcatgtatatcgttaactacttccacatgtccagtaattgaaataagagttaaagacatcataattacaatatagtggcaaaaaaactcatgaactaaatgaactatttgttaggacaaagttttgaatttacaatgataggctaggaaatcaatacaaaggacgtaggaatatgctctctgatttctcagtagaatgctcagtttttagtaccgtaaatatagaccaatttaatatatacaccaccaccacctttagtgtgtgtgtgtggtgcatttcattatttgtagtgattttaaaatatttgtcaacaaactaattaatttaatttaatcataacattcataagttcattgctagtgataattaaacttcaacccacatataacacaacaaaaatgtgaaaaagtttgacaaaatttggtatattaacaagcattagtactcatctaattttagttaaaatcacttgatcaaaatatatatatatttatatatacctaccgttttcaacaaaagcttgtcatgtgaagtcttatcatcccaaatgagcaaaactacacgaaccccttcttgtgacttgaacttcaataactctccaagagtgagttctcctccagtaggtaatggctttgtaggctccctcacaagcttcacacgatgataaactgaccatccaacaatatatattaaatggtgagcctccaaaattgcatgacatatatcttcccaacatttcctgtgctgataaattgaaccatcatcaagtgaaatctctggtagcattccatcaggtacatgagcatcttgataaagagtcacatttccccctttgtgaagtggaaaataagtattaggaaccccagcatagtctggtccacctccaactccctccttatataaagggttatctctaactcctctaaattgaatagaaaggtgtaattcaggataaggcttacgacaattattcttattcctagaattaccaatgattggaaaccaatcattgattttatttcctgaaatgattttttccacagatatctccactactcctatatgttcagctcctacaacatcattgtctttaacatgaaattctactttggtagcagggtgagccacaggtacacaaaaatgctcatcccacaaaggattctcacagtttgatattactctagtttgaccaatagttgcacctgctaggcaaacagaaacataaggatcactcgtaatgattgaatggttggttgaacgcacctttggttttttcgaaaggggagaagaacaagatccaaacattgtgaaacatcgtctcattctttccgaagctaaatccatgtttggaagtgatttagcttctaaaatccaaaaatctagctcaccgtgcaagaatatgtgctcttttgaatctccattcttacttcccattctggatcgttaacacaaatatcagaaaaaccaaatatgtactgttttgtaacgcactaccaaacaaataaaatgtttgtataacttttgaaaggaaaatacaaaaatcttccctaagaggaaaattagaaaaataaccattgttccttaaatgtagaatacttggtttaaaacatgagaccaaataaaacagttagaggtttaagaataatgttcatgaaacaagatgccactttagtccttcttgtatataacatgatacacaatatgtaactaatttctttcctgcaactattttagaatctaaatagaaatcagaagcttccaaattaataggtctattctaaattatagcatttaataccactttaacaaacgatggcccgtaaaatgggaatcataattcatcagcatttactttccttgaaatcataatttttatcaaaaaaaaaaatgtagaagaagatttagaaacatcaatacaaattgaatttcttttgatacttcatcttttccaatggtttcattctcacagattagacaaggcttaatttttatataaaatgaacaataattgttaaataagatctcaagagacaaatgtatcataatctttgacacaattgttgccaagcgtatgttatctgttaaagaaatcatgcctcaaaagaaaaagtttgtagaaaaaatcaaatcaacattaaaatgttgatcaaattagtgtgttatgcttttgaggccatatagcatataccacacacaaaaaaaaaaaattgtagctacaaatagaataaatgcaactcaaaatacctgatgagatcgatttaaaagaaagttgaaggaggaaaaaaaaagcagaactgagaaacttttctataagaaaagagataaaatgttatcaaagaaaaataattggcgaataatgaggaaatctaatggaaaccttagactttttcatttatgtgtgccaagatttgcaaatggaacggtttaaacaaatacaataaatatgttctttcctattaaatgttttggcaattttataatacacaccctaaaaaaacaaatgctaaatggaatctataataaatataatataactagataacaaagctttatgctgatgattaatttgtttaaaataaaatgtatacattaattttattattgatgttgttattaatatttgtttatttcagaaaaaaataatattgtgcaacaaaataaaaattaaacgctaatatttaaacatatatatattatattattaactataaaaaataaataaatacttaaggatattaatatttaattacaaaatatgtatgctcaatagaatgaaatttatatttttattgaaaaataaaacatatgtttgaaaattgtgaaaattcatatttattagctttaaatattatattattttaactcgaagtattagacaatatattattattgacatatatttagtattttatcaaaatatattattttatgttttatcattctttagtgattttaatcacagttaaaataatactaaatttttttttttttttgacaaagtgattaaaatcact

SEQ ID NO: 300447 - DNA, 3231 bp, Cannabis indica
acataaaaatattgcataaaatacaattcaatataatacaatacactaccacctaatttccaaacgagcccttgtgtgtaaatatatcttaaaaaaaaaatagtatatattatgtaaattagtttgaacaaatttaaattccgaacttggagccccttttgcatgccaagttctctgccatcgccaatggcgtcttcctcgactgagccttctccttctccgccgaaagaagtacggaactggctagaattgccccgcgacgtgacagcgtcgattctttctcgtctgggtgcgatcgaaatcctgaagagtggtcagatggtttgcaagttgtggcttgatatttgtaaggaccctctcatgtggcgaatcattgatatacggaaaaatggcgatcctgatgatttccttgattttaggtcggacgtgcaaaagatctaccgctacattatcgaccggagttgtggccaaatagttgatatcagcatcgaggactttcgattcgaccaacagcttctgtacatcactgctaggtattttttttttttactccacttccatttttatcataatgaaaataagtgattaaactggttctaactgcaattgggtattgtgttttgatttgataatttcccctttttaaagagaatgtttttcatgattccttaatttgattttcaactatccaaattgatgttgctttttgggtaaatgcatacatgttgatatcgaaattgggtaattggtgtgattaaatttatcaatgaaaagaaattaatgttgccttttgggttattttcagcatttgggtcatgttttatgtttagtaatttgtagttagattggtcacaactttgattgaacatagtgccattgagattcttacattatttgattactttcattccctttacaacagttcaagacagatcaaacgccttcgattggcttcatgttcatttgtttccgataatgaattggttgaagctattgaaaagcttccattgttggaggagcttgatctaacacagacatacttcaaatcccttgaaagttgtatggaagcattggggcgatgttgccctcttttcaaaacattgaaactgaactcttttgttcataaagtatacgttaatccttcttatgggaaggattatagtaaacatgccattgccattggtaaatacttgccaggattacaccacctagagcttattggaagctggatgactaacattggcttagaagccattcttgatggttgtcctaaactcgagtcacttgacctgcgcggatgtttcaatattagattaaaagaaaatttggggagaaggtgtgctgagcagattaaacatgtaaagcttccttatgattcactcaagggcactgaatttatttctgatattggtgagacgttttcagaggaagattataatcttaactgttctcatcattttttctctatgggtaataattctgctgaacttgaagatgagaatggtgatgatgactctgattatgattttggatactcaagtgaggatgatttcttagacaatgatgactctatgtccatcaactatgattatgatgatttcttagactatgacgattttacagcctatgatgatgatgatgatgaagatgacgaagatgacgatgatgatactgatgatgatactgatgatactgatgatgatgacgatgatgatactgatgattatgatgatgatgattagaacaaagggctgttgtgtataggggaagaagaatccatgtttagctcttcattctagctagtatatctatttatttgtaatccatgctttcgaatgtggagtttggaatctactatagtaattgggaaaaacaatgttaaggcttgagggagtcgttttactttttgttttatcaacttaagatctacaaaactactcctttttctcatacgaaatgaagattggaattatcaatctattttggtttggtgtacatatgtttttattttcttttaactagagaatagagatgacattatgctataattacaagggtagtatcttaacaaaccagttagggggtgtttggtgtagtcgatggggtatggttatgggaaagtgtacacattttattgttctcttcaaaataagggtggaaaatgttagttttttgtggtcctacatagttttacatggttttaaaggagaaagcttaagctaaaccttttgcagagaaaagttttagatggagtgtttattggactacatattcatatttgatctaattttaaattggattgttagattttaccaatgtaattaattttagttatctaatcaatctaatatttattagatgcagtatatttattgatttaattttagtttattcaatggatttagtattttttttttttgatagaattaggttcatcccatatttatattttagatctagtggattggatcgtttaatcttaaaaaaaataaaattttaatgttaatttttatatatacatatatattttacgtataataatataaaattttaatactcatccaaattaaataaaaattcttattaatttgattggatgttttggatttttagacactacatccaactttcaatcatccaatccgatccatttggatattaaaaagtagcatttaatttgatttgattacaatttgatatccaatatttgacaatcaattgtaattagatcaattaattgtcattaaattagatcaatttagatcaagttatgtacacctctaattttaaatgctctactaagtaatctctatccacaactttccatacaattcaaagacctaaacaaacaccccatagtaattatatacgaactaatatagtataagattagttgtctaaaattgataattttgtattaactagtgtaataaactcttaattatctcctatttacctagtttgacaaatatgtcaatttaattcattttttcaaattacactcaaatttaatttcagctttccaattgcacataccataaattaaaatatatatcgtcatataaatatatgtatatagggatgcacacggggcaagaaattggcaaggagtgcttctcccgtccccatccccgttaaggattttaatccctatcctcgcttattctccatcggggatggggcgaagaatcccctaatgggggcgggaacgggacggggaatcccctaata

SEQ ID NO: 300448 - DNA, 2078 bp, Cannabis indica
aaaaaaaaaaaaagactttacaaagccctaaccaataaaattttcctctcaaagtgactttagaactgaattattggattgagaaattgctttgtatccttgtattgctaaactatgatatgctaaactagtcaatcatttctggtaatttatttactgtcgtgtatgtttgttcatttgaggtaattttgtttactgttgtgtatgtttgttaattagtttttgataaagggtttttttggttttatagatttattttttgtttgtgatttttgatgatgataatgatgatcatgattaatgtttatctgtttttgttttgggtattgaataatgactctttactgtatttattcgctgattttctagttctacattgttaatcaatacattgatttttttatgtaaatattttgattatttatctatttggggtttaataataagaatgggtttggtttgttgaaattttgattttgataatttgaagagttttaagagaaacctttttcttattgaatgagtttctattattgtaacttatatttttgcaacctgtttgttgggtaatataaggattttagtcttttttcttctttttttatataactataaaattttctgcttaatatgcttaaaagtttgtgttggagagaaagagtaaagtaatagacttgaataattcttgttttgggttgtttgtatatttttgttttaacattgttggattagttaattgtttttcttccatttttctttgctgagttagttggttgaatatttgtaaattttaatgttaatcttgatctttacatttgtgacagtgtttgtgcttatatttatattttattgtaattctcaagtaaaagatattgtagtaacttgttttagtatttagtccattttaatagttttttggaaatgttgtgttttggcaggggcgagagtcttatggtttttgggcttaattagaccctgagatgtgtgaacggtctaaacaagtgataccagggctacttaagaagatacaataattggagagtgaaatttcctccattacaacaacccatgaagaaccttcctatctcgtggacaaaattcatagcatgtcacaagctgaatcagttatacaaagctatggtcaaagcaatcataatgttcaagttatggagaataaaaatattagaagttgcataaaaccttttctattttgtattgtaatagtaatggtattgttatatttaaaatattaagttggagaattgatgagtgtttggggaaaaatagagcaatattttgtttagatagttgatgatattgtaatgatttgatttagtattatcagttatagttattgtagtagtaaactagtcttgttgtaagagtgaataattttgaatgaaataaagtactatttcaattataatttgttcttgaacttggaatctgtttgtatgatatcaccatcataagataaataaggtttacatcattctaatacatattaaaacaacatgtaaagtataattgacttgaacttatcttggaacaatatgtttgtatagaacctgtttgtatgatatcaccatcataagataaataagatttacatcatgattctaatacatattagaacaacatgtaaagtataattgacttgtaacctatctttgaacaacatgttgcaaaagtataattgttctaatacatattaggtcttgaaaagttttacaaaaaagcaacatgttgactatcataatctccttgaatgttacacaaaaactacctcaaatgatcaaaatactacatgattcagggatatacatcatgatctaacacatatcatcgtattagcttctaaaaagctttacaaaaaacaacttgtgtctcataatatgttatgactatcataatctccttgaaaactttacaaaaaactaacccaaacgatcaaaatgctacatgattcagggctatacatcaaaaacgtttgcacaattcataatcttttaagaagctgcagttgaggtccttgcttcaactgcactttccctagctttttgtctttcttttctttt

SEQ ID NO: 300449 - DNA, 2935 bp, Cannabis indica
acatcaaatcaatctttttgtttcaatttttgataaaaagaatatataaataaataatatactaattgcatcactatctttttattttactaaaaaaaaatatcttattattaaaataagttttttttaaactaattatcttatattttaaataacagaaaaattgtttcaaaagactttttttatctagtgaaataaattatttaaattttactcccttaaatttcgataataaaattttaaaagaaaaaagaaaaagaaaaaaaatactatatatatcacttaaaatttcatttaaacgtacagagaagagaagacagtgttgagaggtgtaaaagacaaaactacccattccttctatattctctgaagacataagcaaacgaacgaaatagtaatttcacttcgccctttaaatctgttaaacagagtcagttggcgcttttttttatttcagctctgttttcatagcgtcctcccatggcggtctcttcgaatactccttcgaccatcaacctcacattcagccatgaccggagcttcatcgcggcgtgtacggaaacaggagtgcaattattcagctgcgatcctttcagagccatagatttacgcgaagaagggggaatcagcaccgttgaatttctcttcggttccaacatttgggccctcgtcggcggggggacctccccggagttcgatcggaaaaaggtcaggttctgggaaaacgctaaaaactgctttataggcgagatatcctgccgctctgtaatcctgtccgtacgaatgcgaagggatttcatcttcgtcgtgttggagaatagaactctggtttacaattactccaatttgaaaatttattgccagattgagactgcggcaaatcctaaggggctttgtgccgcttcggtaggggatagtcctgctgtgatggtttgtcttggggtgttgattggggagattagagttgagcattattctataaggaagattaagttcatcgctgctcactcttctgaaattgcttgcttagggatcacgcgtgagggtagcttagtggccacggcaagcgtgaaagggactgtaattagggtcttcagaacaagagatgggacgctgttacaagaggtacctacctatatctatctctatatattttgagaaacataaaaccaccacataatatataacttgattatgatcagtttttaattagtttacgttaatgtaaagagctgacttgagtgaattataatatagttatggaggggtactgaaagagctacgatctatagtttggctttttcttcaccaattaaatggttggcagtctcaagtgacacgggtactgttcatattttcaaccttaacaaatgtactactactcaagtgcttcaacctcagccgttgcaaacatcatatacctcttcttctctgtcttttatcaaaggtatttgaaatttatttaatgtacattcaacagagactaattataatctatatactatatatgcacctttgattttgtttaatttcacgtgtgtttggctctactttgcaggtctagtaatgcccaattgtattagcttggataggtctttggctaagattcggttggtgaagggttctaaatacatcgctgatttcggtcacatgaaaaatacgatcatagttctgggcatggatggaaggtacgtaatgccaatgcaccattaattacaaatgataatatatattatataatataacattgcactttctgatttcatttatttacaagggagaaacgaattctggcttttctctatctagacctttaaattactgcaatatattgagtagctcaaataggagtacgcacaccatatgttaagttacatagtgaagcacgcgctatagctctagaaaagagcattgtgctaaaacgattcgataaaattaatacccattggcgttacgtaatgacatccctaatatatgacataaaatacgagattcactattttgaaaaatatatttgcccataatttaggtgggcacatatcagtaaacaccaatattaaatttctctactattgtttgttgtatgatactcaattctatcaagaaaagtactctcatgcatgcacctaagcaattcttactggttcttctctataaaattgattagaacataatattgtcattgatgacatttcttaagcgtacttcatcccaatcacaaacataaaatatattttgattgattgagtcaagattatgttaaaccaatttaactttaacacatcaactaattttttatttattaaaaaattaaacctttaactgatcagtcaacaagagtaattagcatatctaatataaattaatttagttgacgtatcaaatttaaattggtttaatataatatgggacactactagaaaatcttgattctatgttaggattcttatctaataactccttatttttctggttacttttttttagcattgcttttaggcaccagtggtgcctagtaccttctcgacatatcgcgttgtgattggctagcgatactccctaaaagttattgtattaaactatataagacccgatacttagttggaccgataacgatattgacacataggagggtgctaggcactactgatgcccgttagcttttttttttttttttcccatagttatagcctatagctccttttcaataaactctcctttatgttttcatttattaatttatttctgtatgaaatgcaaatttcaactaattaataaagatcttagatctaagtcgtgatagaacggtggaagaataaaacatgaatatttgatttccactagctatttaatattttactaggagattttggtaataattaggtgggcatctagccatctaaaattttattttttctttctctttcattttttt

SEQ ID NO: 300450 - DNA, 883 bp, Cannabis indica
aaaatacctcgggtgctttcctatcatcatctatattggttcttatagcttggaaggggtatagttcttcagtcgtgattccatgatccctgacgtaatcaagagcacgccaaactgaataccctttattacgattaattttccagctaaagtccacaaggtgttgtgcagagagatttaaatttctctctctgtagcgcattatgagttgaagcaaccaaatcagctgtgctgatagcccagcagcaatctacaatatcattgagaaaatttaattacactactactgaacactaaaattactttattaatatataaatgggcaataatgcctttttcttcctagtttatttatttgttttgtaaaatatataattataactatcaacaattatgaaattaagtaaaattaaacatgcatattctgattcattattaatccaacctaataacaacataaatacttttccaattttatgttcctatatataatagtaaaaaattaaaataataatttagtaataaaaaaaagaaaagaaaagaaaaattacttactcagatcatctccttgatgttttactggaggtaaaatgttcctggtcctccaatcaaattgtatattatcctccctcccaataataaccatatttctgtaatttatatatatataaaatacacagagagaaacaaaattaatttcacaaataacctttcattgttctaaaataaaatcaataaggttaatagagaaataatttcagagttaacagtgtgagcatccaaattgcaaacaaaacccatttcaacaaacagcaaaggaaatgaaaatagctcaataagaaaatgatggattttacaaatgaaattacaaatatatcctcta

SEQ ID NO: 300451 - DNA, 5809 bp, Cannabis indica
aactcaataaatatatatatatatatatatatatatattactctgtggtcaagaatattttctactgtttttttatttatacataaactatatttataaatataaatactatgtaatatatccccactagcttatatatatataaatgtcccggcccctttaaattaatcaaagatgtgactatctttttgtcctcatatatatacgtgtgactagatcctctaatgatcacacgagttattattattatgagaaagtgaccatattatattatattttggaatacccatatataatatatagcatattaattagtcatgaataaaataagaagaaaaaacaaagactatgagtataccataaaaagtaaatggcttttactcagatgggaaaaaaaggcttattggttttctatcttattaattggtttaagtttcatgcgtgcacccaccatatatattggtgtcatatgcagtgtgtgtacattaatagatgtatgtttcttcaaattaagtaggatatatacgtatattgtataattagttgtggaagaaagttaaacacaaataacgagagaatttttgggtttcacaaatgcagggtttggcctcactatcactatcatcgtacttgttcttactcaagcctaaagggtgcggtaataatgaagaaactttatgtggaccccattcaacagttggaatggctttgttctacgtttccatatatatgatagccttaggaaacggagggtaccaacccaacatagccacctttggagctgaccaatttgatgaggaagaccctaaagaaggccactcaaagattgctttcttcagttacttttacttggctttgaaccttggttccctcttttcaaacacaatcttgggttattttgaggataagggactatgggcattgggattttgggcctctactgggtctgctactttagccttggtcttgtttctttgtggtaccccaagatataggcattacactcccaagggcaaccctctttctagggtttgccaagttttgattgctgcggctagaaaatggaaggttaagatgttgccaagtggagagaatctatttgaggaagttacaaataaggactcctctcaaaatggtgctcgaaacattttacacaccgatggtttcaagtaagtctataataaatatgttacaattctaatttatatattgatcatgtaacaataataataattaatgcatagtactaataatttatgttttccttcagatttttggatagggcagcaatcattacagagaaagacctcaaccgaattgagagcaatgctcctcaaaccaatccatggcatctttgcactgtgacacaagtagaggaagttaaatgcatactgagactactccccatttggctatgcacaattctctattccgttgtcttcacacaaatggcctcactctttgttgagcaaggcgcggctatgaaaacaacactctccaacttccacatccctccggcgagcatgtcaagctttgacatcctcagtgtcgccgccttcattttcctgtaccgacgagtcattgatcctcttgcctctcggttcatgaaaaaccctaaaggactcaccgaactccaaagaatgggaataggacttgtgatagccataatggcaatggtttcagctggaattgtggagtgttttaggttgaagtatgcagtaggtggtactagaggatcatcaagccctagttcactaagcatattttggcaagttcctcaatatattcttgtaggagcttcagaagtttttatgtatgtagggcaactagagttctttaatagtcaagctcctgataggttgaagagctttggaagtgcactttgcatgacatctatttcacttggaaactatgtgagtagcttattggtcactattgtcatgaaaatctctactagagataaaatgcctggctggatacctggaaatctcaacaagggtcatttggataggttttactttctcttggcggctttgaccgctgctgatcttgtggtctacattttgtgtgcaaaatggtataagtatacgaaatttgaaggaagaaatggagaagagaatccaaatagtactactatgcttgccactgaacttagagtggtctgatcttgatcgaataatgggggtaaatctatccatgatatttgtaagataaataagtgaaggatggatgttgttgttgggaacttggagggacgtgatggagtgtgtgtaaagagtacatgttagctatgaagctctagagacttaatgggattttagttccatctctcaaagtggagcatatacattgctacggagcatacattgctacctcgtgtgctagatttatatggagatgagccacattcaattttactatgcattatgatttatgttgatgtatgtaactatagcttccatttttgtttcttatttatttgatcaaagatgtaaacctctctcttaattctataagtaattaataaagacaattattagtcatcatcacttcatttctatatttttttgtgagagtgatttgactgtgatgagaacaatgggacggaaggacatctagtagttaaagatatataaaattagaatatgaatttctaaaaacaaagcaacttatataagactaaattatcctaaaaatttagacaaatataacttgagaccacctcaaagaggatagtcaatataacatatgcaccataaataaataaaatttgagagtttaatcaaacataattaatcaaagcccaactgaaaaattaacaaaaaaaaaatacataaaaaattcaattagctaccaaataaatgataagataacagtaatataaaatattagaaagaaaatccttaaaatttattaaagtaaaaaaacaattaagattcaaacttatctctaaaaatctgtaacaacactttttaagattggatccatgagtaagcagttaagtcaacaaaatatcgcaaattagccaatgcggcacaaactagccaaaaaaatacggcaccaacttgtcaacaaagtagtaaaataaaatcaaatatacaacataaaataatcacaaacaaaaggaacactccatttattttaatatacaaaatgaatttaattgaagagagaaaaattaaaatttaaagttgactaagcaagccaaaaaaaataccacataaaaaaaatgttaatagtaatcctaaaattaggaatgaaaaaaatcaataattgtttactggatttttagccaaccgacgtggagttgtaataaatgagatttaccaaaatcgtaaaaataaatgtaactaacgataccggaatgcgcaataaatgtaaagaaagacaccagaatctaaagaggttcgaccccagatttcggtaataacctactccccttatgttttttaatcagagttgcaaaagtcaagaacagactcttaaatgcaaagaataaaaagtattttttctctaagtgctcaaaatcacggatctcctttccaagtcatgggtgaccccttatatagaaaaaagtcggtgcttctcgcttcaagagacgcaaccaacgcggagctatctcaaccgtctcgttgatttttggaggtagttgaagtttaatttttatgataatatcctgctatttttgtgtgggttgaaaactgtctttgagcttttcgtgggatttgaacgtatgaaatagtcactaacgatgagggtctcttaagggtgtgacacggtcgttgaccacctttggggatagaagccaatacttgggggtgacacccccgagacccaacctgaagagggtgataattttcatctcggggtgaccccctgagaccccttgtacgttgttagtagtcatactatcgtgtggatatgtccccatatatacctttaagaatgccattatgtctatggtgggagtagtgtcatctaccccttagactaacttggcctataggtccgtggtgattgttcaccccactttatgaaggtgttagttcatcatttttccttcttagaaacacccaccttactcaagctaggggtaagggtgaccgactgacttccattctaatggttatgaacactcttcatgattaacaattaccccaagggtcatgactttatatgttcttcattaatttagccccagtagtttcgtgtcacgtgtttttactcttgacacgtcatcgtcgctaaaatttaggtaaacacttgcctccaagtttctagtggtatgaccatatggtaggaacttttctatgcaatgggtctcgctttagttgttgacgacttggcgctccagcgccaaaaatactttacttatactaaaattaccttccaaaaacccaaaaaatacttttcccaaccattacacttttcacattttacaatatatcgcaattataatttttccaagaaaaataaattacaaggaagaaagaaattatttacaagggaataacttacataaaaaaataaataaattgccttttagccccaaatggtagtgggggtttataatagcaattttgaggtaattggtccctttttttttgcaaaaaaagccttatatagatgaagagtaaaaacctttgaaaatcataacattagaaaaattgcaaattttttcgctcttgactaccatttcgggttgggcatatccttcaccattggaggagattttgaagctcttgattgattctttgaagcttggtgtatcatctcttcattgtgggtaagttttcaacactcctatggcaattttttgcatgaaaatcatatttttgtgatatttttgaaacgttttcttgacttttcttgctatggccgaaaatgatatgggtgattgggattttttttatgaaatatgagtgttcgatgcttgggttttgtagtatagatggtgggtaatgtgcttttggctttgatttggtgtaatttggtgaaaaaatgatcaattttgaaaattttggttgtttgtgttcttgaatattgaagaacaccaaaaacattaaataatccaatgttttctctattttttaaattttcattctcattgaattgaaaaaatgtgtttgtggggatgttgcatgttttggaaaaaatacttgatgattatgctttgtgtgtgggttgtggattttgggttaccatgcatccccacaccctgagatacccccattgggggtcggggtacgtaccccgtgtatgggtgttactccatgccctgagtatggggctattaccccgagcataggggtcagggtataccccgaagaaagtttttttttattattttaaccgcgaatagacaagagttgggggtggtcaccccgagaccaccacttggtggtcggggtatacctccccaaggcttgaaggcctccgatgtcacatgccctcaaactcaccccgaggctatgtcccccgagctcggggtgttactctcgagaggggaatcgcggttggaaccccaagatggggctttgagcttcgctaccccgagattgggaacccactcccagatggggttacttaatggtaaggtgtacactaacaccatacaccccgagaccatacaccccgagctacccactcccctttttttacaatcacctcgaggctacaataccctgagatgggggaatgttggggtaccccaaggttgatttgatttgatatttatttatttaagatatgggattggctgagattggaggtttgacctattgggttttgtgctctaaataaaacccat

SEQ ID NO: 300452 - DNA, 6818 bp, Cannabis indica
ttttgattctcaattaaaaaattaaaaagtaaaaatagttttatagaacatatttttgaaaaatattttcactttttcaattttaaaaacaaaaaactaataaaaaaaatgttaccaaacgacaccctaatttttacaaagccatccccgtctgagctccgactccgagtacccaacctcactcacccctccctttctcttctcttctcttcatcttctccgttctcagtcgcacggcgcacccgcaatcaaccccacgaggcccacgacacgagccaccccacccccttctcttctcttctccgtttgcctctccttcttctcttcgtcgggtcggagtcccaccagtagtcacccgttgtcgtcgtcgaccggagcccgaccttcgactaccaccaccacaaccacacgcactactcagcaactggtattttcttaaaaaattatttttagtttaaacagatagaaaatatatatattatatgataaagaaaaaataaaaataatatataattatatgtacggttttttaaaaaaaaatatattatgtttttatttttttacatgcaaatattattaaaattattagaattagtagttagattagagttaaatttgtgtatttttttttggttaaattctatctgaaatactacatttttaacagattatgttattattggaaagttgtgattataatttattttatgtgtttgtgtgtaacagtggtggcagtttgatacttaattatttgttgctcggtgtattaaaaaattaaaattatttataaattattagaggagtttgaatatcttacgtattcatccatagtgaagtaagttatgtgattaactgtacttgtactgagtgaaagtagaaatgtatgttagaggtgtttgaatattttatatatttgttcgtagtgaagtaggttctgtgattaactgtactacagtgattggttggattactatttttatatattaaatatatattgtattgttatttgtttatttttcagatttaaaaaatggtcgatatagaagatactaatgaatttggatcatcaccatctgccaatgacaacgagaatgaaacaagggacaagaaaaggatgaagaaatcaagaacaaggaaaaaatctcctgaaggaagaaaaacatcacatgtttggaatcactttgaaaagttatctaaagatgagaatgaaactcctaggtgtgagtgcatttactgcggcaatgagttctcttgtcctactagcaacgagacgactcaattaaacaattactatcgaaaatcttgtaggcaaagctcgtgtaggaataatgaaagtaagcagaaggtattaagtttcgagacgcttaaagaaggagaaaaaagtttagttgcagttgcttacaacaaagaagcatgtagagttattgtggcaaggtatattgcagttgatgagttgccttttcgacacgtcgagggagtaggttttaaagaatttgttcgaaccttgcaacctagatttgaaatcccttctagaattactattgcaagggatgttctcaagaatttttgtgaagaaaaggagaagttgaagaataatttgaaacatcaaagggtgtccatcaccactgacacatggacatcaattcagaacttgaattatatggtgataatggcacattgggtcgatgatgatttcaactatcaaaaaagaattatcacattttgtatagtgaaagatcacaagggagatacaattgcgaaacacattcatgagtctttggatgaatggggcattactaaattatttgcaatcacaattgacaatgcttcttcgactgatgttgttattcgtagcttgcgacagaagtacagtgaaatggccaatggtctcatattaaatgggaaatttttacacatgagatgttgtgctcacatcatcaatttgattgttgttgaaagtctaaaagaaaatagtcattcaattttagctataagaaatgccgtgagatatgtgaggtcttcccctgccaggttgaaaatgtttaaagagcaagttgagaaggctaatattgaatgcaagggactcttgaaattagatgtcccaacaaggtagaattctacttttcttatgcttaagactgctttaaaattcaaggatgctttcaagagtttgttgaaagatttgaactacagggcttattttgatgaggttgacaaagatggaaacaagaaagacgggccgcctattgaattagattgggagaatgcaaaggtctttgtacaattcttgggagctttccacgaagtcattgtgaagtttagtgactcaatatatgtcacttcaaaaagtatttcattacgattagtggaatacaacaacatttatataagttgtctcttgcagaaaacgaagacctattagtgagcatggctaagaacataggagaagtatgataagtattggaaaagtattgataaatgtaacgaagtattcttgattgccttagtactagatccaagatacaagttgaattatttcaactattacttccgtaaattgcatggcccaatcaagtccaagttgatggtgaataagattgaaatgactcttagaacattgtttgaggtgtatggtggtgggaatgagcaatcacaattacaactatcagttccactgagccaaggtcaagacactagtactactactacaaatgcatcggattttttctcatttctttgggatgacattcaagatgagtttgtgcaagcaaggatcaagcaaaatggtgaagtgacaaaaaatgaattggataagtacttttctgatgatactgaaccttttaaaatgggtcagattgaccactttgatatattgaaatggtggtgtgtaaattcatccaaatacccgaccttgtcaaaaattgctcgtgacgtcttagctgttccagcttctacattgcttctgaggcggctttctccattggagggcgtattttagatcattttaagagctcattgaatccgacatatgtggaagctttgatatgtctgaaaaattggtggagccaatctcatcaacctatcattgttcgtgaatatgaggatgaagaagaaggtctaccgacaatagaggaccttgcaattggtatgattatgatatactttataattttatattttatgtatattgcaattattaaatttaatttaatcatattaatatttgtattaatagctttgttattgaaaatatagatgatactactactaccaccgctactgctacacccactacctcaggcgattctagttcattaatgcagtcaacttcagttagaggatcttaatagtaataagtattgattaagtaaatatgtttaatttcatatgtaaatattttttttaaaacatattatcttaagattttatttctttgattgttaattaagaaagatgcagaactttggagtatggatgatgcaatgacagaaaaagagagtaaccaaagccaagtcatctaacaactttcaagtttcaactttaggaacccaagccattatgtaatatctttatctttatatatataacgtgtaacagaatttttagtttaacgttttattcttctctttgtaaaagttaacgccaagttaacccctccgctaactctaaaaaatatacataaacaatgaatacttattaaaacttaatctcagcgttctcatcttaatttctatctctcattcacgatatttaattttattctaatggcgattgtgcattattctttctctttccatgcgattctcaagagaatttacttaggtttttgggtttgattgaatttgataaatctattcagaaactcaaactttttattggagattatgaaatctttttaatttcatggctatgtatcaattgcccttcattcttatttattgtttgagtatctttttattttgttttaaaaataactatatgtctataataattatctccattaattttttcatctctattctcagtttataaaacttaagtcctaaatttattttcattttcatctcaatcttaacacttttcactatccatggatcttaaactagttaatcttgtttctttcgatttgtcgaaaaaagagttacctcatcgatcactgccatctttttctcgtcgaacgcccgcctcatcaagattttcaagtctttgaaacaatagcatcgaatatcatcaagtaaagttttgataaccaaaatagtttgattttgaattggtattaatttttcatcttctctggctccttctaatcccatatgcaaacactaactggtgagagaatatagagattatgtattaccttttgttcattagtctctaattatttcatggatattgtggccaacttattagttttagttatagatttttattgtatatacagtatagagtaatttgtggcataatgattgtaaataaatatttaagtttaatttttgatagtaataatacttaagttacgttttcggaactttcataagtatttggccattaaattaagtgtcaagttaatgatcacgtgcaattcatgattagttcatatcattaaatttttatttaaaaattaatttaaataaacggctttcttagctacactaaatttgagagaaggtgttagataagcttaaattagttagaccttttattttattttattttaaaactataaacaatattttcctataataaattaattttatattttcatttgaaaatttgtattaaatattttttaatagcacaatcttcatttaatcaaattatatataattaatgaaatatataataaaaataatttattaaataatctcaataaaatcaaacatatatataattaagtatacataacttctgtctaatttatttattttataaatgcttatatgtatattaaatttataaatttttttttttggaaactaacgctcattaataaaaaaaagttggacctcatgatcattacaaataatattaactagaataattgacacctcaaccataccagttaaatttaggtatacacaccttagcgacattgtgagccgcaaaattacaaaatctaaaaataaaagaaaaattacaactcaaaaaataattaaagagtctattccactgcagtatatagttatcaatactccaagtgaagcaagtcccttacaacgccttcatatcttaaagttgctcttaattaaaataaaatagtgcttccactcagctgccgtctctagagctagctggcaagctgcaacttcatcaataagagaatcgtagaaagcgagcatgctggtagcaacctcaaaaagctttccaagttatatcgagttaacactgcaacatacatcaactcattccccattttaacgtcacaattaatcttgatcgagttttctgatggaggggaccaaaggggagcaacgccagtagcaagaggagagaataaagaggacccataagcattttttagtttagacattgatattgactatgagataatatgaatatactaatatgtactatgtatgagttatggagtatgaattatgagtatggagtaggggtatgtagaaagtcatcccattgaattataaccaactaatttaatcctaaccgatttaattaaattggatatctaatcataattggatcaaatcggatgtaaattttaaaaatccaatcagatcggaccagttgttggatgggacatccgatccaatagataattgagccgatcaaattattatccaattatatttatatattttcaaaatacatttataattttatatatttaatatattttattttaaaaaaatattaattaattaatatatatttaacacatgaaattaacgaaaaaaatcttaaatctaaaatattatttttcatcttctaaacgctaataaaattgtcaatgcacattggataagttttatttttttgcgattttattatgggatcatgaaaattaggttagactagattaatatttattatgtatgttggattattaggttttaaattatatttcatatgtatatacatatatttctttttaataaaattaacttaaatggtagctataatagattggatggatccaattcaatccaaaaagccagttagtgcatccaatggttggaacaaattcaatccaatacatccactggatcagataaaatcggatgactcaattcgattagattagatcgcatggaaaaattcaatatccactaaaaaattggattggatcagttgggtcaaagttcattagatgtgatccaaatgaacatgtagagtatgtatttttaatttttattcacattttattttgagactctttagtttttattatcacgaacatgaagtttaatgaataacttttggtaattatttgattttagattgatttttgtactttagatttgaaattaaaattttttttcttctaaaacatatagattaaggtgttatatttaatttcataaataaacaaagtagaaaaaaataaccatataaaatttgggtttaagaaaaaagagctagtcaactcatgaatccagtcaattcgtctgttactattttttaaactcgaaattcagtcaattcgtctgatgttcaatcttaattattgacactttttattctaaaatgcttcaattaatagtaacactataaaaattattaaaataatattatgttattatttaatatatattaaataattaattttttttactttatgaaaaaataataaaaaaaaa

SEQ ID NO: 300453 - DNA, 1376 bp, Cannabis indica
tatatatagtgtatatatattgtatattatgttgttgtaacatttatttaatctctttgttggtccttgtattgtattacaatagagttgtaatattttgattttcttccattgttataaaatctctaacacactgtgcagtgaccagtgagtgacatcttttagttatgggacaccattgttatgtgtccccctaaaccaatgcagtgggagttgatttgattctcccagttgctgttttggtcaattatacatcatcacaaatatcatttttcttttctatgcgcagtggaggagaaggagccctttcaagccagcgctcgccaagataaaaaaacgctaccaggaggaaattagtggatacaagaacgctcaaccaatgaaggtagactcgggcaatatattagacacagagtagaatccaccaccctcccctaccttttgatcattcggttttttgttgtgaatgcgagcattttaccaaccaaccaacctcaagatcattcattgctgatatcttttcccaaagggaaaacaaaaaacagagattacaatgacactttgtgcataaaaagagattgaaagatcaataatgttttcaaacctcgtatgcttgtctattattgcctatgctattctttcaatttaattaaaaaggaaatacttgtaacacattttaatgaaaggtgtagttttcctcaaggttgtgttgctaaattttggccttattttttgtcttttgtctcctcctaaagaagcaaaagctgtggctcttttttaccttgtagtgctctttgcactttggtttattcgtttctttctttgagagtgatgcagtgattgttctcaactctgtcctatcccctcataggatgtttctcataccattgagtatagacttctatagaatgatagaaacatataacactaattcatatactcaaaattaattttaatatttttctcaacgttggcttttttcacttagctttgtaagttgtgctatagagattgatttttaccataaaatttttgcttgatatatcttctaattggtaattttgagctaatggtaatatttttattatctatcctaataggaaaagagctgaggaaaaaatttaaaaagacattaagaattataaaattttattatctaaatagggttgtattcttgagtgtattttcttagaacttttggatttttttgaatgtatgtaatgtaaaatgataagggctatttacaaaagtattggaaaatgaagataagttttgatatatatggcataaatatttaattacattaaatatgacattttttttaaaaaaaaaaagcttacaaatatgggaaaaagtcatgagggatgccataaaaa

SEQ ID NO: 300454 - DNA, 1213 bp, Cannabis indica
ttattttggtctaaaatggaagagaaaagttgagtttctcttgggttcttgcttggccgaactaagggagaagagaagagaagaggagctttgcttctattttgacttttatgcaaaacttatctaattaaacatattaatccactaactactcagcaagcacaaggtttttctctacgcaaatcacaaaaagacaaaaactattaaacataggcaaaagttaattttgtcccttacttaaccatgaagtaatttagccacttagggtaaactggttcaaaattataatcccaaataatcccgatattacaaatgtttaactatcatgccctactaattctaagatactcaatcgcatctagtgaccctaatggccaaaatgttaactttctactgttgtcgggcataaaatttacaattcacgaaaattcacatataacacatatactgcacctagcatttaaatatatctccgtaattgagaaactatattcatatggcctatttctgacaataaaccctatttctactaagaagcacataatcataaattaataattaaatccttgattatctactgattctcatgatttaactacgcggtcttacagtcacgtatttaccccattagtgggtcaggtttacatgcaaagcctagtgggtcacaaatacactcgaacccgattactagcctatatatacaaccttataccctcatgcaaagcgttgaaaaattattgtataaatactatagcaagaagccatgattcttaagcttgcaataatcctattatgatatatcaaggctatttagccaaatacgattgactcgtggactagggttcattaatactcaaaccacgtaagaatctctaattctactatctattagtttatttagtctctcaactcttattttaatcagttttcgaaaatctcaataaatacacatatatataatacaaatatgttatagtataagagcaactccaatagtactgcttttaaagaatgcttaatgacatgaatatatttttgacatcttttaatagatgcttatcactcgagtaaaaagaagggaaattttcaaaaatactatttttgttactttttatttacacttttactgctttatttatttacaaaaatatgcctataaagttttaaaattaccaaaatacactttgttaagcaaaaagtaaaaaaaaaataa

SEQ ID NO: 300455 - DNA, 2631 bp, Cannabis indica
aactacaatatattactaaaaagattaagaaattagaaagtttgtgtcttttttaattaatatatatttgcggattgaattggatcgtgcggattgaattggatccttacacccctaattcaaacataataattagtgaaaattagtaatacagagcacacataataagtaatacagatttcagaggatacatacctaattctttgctccagttctttattaccctagaatatgacatatcactagtaaaatttagtaccgatggtacttttagcatttctcttttaattttttttaaataatttacaaaacactgtttatcacaactacttttttgcgatggtaatattaacaattatatgttttctttttttttttttcttttcttttcttttttaaaacgtatttgaactctatttacgcaagagaatcttgaacaaccagcaacattatagttcattcatacactatagccaagttctttcagtcagcaattatgcttcagccatagttcaaaaaaagaaagaaaaagaaaacaattcttcagaggacacttatgatgaaatccagaactctaataacattttccaaaatcaatagatattagatgacatgattcacttttatcaattctggaaaacacaaacacacaaatctgataatcacaattcagtagcaaaaataaagacaaacagataaatgaagtaaaaatacaagaagggcataataagtactcattagctttactcaaatgggacaaatttaacacattgcccttggccatgttggccataaccttatcgaagacacaagttcaattatgaattttgggttttgaagaacaccccaaagatcgatatctaaattactgacagtacacaacatcacaagaccaatattatccaattccagagatgcaattttatgcttcattgatagaaaataaatcaaagttaacaaattctacaagtttcaaatcagataagctaatgctctcaaagtccaaaaccaaaaaccgctcgtatcttgtgaaatatgagatccctccatcctctttctgtattctccaccacagtcgcattcccatatctgttcaacaacaaagaaagttaagctaagtttctgacaaaaaaaaaaattggtaacatgaaaaattgttaggaatatgaccaaaaccaacctgtcttcctctgggatatcagtatgtgttagcttaactacagtaactccaggttcagtctcatccaaagtcaatctcacctgcaaattaaataaaaatcaaacaaattcagtcttttaacaagtgacataactaatccaccaatctaaattcaaacccaacaacaattttcagaaaggtacatatatttaccgttgaatgaatcccatcgggccagctcccaaatcgccatttctgaacaatcaacttcccttcttgcaattccaaattggtaccagtcacagacccatcaaagatgctaaattcaccaccaacctctttgttaatcttagcattactactagtaaatcccttccacctattctcatccatcaatatctcaaacatatcccttgctctacaactaaatttctcagtcaaagaaatggtcttaaaccctttcttgctcttcttaacctctttcttctccacagcagactcttgcttagctgccacagactctttcttggctgccacaggagccggagccggagctgcggtcgtcccactactcttgggcaccaactttttgttctccaattcatccttggcaggcccacctttcgacatactctgcacataaaccctaaccttttcaagaatcaaaggcttccctttagccacaatggcctccttcaacctcttcccaacgggtccctcatctttcacagaaaccctcaattcagggtcctcatcggcattctcatcggctatataaggaatatccacaactccttccaccttgagcaaagatttcccatctgcgtctttggcctcgccctcccaagggatcgaaacgctgatttcgtacccgggtataatcttcccctttcgaatattgacgtaagcctcgccatcgaccttgtcaacttttttggtcttaagagatttccctcgccgtcgaggatggtgagattggagagaagattagtgagaaagtttcggctccattcgaggcaattggtctcggccaagtgccacgtatggacgtaagcgccgtctcgtctgtcttcgacaatccatcgcttgtcgccctctccgtacttggccatttaatataactatgtttgagatcagagaaagagaatatgggttttcagagataaaggaaaagtctttaaaggcgaatgtttgcgtccagaccagagagaatgagatgagaaagagcgagaaattagggtttgaaaaaggaagaaggagatgggtctggagacttctgcctatgaagtatgaaagaaatggaagggtctagattttgggattaccagttccgttatagaaagatctagaacttatgtgtgtgaaaatttggacttggggattagggtttatgtggatctactagggtttgtttgttgggtttattttataaatatggcttttttgtaagtggtttagaaatatatggagaa

SEQ ID NO: 300456 - DNA, 2207 bp, Cannabis indica
aaatataagattttaatctagtatttgcatactaatttcctcaaagtcatcatcatctaatgccgacaagaacatttcgtctaagcaagaaagctcggttccattgtcatcatcctcatactggacactcttcagagaaatatcctccatcttcctttcgtggactcgacatagaacccatttaaagtcctgtattataacaccaaatataagcaaaacaaaacaaacaataatgcccagggtgatatatataataaaaactaattttatagcaatagtaatcccatgatacaaaatgactaattaaattgttaattaattagctgatcagaaaaaactcactagtttttgtttccttcgccttttataagttggacaaatagtagtactcatcaattcaagattgttgcaaaggttgtactcttccatgacccaattggtttcagtggctgaagttggagactggtggtagccatggttagtgacatagtacacataatacttcttcacaccaactttgttattagctccagaaacaaatatgggctcattcatgtccatttctttccaatacccatttgaggtcactttaccttctgtcgttttgctgaagaaataatagtgcatgttttcgctggacaatgccgtacctaacgaatcatgacccaattaatacaaatttagctattatgctgtaactcaatcattgcataaatatattatatcattattatatttacaactacaagtaattgctaggaacaaggatagagttagatttagtaccagtaaattcccaaggttgatgaaggcgaagatcaacataaggaatgatattgggatgagcagatggtaaggcaaaaaccttagggtaaagaaactgaaggatcagctcttcatctgttgggcaaaaccgaaatccaggaggtagctttacactctgattatctcccattttttttggttctaattaattaaggtaaggggaaatattaccaatagagaagccaaactctacagtaatatattataatatattagttatatgtttagtgtgacgatcgagttcagatatactttgcttagatattcatctatatatatatggtgctgagagatagagaaagagagattgcttaaaatgttttaaattcaagagttgaattgagtagagttgtggtgatgaaaaaaaaggtgtgaggtgtacaaaaacaaatgatccatattggtatactctagtaaaggataagccgacattttgtaccaattaattatgaaaagaaagctatatatgtatacatatcatcggagattatattctacagtttataatttatattacatatatgatgctaattaaaatattcaactaagaattataattaaccacataaccctacacgccaccgtccacacattcaaaaaagatagaggggtatagcacatatgggagacacagaagacatgattgaacgtaagttctgttcttaaacaaaaatgaaatttcataaagttttatatattagctaactctcatgcatgcccataccaagaaattaaatacaaattatatgcatggcttcaaaatataaaatatgtcaaatttaagcataatttcaaaatatataaaaatagccataaatttctatttcatttttccttataaaaaagaataatctaatatttaaaaaatatatatttatatagtatgaaatatttatatgttaaatctaaaaagtattagaaaatttatatttccatcataaaatctatatatatatatacccaaaaatttataaagagactctaatcattttattttatataaaatatatatttttagtttgtactattttcttttttcttttcatattcttaaatatataactataaaatatatttcaaatattatgaaaaaagaattatttgaaaattaatatatataatttaaaaaaatatatgaaaaataattattcaaattaacttcaactaatgtgagaaggaaatttaaaaacatattgggaatgattttttgaaattaattaatatttttattttttttaatattaaagtctattcataaattatttatcaagtgcaaatgagatttccttattaaaatttaattccatttacataccctgtctctttccttttatattttgttgaaattaattataaattattattcttatattgtaactaaa

SEQ ID NO: 300457 - DNA, 5736 bp, Cannabis indica
catctactttatattattttatattattttataacaatataatatatatggattattttttaatggatattacttatcgttgatcagagattttttctatgaacaatacaaatcggaatttgaagaaggggaaggaggagtcctcgacccgcagcgaatagaggaggatttatttaatcacattgtttgtgctcctataatagggcgcccttggatttttcgatacaatcaagtagaaagccccaatgaattgggattttcctagaatgaatttttttaaaaaaatagttgtaactaaatatcaatttaaaaaatattaacttctaaaaataaagttttaatccaatgatccataatttaagaaatcttagaatttttgtgctcaattttactacttaatttaaaaaaaatctctctaattatactatataaaaatatatatttttatacatcttcctaactcaaactcaactttttttttaatcttttctcaggtttcgatagaactaacctttttttttatttatttaagtgtttatatattacaaccatgcataacttgggactcgaactcaagtccaacacacacacactctcctatgaccacttgagctagcctcaaataatttccgatggaacaacttcaaccatatggcatataatacaaaatgaaagatttctattacataacaaaattaactatagaaattcaaattaagcacttttatcttcccattttttgtattggataattgtccactttgtcaaacccaaaaacaaaaaaagtcttccaaaaatgaaaaaaaaaattaaatattttatatagagcaaaatgaagaatgaaacgtaccaattcaacaaagtagactaagcacaccgttgacatattaattaataataagtttgacattgtaaaatccacaaaacattacaataccaagtcacaatataaataataatcaaatattgaaatcaaaataacaaaatgtcataaaaaaaaacaacttaccaatttcttatttttaaagaaacttcttctcacgcgcttttcatatttgtataaaatctattgaaaccaaaggctgtctttctcacacctgtcatttctttccttcaagaaaagtatttttttgttctttcaagaaaaaatatcaaagccagaaactcttaaaatcaattaggagataatatatagaattagaaatgtgtcctttgagatttctcttggtgtttttttctgcagttttagctgcatattttgcatggaaaacaactcattcttcatcttcttcttcttcacaaaatcttggttatgaagatttgacaaatgaaaaaaattcttcacccaaagaaggacaagaaacaagtttcaaaagggtatgttttgttttaattattttttatgtttttatgttcttaaatatgaattttgtattgaattatattggttcccatttcagatggtggggaatagtttctgggtttttgttgatatggctagtggaagatatttgtggaggaatatgaaggagatgaagaattcagaggagaaagatacaaagatagtttcgtaaataacaaagattattttttttattctataatattcaaatttgttaaatgtaatatagttttgaaattgagaaatatgttaacacaaaattagttggattaaacctttgtagtgaaaaagcactttcttttatcttcttaagaaggtggaatgagcaaaatgtaattgaattaaatcatacaatttcattggtttcaagtttttctcttttatttttatgtacattttcacaaaatcatacattcatattttatccattaatgccttaaacaaaagaaaaaatatatagacacaaacaaaaatccattgggtggttcggtaaacacctctatttgttttggcattaaaagagagttttttagtgtaattttttttataactatttaggattatttataaattttcaaaaaatttaaataatatacagtgcggaaaaataaagttgaaaccattatttaccaagtgtataaaaaaaacaatcacgcatgcaataaaatatttaaattttatttttggcattgtaaactctttaaaaatttctaaatcaaaaaccatatggtgagtcacaactagctatagaaaatttggagatcagactaaaataaaatttgaaatttgaacacatcatattcatttttttcattatataacaggtctgaacaagataatgatgattgaatttgatacctatttgtatcaaagcagaataaacaatggtttatcttagatcagcttgtaatttaatagacatgtacagaagagttagaagagcaccttgcggtagcggtgcataccttgcgagattggagccaacccacattgctgccacaaccagagcaaccatgctgctgctcgtttttccacaagcccaacttgcgaacgacagagacaaagtgagcaaaatgccacctttccctcccaaagcccaagcaatgacatacccgattttgtatcccgcgtcaagcttcttatcccataaggccatcaagctactgaaggtgagagatagtttagatccaaaagtatgcaataagaaaagggagataaatgcagatctcaggacttcaataaaggggcctcttttgtgtattgaactactttcgtcgtctgatactccatttgtttcattaaaggaagagcttttctcttgccaatatctctcacgttggattctctgtcgcatttcatcccatctattgacccttacttcactgtcgaattcggagctatagttcctttgccttctatattgtctactggtatgttctctaaatttaagggttctgtcatactgaattcttgttacttcatttgatagcacctggtgtaacaattaaacaggcttaattttgttgttgtatcatgtatgaagcaaggaaaactagagtctatggagacttgttcatatacaactgcctctcccccaaactagaaattacgcaacctgtttcgatgattgattaacagaaagtggttatgtcacacacaaccccaattcctccttccaaaaaggccagtactattttcgctctaaagacagcttagtgagttgttagggcattggaagttctttaatcaattaagcaaagaataattggtaaaaagctcaaagcatttgagtatatgtaatctattagtagatttacaaattaaaacagtaaataacagctactcacttcataagcacaacgaatgttcttgaatagctctgaagcttgagaatccttgctaacatcaggatgatactgcaaacaattgcagaagagagcataaaaaaattgatccatttaatgtgatcatataacaaagttccttgatggttcaatcatgtatatcaatactgaatctgtataatcacaatcacaaaccaacgagcaggataatataatttatgactactaccttacatgagctagcctcaaatgaccaattcagattctcattattcttttgaacacattcaaatttgaaattgaattgttatttcatatgtatataaatacatagctatccctatatatacaggatgcaaattttggtgtttggtacctgttaagttaacacagcacagttgaataaagtgagaacaaaagaaacagagaggtcgaccaactgcagtagtagcagccatttgaatctcattttacagtcctagtctctttgatactacatcaattactcaaccatggcagattttaccatgtaatttcattttcaactactcaaatttatttggtagatacactacatggatcaatatcataatccaaatcacataacagcagacaatgaaatttaacataaagacctaaatgatctaatcatcaatgagtatgtatacttcatttaccattcttttcttccttgctaaatttccatttgaatatcaagcatgtactacactcacaacaagatcacctcacaaatgtgatcatcaattctcataacctagaaaatctcatctattctatactcatccaacggctaggactaaaatagggtatctaatctcattcgctcccctagctttcttctctcagtgtcggccaagcagagtgctttggccattggtgtactttccgatctctatgcatttcatggctccattcaaaattacctcaaaaaataaaatttgttttcgaaacggttaaaaaagaaaaattatttgtttgttttttctttttcaatcggattattataagtttcttgtcccttaagcttagcttttactatcaaaataattttttgttctaatacagaatgaaatcatatgttgactgttaaaatttgcagcatattttcccgagtactttctagggaaccaaacaggtgattaaagtacagtagaagtaataggaatggtaccttacgagcgagaaggcgataagccttcttgatatcggaggaggtagcggaaaggtcaaggccgaggacagagtagtggttctggctatggttgtaagaggaagaggaagaagaggctgcgacgatgagtgaggtccggcacttgcggcggcgccggtgagagaaagtggcggaggtggtggtggcgctggagacggagatggtggaaatgggtcccacgaaaagatgcgactgcatcatctaccgttgattcattccaattcccaaaatcaaattttggaacctaatttttggttttatttcacaacctccaatcatccaatccatacatattttttatttatttaataaagtaataaggtgatttaagatttttgtatggtaattatgatatctatataaattattgtgtttttggacttttagtccgtgataaatagcacgtgaattattcacaatattgtaaattagttattttttaaagttttgtcacacgtaaaaaaataaaataatattataattaattagttaattgtcacatcaacatcacatgtgtaatctagtcaaaaccaaccaaaccccctaccagaacctagcaccagccagacctacaaccactgtgccaccttaagaaaactaaagcaaagcgaggacatttactgtcgatcaactcaacacaagatcggggattaaaaccaacccaccgacaaaccgaaggaagacaatccgtcaagcccacctaaaagtaccaatcgaagtacctgaccaaagccacacctaagtccaatttggggccgacaggcctagccagactgagagatcagaggagagattccttgcggcactagatttccaagagagagagagcaatgcacttgaaatgttcttaactaagaactccacatatgatatgtttttactcgctcaatcaatttttaactgatacctcaaatttataaacaaaagtaaaattttaaaacatattgccaccatttatcaaagtccaagaagttaaattattaaataaaattaaaaaaataaaaaaaaatataaaaaaaaaattgaaaaaaatatttcagcatatattttttaaagtaaattgagtcataaatacttaatgttttagattttatacatttaaatactttatctttatttttggagacaaaaatactcaatgttacaatgctatttgtttcaaaaacaaaataagagatatgtaataccaaattattatagttgagtgaactagtgcagtatatgaaatatagttattgaattgaagtactaataccatg

SEQ ID NO: 300458 - DNA, 5909 bp, Cannabis indica
tcttttaatgcgtacctgatttagtaccacaaaaaccaacaatattggaggctaaaatctgacagggtcggtgatcgagttcaaaatggatcgactcgggtctgaatgacccatctgaaggttgaagacaaccctaaaactacgtatcgtttttatgaatgctttcagccaaatttttatcgttttttcgaaatattatcatttggtgaattgttgataaactacatgtcacttttcaataaactacatgtcgttttgttagcaaactacatgtagttttttgacaaactacatgtagttttcatattcttccaaaaaaaaaaaaaaacttcaacttttttttagtgtgtgggggatccattttagaccaatttttaattattttgctccattttattttctcacttaattgtaagattatattgtgtgtttggtcaatttaaatgattaattgactcataatcacattattaaactaaagtaaattattttctaataattataatctcacaattttaatatgtgttatttatcaattgaaacataattatattcatgtgataaatttttttgatatattatgggcttttttgatgatataattatatttttgaatgagtgattatgtgcttatgtatttacctatggtgagtctaagcatgtcacttttattttttgagccaaaaaattaaattttattaaatcaaatcagctaccaagatagcttccaaaccagcaaggacaaaacccccgcgggaaatacagccaggaatagaaccagaagaacgagccaaaaagttagcgctaccgtttaacaaaattaattgaaacaggaaacaaaagagaggattgcataagagcaacacaatccgaaattaaaagccccaccggagacaacaagcttcttctgttgcacggcttgcaccagcagtagcaagtccgactccataaccacagcagcatgcacacccccctcaacccaccttcccctcacccaactgagcacctccttcaacgccatagcttcaaccaaaacgggtcaagttgaccataagttttaaccgtcagacaaatttattattattaatataatctcatacaaggtcatttttcatttgattatcattctataactttgttatatatatgtctttggtgattttgagtatttttttgatatcattgttattattattacgaattctttgttagtttttagagttcatatcagagtatcagacggaaaaaaaaaaaattaaaatttaggtttaaaaaaaatggttgaatctatataaatcttaaactcctgatctcaacacaatatgtataaattaaatctaactacatgaaaaagaattttacgagagatgattatcaagagacccttctttttcccatatcaattcgaacatatgaaaaacaacagattctcaaagtgtttcgttctaaaaacccaagaaactctccaaactttaactttctcccaaacctccaaaaattttactatttctctcaatccattagaaccccgacttgaagtaaaccaaaggaaagtagacttacacgaaaataaccaatattaatattttctaacaaactttttcacttggtttacagaggataataataagaaatcatcatctggtttacaagaaattaaaggactgcaacaaagtgctactccgaaaaccaaaaaagaaaatcaatcatataattataaattcttgtggcctctctttaaccattcagcaacaacaaaagtctgcagttaaaccagtactagagcactaattatacattatagaccataggaagagatgaaggtcacatgtccatgagtgacctcctcccaactttattcattatggcggagaaaaaccgtggttacaagctggaacactattacggcaagtgtaattacacaacaatgatataaagaaaacatctcaaacatcaaaataatactaaaagcaacaaacaaaacaagcctaaatccccccagaaaccgaaacaaccaaattacaatctaacacaaaaaattgcttgtttcatgttgtggaagctatctctttgctgcctgcctaaaagagattagagataaattcttcagcaaatatttgtgagctataaaagtttatctacaagtgttgtctatagaaagttttaccattggaagactagaaagaaataaaaaaatgctttcattgatatcaataatgtagacttgtggaaacatatatgaatattattattaacaaccaaaaacacctttgattattctaacccaaacaaatatgcatgatctaagtggggtgaaagtattgtgaagctggagcatagaagtaaacaaatcattaaataataaaactggacaagaataataagttaattagaacaaacctggtatgtggcaagcttggttttaaaacacaaaagatttgaagatcaaattagtatatacatcaatcataatcaaatttgacattgactatgtgactaatcttaccttagggaaactctttatcgatggacaacctctgattgtcaaggacttcaaagcttagagggaagtcatcttctctagcaaccacttcaatttatggcattgataaattcttaagtgacccaccttaggagcaatagttcctgaagagatttcccgtaggacattgagatagattcaaaatagctctgattttatgcctaaagttgagaataagatagtaaaacagtcactaaataacgatgtagtatggcattccattaatgtagttctattctgagaaaaaatagaatttttttaaaatgaaaagagttttagttcaacagtcaactaagtaacactcgtacaatttccaaagaaaaaatataaatttatggcaatctaaaaagaaagattgattagtaaattatcttaataaatagtcatgtaatatgatgttattatgtagttgcacattacagctcacctcaaaggctcaaaccagtagctggaggtaaataattatgggcacaattacataatcagttttagctgactaagtatgtgacatactgcataatcaaattttgagttgatgtttggatctttaataaaatgattaacaagcactactaacagaaatatatgttgtttagcataagagtttcttaagttatttgtaagaaataatttgacagaaaagaaataagatagtacaacagtcagagaataacaatgcagcaacatgaattacaagccctataatagataagtaaataataaatttgtatggaatttatgtgttcaattattttaggccaagctaaattgttattcgtatattatttttttgttcttgtttggatattattttttattatttttttttattatttttgtattatttatataaaatatcttcaaattgttaagaaaaaattaaatgaatgtaaacgtacaaaaaatttacaaaaaaaatattttatgtaattatcccatcaaattttgtgtatttatatacaaactaccaaaatacagggacaaaggaaaaataacatttatgcttcttttttgtttctatatagatatagattatttcaatttgtttgaatttatacgattctagggaatttcttcttaggcttttgtattgtgaatagggatgttttgatgagaaaatagattagttggatatgaatgtgtttggactctaaactttagagctaaccttctacattgtaactaaattgtggacaatatttttggtagatttcaaactggttaatgcaacaaagtattgaaatgctttgcaatgtgtttattattttactttttctatgctatgcataccttccaagatattgatctagttggaatattgatgttctaagttaaaaaaaaaaaaaaacacaaaagtgtaagaatttgctatagcatttggaacttggaagtcaattttatgatctttggactcttgtttcaaatagttgagggtatacataagagtagtttctcttttttgtgtgtgtgaaaagaagagtaggtaggctttatgttgagctcaccacatattccttgtgttcattttaattttgttttgttgttttgaaatctaccatatttttattgtttacttgtctaagtttctagttagtgactattcttacaaaatctataaagtggtgatgcatgtgaggctcaaataatggaatataagaaaacaagtttgaaatcataaagcatagattaaaatgtgtattttcccaactgatataaagaggaaaaaatgattggttataagcctttaattgggaaaattagtcccaataagaaattttgttaggattaatgttaagttaatctaaagttgttgaagcataatgaatttcaatctgaatgatcattttaattgattttcaaatgcagctcacaagttttcattacgagaagtacaatagtttcgtaacttttaatgtggctcgattgagtttatacattatttgagttattaaaattcgatcccatgactcttacacatgcaccccaatactttttatggtcacttaatttagcctcatatagttttggctcaattgagtcaattcaatagaattggaaagtgacatattccactagaaagcttggagaagtagatttctgcatgaatctattgtaacaatctagaattgtaggcataagtctcgtcagtcaatctttgatagtttaagttttatggttctttattataaaattgaactctggtgtataatttggattaaatttaatatatattaaaaattatgtcaaattcacaaaatataatatatgagttaaatttacaccataataaatatcacattcttttcaaaaaaaaaatatcacatttttacttaataataaaaaaaaatattacattttttatttactcttttgtcactattaatataattgataaatttttacattttgtttatttatttagtagaatttttatatattttcaattaaaaaaattgtttgactttttaagttaaatttacactaatgtattagaatacaattataaaatttaagtcaaatagaacaagttcagctttttaaccaattttattataattttacaacattcatttgagattgtcttatgttagagtcttggagatgatgtaataactagttgcattttataattgtttctatatgttttttagatttttttttgttcctttttcaggatccaaataactatgtttaggctatttaattttcaagtatttgagacttctatatgaattttagtaactattgaattttattgcccttaataaactttgtattatttgtactttttgtacaagttgatgtaattagttgaagttgttgaaggatatgtctttgttttctggattttgtttgaactgaaaattaatattggccgttggatagagatgtggatcgtacaagtatgaatacaaaccgttgggttagttgagagttattaattattgactaacataacataaactttctctatcataatgttatagctgccaaattaggcataccacatctattgctattattttagttggccaaccaaattgagtgaacaacctaagcatatttattagagtgttgttattgggtatcaagtatttttttttttttcttgtaattgattagcgatattttttaaaaattattattaacatatataagattcgatacttaattacactaataataatataacacctaacctaaaaaaagagcattgttattagtacctagcacctctagatatgtcattttgtgactggctagcaatactccctaaatgttattatattaaattatatggaacacaatatttatttggaccaatagcgatattaatacataaaaaagtgttaagcaccactaatac

SEQ ID NO: 300459 - DNA, 4209 bp, Cannabis indica
tgtattgtagcttaatttttgatttaataagaacaagtttacaagtagggcaatatatgaagtttttctagacaataattcaagattataagtcccaacttcctctgttcataatagtcgtagtaaatatagtaaaacctgttttgacatattcaaaattttgttgcaagtaaacgattttttccaatcattaatttcatgttcatcctatctagctattgatgtagttgatgcgaccccccaacttgaagtaagtaatcacttatcaagactctgtttaggtcgtcttgtcttcttattgcacgacttcattgcttattaatgttgcctcaaaaaaaaaatgttgaatttcaaaaagatagcgaaccgccttataacggatctaagagatttttcacacgaaaagaaaaaagctggaagatagttaaaatccttaataacaaagaattcattaagcagacaaagctgagaacaacgttaacataactgcatgaagatagttactacaggacagcaattcaattgagaacttaattcacaaatcatcctttggtgggggagggtgtcttggctttggtgggattggaggctttggaggatgaggcggccatggcggaaaggggaatggaggacgaggtggccatggcggaaaggggaaaggtggtcggggtgggaatggaggctttggaggacgtggtggccgaggcgggagtggaggctttggtggccaaggtgggaacggtggctttggtggctgagcataaccacacattccaaatctgcaacgaactttaaaagggcatctgtgtccacactttccacagttaaaaggactaaaatttgtatttctacaacgcccattgcaacattgccatgtgaaggggcaccttcttccacacaagccgcagttgtttacgtcggaagtgacatcaatacacacatttctacagcatctttgtcttggtggcctttcaccttggctgcatatccatggtcgcttcctgcaaccggtgtctcgtggtttatttgttttctttagccacgaggatgagagtgatccatccatggtgtaatttggtcgtaatccatcataggtttgtggcttatttgaatctacttctactactatcacaaacaatagcaataagatggtaattttagcattggctagcatagctctatgatgcacaacaagactcgaagctcccttcgtgatatataatggtgacaaggagtatagtgatagtttttacttttatttttatgagatcatgctttttttcacttctactcgtgttgtggaaggtagacatgttgtttgatgacacttctaattacatgaagaaggggaggtgttatgcatttctataattataaaatgattgtgattaatagcgtgattgaaaactgatattcaaatcagtaagcagatttttttaatgaccattctatgtccttttctcgagattattatgatttgtaagggcttccacctgaagagttaagcctcattgttcaacctgaagtatttttgttacctttgcatttacagtagtgagaaactttttacctggcttaagttatggggagggatgaagaaacgttctacatcatgagttaagttttgagacccatcaaaaaaaaacttcagacccaaataaaataatggataaacaaaacgcgtaaagctgagaaagcaacccacccatcacatggttaagcaagtttaatgccataaattgaaagtagcaacaataactgatcaagagattatgaatgaattgaatatcttagcagaaaatgaaaatcatatatttgatacaaattctgaaacggttaacagatatttgatataacaaataaaggaaaaattatggcctaaatgcagttaaattattataatctattgcaggacctaaacttttacccttccttttatatggctttcaacgtttaactttgcaatcctaagtataagaagtgaaatgtcagttgttattttcatttttcaatacttgagcacaataaaagctgaaatacaaaatagaagcctttcgaacaaaaattatttcaactaagtacataactcaaaaatccaaaacttcatataacctttgaagactcagcagaaatcactcacaatatgagaataaaatgagaaaaaaagcaccaaagagtacatcaaaaagtggtgcttcactgcactcagtagggttcatatttattcaaaagatagccaactaaaacatttttaaactacaaactctgatgaaatcaactttcagaattcccaggtgcttgtttctcataacgctgcctaaacttggcaatctgcccaacgctctcagccatttggcgttttgctttcaagtggtagactttgccaacatggtgtattttagtcatcataatgtgcatcaatctgccactctgtgttacatacgatatccattgcatctgaggatgtaaccctttcctcatttttctctaaacctgcaacaaatcattgtacttattcagaaagcagttcataaaggattattctcctgctcatcaacatccacaaagcaacaaaatcttcatcaaataaagcaaaaattacaaagttcaactcattatcttcatacaaaagctaatttggtattttatcactaaaaatagttaaagacccatcatatacgcgcccttccttttctaaacagtgggagacatacacaactctctcctttgtttgcttacacaaaaaattattaatctatagagtagaaagaaggctggctgtattgtattctcatcatactaagaataagcaaatgcaggaaacttattcacttccagaaaaaagttaacaaatataccaaatatgcgatcaatattcatcaatacaaaaaacttattcttgtttttctgtactatcttactgtaaaattagatattcaaaaatcttacaatgtattgtcaagtttcgccaatactcctaaggtaagtttaattatattactcgtagtcatcaatttatcaaatttaaattagattttcaagttaattctctctctaattaatagtggcacttctaattacatgaagaaggggaggtgcctaagtcttgagcaaaatctaaaggtgcatttaactacatctagtaatttcggatcctggtggagacgaccaaaataaaattttcaaaatgctttacactgtgtttggatgttggatttggtggggaaagaaataggtaaagaaaatgtagaaaaaaaaaatgtaataaaaataataatatagaaagaattataccggaaaagatttgattgagcaaaaaatttcgtatggaacttcacaattagtttttatttattttttacatttttatttttcctacacttttacttaattttttttttcgcatcaaaacatagtgtaaagcatttctctatcattttttatttttcttacattttattacttttctctttcagcatcaaaatcgaacttccaaacaccttgagaaaaaggggaactatcaacactaacaaaacatttctatctttctcatacactaacaaaatcccaaaaggaaaaggcaattaaattagaatagagagctatgccctactgctaccaatccaataatgaatacaacccaaattagaacataagatagaaccaaaaaaatatctacaagtcaaactaaacggaatccgttttcgatcggagcatacacaaataaaattacaacaacaacgataataattccaattctcaagcaatatgcaactaaaacctaaattacatcacaaaatatacatatataccaaacaaaaacatttacagggtacaaagtgcttcaacatgttattactcattaatatcaaggaagtcgataaaaatgcaagactataaactgtagaacacaaatttaaagagcaccacagaacagagaataaatgaacattaagaaagaaacaaaacaaacgaattggttctctaaccttgacctgcttcagaaagagagcattggaggtggaaccggtgggtgaggagtcgacaccggtggagtgggtttgagaagaaaaccctgactgtgatggtgctggtgacgggtgagtaagagagaatcgattaagagaagatggagtgggcggctgggattaggggaaaaggagttgtatgttttcttatatttactttttttttaattattaatgtttg

SEQ ID NO: 300460 - DNA, 4439 bp, Cannabis indica
attgctccttagggctagttggtggtgttcatggatttttcctaactcatttttggataaaaatttcaccatctgacttacgtggacagtgggaaaccttgatgtagcatgtttttgagttttattttaattttttttgtcttgtgctatttttcattgttaccaccagttctcgtctgctacaagtgaggcttttcaataaattagagtgggggtcagtccaagacaagtggcctttttaaaaaaaataaaaattcactgtatgacattaattatctgaaatctgacatgtggttctttataacttcataataggtaatggatcgatatgttgatcctttggtgggtcatctgaagacaatgctaagttaccgtaagtttaagaaaggtgcaaaagcagaagttgatgaactcttgaaaattgagaaagcagagcatcctatgaggatagtttattgctttggcatatcccatgaacatcctggcactttcattctgacttacatacgaagttcaaatccacaccatgagtatattggtctctatccaaaagggttcaagttcagaaaaaggatgtttgaggacattgatcgccttgtagcatattttcagcggcatatcgatgatcctcagcatgattcagcaccatcaattagatcagttgctgctatggtgccgatgcgaagtcctgcagctgggggctcttcggggacgtctgttggcagtggctggggtggttcatcaaacgagggtggacggagaggtcattcttttgacagggaacgttcttctactccgggttcaagaacaggtgaagttgaaaagattcatacttgggtttttaactttgtttaatcaccgtttgagaggttgctcaaatgatcataagaggtcccaaatggtcagatatttgatttgtttccacaggtttgggtctaatatagcaattattatagtttcttggttcctaaattttgtaaggttaggcagggagaacgctaaaaatattaacaaaaattaatagatattagcttccacgttcatgtttgtgatattgtaatctaatgcatacctgtttgagatagtctctgaaaatgcttctatgttctgtctgtaagcaaatgtcacagggttcttggttttagagattcgtgatttacatttctcatgtttgtgttgcagaccgcaatgactttagaaatggtggtagtcgaggtggaggtggacacccaagtggggtgcctaggccatatggtgggcgtggccgtgggcgaggttcatacgacagtagagggaatagctccaacaatgaaagacaggagtctggttatgatgctcccaaatgggattcagctgccaaagatggagatgatggttggagcagtggtggtggaaatagttggggtggtggggccaatgacagtgataatggacaatggagcagtggaagaggaagggatgctggtggagccacagggggtggggttcgggccccaaaaagagttcaacccagtctgaaagcgggaatggatggtctggcagtggaggtggttggtgagggtcgtaaaacttcttatccaacccgtcatccaactgcatgcttatgccatcacttattcctgacgtttctgagttttgactagttttcctgcccatggaacataataactttgcttttgtggtgcttttgcttttctaacctgtacgtacatttacatgagttatcaatgtttttttttaaaagaaagtcttgttttggagcatgtgcatgatgagattaatggctgccaaagagcaggcagacactataaataagctgaagcaacacgagtcactatgtcagtgtggcttattatcttgttcaaacgcttttccctattctgagaaatgtgttttgcttcaaatctcgaaagatgaggtggattatcgtctacttcgattttttatattttttgagttacagatttgtcgttcctacattccaaataagagacctcatttttggatatataaataaaaaccaaagaagacgccagagagaacatataacgaaagcattttattcgaagtacatacaatcaaaagagaagtagactttacatgaaaagcattccaataattttcattcgcatttaaaacatcaaacaggtagtcttcagggtcctaaaatctgatcacttgtgatgagcagttaatgctcctgaaaaattagtcttcgtcaaatggccatccagtataccccatctagtaattattttcacgcatagttggggagctagttctagctctcgtgttacggttggagctagaactagaactagagcgaaatggccacagatatgacaatggatgtctccttccattatttgttctaatgttttccctttcactggtgttgctgctgctgctgctgtttcgattagttgagctcctggcgttattaagtccttgagctggcagttcttggcggcaaacagggcaagagttgtgctggctcaaccatggtataatgcagtccgagtgatacaagtggtcacatggcatttgcctcgcttcagatcccagctcaaatttatctttgcatacaggacagtgtgaatcagaacgaagatgcctactagatatcttgatagttggcatggcatctattaatgatctggctgctgggggagggcctcgtcgtcggtcattagttgaaagctgctcaagtagttcttcaagcccagggccaataaaataatcgccaacattaccacgtgttacaccaatgccaggagtcccactaaaaagagattcgaacccaccgtttccggacaacctaaaaggaatctgtccaccaaagattaacaaaggaccaacccctgggttatgttcaggaactagatctagtctatcgcttctgtcaaccatccgttgcctcataaacgttgagatagaatccaatagttggaatcgccgatcacggtcaccctcactatccagatcaaacaaatcgactggattggctggcacaatatcatcaagtttttcaataaatccacaatcacagctggggcaaacggcatctcgccctcgcagtcgaattggccgtctacatctgtagcaccaatgagtgtttcggccactcatcctctttctcactctcacaaatctttaagagtatagaatcctactctagtccttcgaactccttaggtctttctttaactaatacctgaacggaaataaattaataaaagagaaggttttatctgcacatattgactaacaaactaaaaaaagattgaatacaaaatgtgacatgcatataaaaccgtaaactgattcaacttcaatcatataaaaagttccgttcccaaaattgacaacaaaaagtccaaaaaatttcaagcaacggtttttcgaacatcaatggtgcccattggaaagttaaatcccgctaacgtttagagggtgtacgattgagtcatgacgcttaaggaaatcgaatcgaaacttcgtaggtttacttcgcagatctaaaatagcattaagctccatgtaaaagagaatttcataaaaatcccgtatagaaaaaattagaaattcttaccaatcaaaattactcgccaaatgattaaattaaaatgaattaaatcaatttcaaattattagtattatatcttttttaggtaaaaagaaaagagcccaaatccagaagaaaacacgtcaaatttctacccttttcataactgaacgaaaaataataaaaaaaagtcccgaatggcttaatcaaataacaaaatgacatgacaatatcaaagctcacatcttaacaaaagagatataatctttgcataaaattcaaaagaaattgaaccaaattgggcgttagattagataattttttttttccagaaatgcgttagattagataatgaaaatacacatctgatatcaaaataagaaacaaggatgtaccttgtgcaaatcgagaaaaaaccaagtggatccgaaaaaccaaaaaccgccaggagcgagagaagaagagattggatgaaactctaggctgggccaaggggatttgagtggaaattggggttttttttagtttaatattattattcatttttatttatttaattagtaaggggaagagggaggagaagcctaggtgggttgttgtcgcttatccttaattacaccgttacacgtggtgctttaaatcttttcttcttctctaactgtggacgttgctaacattttcttggttttagtaatcacatgtttcaatagataaataaatgaattgctacaaataaataaataaaaactttttatatatttgtatctgttataaatattattaattatgtggatgtccaaatcttttatttattaccattaattgtaattaacattacttttttcttaatttccctttttcttagtttcttaat

SEQ ID NO: 300461 - DNA, 6025 bp, Cannabis indica
tggaaagtttttcccatggagtgtgtgagtgagacaaagcacactgaaaacacgttgtgttggtctgtaagggcaagtcgtcgagtccatgaacgcagccagagtgatgtattcgtgtataagagccattcattccgtgggtgtaaggacccaatggaggcttgaagcgggacgttacagttctctccatctacttctcacacaatctctcttttcgactgaatgatcataactttttgctctaaaaacaacaagtatcgtggcaatcgactccagtgatatttgaaaaagtgatcatccatttcaatttatgtctgaatcagattgtgttgtaggtaccttaaattctacttaccttgacagggaagtccaagactagctcctcatgtccttgcttctctcatctatgtttgaaagacttctcacgtgtatggttggctgtgaaacttcaaagcagatttggaccaagctcgagcaatactttactcttcaggtctctactaatgtgcttgagttaaaaccaaactctagaactaaagtacctgttgaaagtcaaatacctaattgatcttcttacctcagttggaaaattctactcatctcgtgatcatgtttcaatgatctttcaatgtcttccaagtgaatatggcacctttgtcatatccactaacacaagacttgagaatacagtgtcactgagatcgaatccctattgtttgcctctgaatcaagaattgagaagactgacaaggaaacagatctcagtgctaatgtgaccctccatggagtttaattcacctaaagccaatcttactaacttcggttgcaactctgtaattttaaatcctctaattttttgaggttctcaaactctccttttcctcagaggaggtttttgaggaggccacactcgtggaggttactacaactctcagtttcctccccatagattctatgatagagcaactgttactcattttggtcgtggacaagcaagagctcctgttacaactagcaaaccacagtgtcaacgatgcctcaagattggtcatactgcaccagaatgcttttacaaattttgataaaaagcttcaaaatgagtatttccttatctgacaagctcatctggatcaacttagaatggcatagctcaggctaatctcattgccactcaaaacatgccagatccaaacttgcatcccaattcaggggctacaaatcattgtactcctgatgcctatcatatgtccacaagtgctgagtatgattgtctagcgaagatatttgtagaaaatgaacacatttgtcaataaagcatgttggtcaatcctcttttccactcccaactcttcctaatctttcttacttaataatattttaaatgtccctaaaattaataaaaatttgctaagtgtttccaaatttgctaaagataacagtgaatttttttaatttcacgatgatatttgctttgtcaaggacaaggagacccattccactctgctgatggggacacatcagaatggcgtatattattcatttgatgcctctcagatccagttcttgtcccaacgctgttagtacccatgttgctcaagatgaagctaacacttgctcaaagtataccaataaattctatgattttgtaatctagcacaatagactaagccacccctttgtcagggttgttcaatctgttctctcttgttgtaacatgcatatttgagagaataataacaacaaagtttgctcagcttgttgccttggtaaaatttataaattacctttcccaaaagcttctctcactgagtacagtgcactcttacagttagttgtctctgatttataggatcattcccatactctttcctcaaatggatataaatactatgtttattttgtagatgtgtattctaggttcacttggttgtatctatttaagagtaagttagatgctgataggaatttcctatcattttgggtacaaccagtagcaagatagaagaaaatagagccaaacagtgtcaacaatggaaaataactggtatattgatattacagtgacaaagagaacaagttgctgggtattcgagagacccagctctctctcaagagctataagctcacttaactaaatcattcacacccttaccctccctactcatatatataacatcaatccctctcattacaattacctacttacccgctctatttattaccctaaggtctaacagatgccttaaaagtgtttcaagattttaaagcttttaggacagttgtgtaccttcacaatgcctacacctcttttaagcaacaaatcacctctacaggttatctttaataaaaaaccagattatcaatctcttagaagcttcggtggtgcttattttcccaatataagaccctataacaaacatgaccttgaatttaggtcatcttcttgtacctttctgagtatagtttgaatcataaggggtataaatgtcttgactcaaatggaaggttgtacatatctcaagatataatcttttgatgaaacctcttttccagatgctacaactatttctaacaattctcctccaataaattacaatttagattctcttacctctattgtcatccccaaatctgctagtcacactccccatactcccactttcagctttgatagtttgccacaacactctgagtcttctcactccaacaccccatcatctcttctaatcaacatgcttcacttagcaattcagagcaaattcacatgccttatgcaacaattgaaactaatgaaactgtgaatgttggtgtttctcagaattttaatcccacatgtattgttgtacatggtttggtggatgctgttctagagtaggagtttgatacaactacaattgctactccctcacctattcatgttgcaacattagtgcaaaatgtgaattgcccaacctcaaacagtgtgttgaaacttgttcaacaagttatgcagggtgttgagacatcctttcatcatcacgagaatgctgcttccacatctaaagtgcacaattttcactctatgcagacaaggggaaattcaggtatctctaaactaagattgtttatggaatctagagttcttgatactcttactgaagctcttctcaatgcccactggagctcaacaatgcaagatgaaattcttaccctgatcaaaaatgctacctggacacttgtcaaattacccctagaaggtaggccataggttgtaaatgggattacagagagaagcaaaatcctaatggaactgtaaatagattcaaagcaaggcttgtcgtaaaaagatttctaccaacagtcaggctttgactttactgaaacttttagtccagtggtcaagccaataacaattcaagtaatgctaattatggccttagctaaaggatggatggtaagacaactagatatgaataatgtttttctcaatggaacactgtaggaagaagtgtacatgacacaaccctcaggatttgaagttgccactgctcttgattctgtgagcaaattgcacaaagctttgtatggtctcaaacaagccccaaggacctggtttgaaaagttgcatgattgtttgctggatctttctttcacttcttataaatcaaatcagtctctttttaattgtaacactaaacagtccattacaatccttgtatatgctgatgccattctggttacaggtagtgattccacaattgtttcttaacttatcaattaccttaatgctaagttctatctaaaagacctaggagaattgaagtattttctaggcatctaggtcaagtacactactaatggaatgcatttctcttaagaaaaatatgcaaaggatcttctttgtaaagctaaaacacagagtgctaagccttcctcaactcccatgataagtggcttgagattgtctacatatggaagtgatccagttgaagatgtgcaactgtacatgtctatttttagaggtctgcaatatcttactataactagacctgagactgcttatagtgtgaacaaactttgtcaatgcaacatcctcttcagtcacattggattgcaattaaaaggattctcagatgcattgggggcacattggagtttggattgcacctgacaaaaccttcctcaacaaatcttgtacccttatgtgatgttgattgggttgtagactcagatgatagaaggtccacatctaattttgcaatcttctttggtcgaaacttgattagttggcaatgtaagaaacaacacactttctccaggtctaacacaaaggcagagtaaaggtccttggaaaatgtggtagctaaattaacatggttaaacaacttattttctaagctaagcattgtcttacctagaattctcactgtatggtgtgacaatatgaacataattttgctcactgcaaatcctgttctgtatgctagaactaaacatttgaacttgatctctacttgttagagagaaagttcataatagaattgcccaagtgaaacacataccaactaaagaccaaatggccttacaaaggccatttcaagccaaagatttcattctttcagagacaaacttaaaattgaggatgccttaattctaagtttgagggggactattgagttagttggtagtggtttgtatgcctgttaaagtttgttagtgaattggttggttacaacctcttccaactgatttagctagctagttatcttccttctttcttgtttcatctttgtataaataagacgatactatttcaggatcaattaatgaagaattcctttttttctctgtctttcttttctttgattcttgattttgttcatcaatggctagaagatttaatagatgataagcccattagctataaatccccaataacacggcaaataactatcaaagcaactcaagtttttataaaaccaataaaaataataatgtgcccaaataaaaaatctaatattcaatgcatagagtaatttcaaattcaaggctagcaagctttatcaaaatgagtaggtgagttgtgtcaaggttatttagtgcatgtagattcaatacgcctaagcatagattcattatgtggcaagcagtgaatgaatatttacttactatagataaaattttgacttgccatatctaattgaattcagctttatgccctatttgtgagcagatggtaattctcacttattcttttattgtagtttttacaactttaaacccttatccaccttattctctatttttacaactttacgggtcaccttctctgctaaacatacatgacacaattactctgattacttggagttgtcacatttcatcgctttacgagggctatggtgcgtgatcacacgtgctttctgcattacgtggttacactttgtcaattagtggagctgcttgtaaaaatgagctcatctgtgatagttacccggtgagttacaaataacacaattcatcactttacaatgccaattaattgtgttggtcattttctactcttctaatttggtgaatccttctataatctaatacctttttgcaacccatatgatctttcccataagacatcttagacatgttatggccactagtatcccaaaagtccacataaaaccttaacgacctgactgatatctctcataagacctaataaaatatcgatcgaagatcattactttaaaccgcagctaaaaacattgatggtttcaaaatattacattttatgggaaagtgaaatagctattccaacaatataatatatattcatagttataaaatgggcaatcgacccaaccacaataatttaagtgtcgtgcctcattttttgctattctaatttgataaagccttctataatctgagttttgtgcctcatttatttcccaagtaccacccacttgcaatttaataaatccaggcatttatactaaattggagtggctaggtaaaacaactagattttgattttattcaatattca

SEQ ID NO: 300462 - DNA, 6832 bp, Cannabis indica
aaaaattaaattagtgataacttgtatataaataatatgttttagtcacagattacttttaattgtaactaaagattaactaaaataattttttttggtagtggaattctatctccaaacgaattgataattagctagatatgtaatttatggatcttatataggtgttatctttttcatatgctaaagactctcgatcaaacattataagataacataacagtgtaaatatattgtaatatttagttaattaattactatatgtacgtacacttgagtatccatttggcatatcttggatgatacagccagaggggcgtctcctatatctgggaagtgaaggttgatattgaaggatatcgtgaaagctgtcaactggaaagtcaacgatgaaccaagttctttcgtggtcagggctttgctggcaatatcggagaaaatgagcttccctagtgggaaccagtggagaaagatattgtagctcagcaaacacctgtacaagtaaatcaataatttagaaatgtgccaatattattgaacatttcgtacgtagaaatttttgacgaaatgaaaatacgactagttaatgttgattattgtaccagctgaagtgaaccattgattggctggccagaagcatcggttgtgattacttgaagggttttagctcttgagaccatagaagggaacaagtccatccacttactctacaaaagttaccaaaacaacacttcaatccatatcaagacgaattaataataaaaaatatatatacatagaagaacatgagtttgggagttgagaaagaaaaagttaaaaacctacacaatcaaggaaagattcaatcagagtgatgctattcatgataacaacatcagtatcacgagttgcttcagtcttgaaaccgctcgagtcattattttgcttgaggttcatggcccatgggaacatccttgcatgctcttcaacgttaagaacttccttcccattttcagagtctcgaatccagagaggcgagcccgactggcacatcttcaccagctcgttaacagaagaggtggcgagttcaatggcaagtgatttttcttcttcgaggagaagaccattgtctgggaagggttcctgatgaggcaacattggaactactggaaccatgttgtgaccgtttccagttgccatttggtcagggaagtgcctagagtagatgctaatgtccaagtccaaagatggtggcattagaggatgatgaggacctccaccaattgtccggctactaaatctcggagtcatgcagtaatatcgatccaactgatggttttcatatgataacaactaaattattttttagttgaataataaatattgttaaataataaaagatcagttttgctatttggtagtatagccagtgtccaaggccacattagattacagattttgctatttaacttatcttaggagtatgtcatatcaaaaagcattcccaatagatgctctataaatttaaagtgaaaacaaaatttatcaagaaaaaaaatagcacataacatgtgttctattttatataaatttttacagcagtggatagtaagcaggactattcattactcttaaagtttttgttttttgttttaaatacattattcttaaagttaatattttattagttctttaaaatttaaattatttttttgtgtaggtatttgtataagttaatattatatatttaaaataaacataaaaaaaaaatagaaaattttttactgtaaaatagataatttatcattttaataatttattttaaatgatagggaaaagaagttattgggtgctcttagcgatacccaaaacaaatatttccataactaataactattaattttacgatggatttatagtacttatataataagacaccatactatgctttgagataatgactaaaattaaagtttgtagaaacttagctaataaacctgagcactaaaaatatcaatgttatattactaattcatttacctcttctcggagtcttgcattctcaaggcgaagctgctgttcgtcaaaacccatctctcccatcacagctggactaccacaattagggcaactagcattacgaagcgccgcctgaagctggaaattctcattctttaatgtctcattttcagctctaagtatctgattatcgttacggtcttgttgtgcctaattaagataataaaaacgtgtaatatcaaattaattacaattagggtattaaaacaaagatacagaccaacaatcataattaattaagttaaacgtccaaaaagataaacgtagctagttaagacctttccgcaaatacctggaagaaaaaagagaaaaaaagaaaacaaaatcaaacaatactctattttccaccttccgtaaccctaaatgacaaagcatttattttgttcaaacttttggaagcacaagattaggtagcggtttattgcgcatccctagctcatttatgaaatatacagactccacattaactatttctatttctatttctttataaataaaaagttggtgacgggtgataataaaccagaaaaaaaagaaaagaaaagaaagactagataaatattgattaaaatataaggtagatatcttcctgtcttttccaaccctaatataattaaagagccgtttagggaaaaggaaaaactttaatacgatcaagcaattaaaaccccgtttaataggggatcgtgctagaaaaatgagcaatattttgccattatcttagggttatttctttttttttcttttttggttttgcatgtagatggatattagagtgaagtacaaaaatgttaataccttcatctgggtacgcctgttttggaaccaaaacttgacctgccttggcttcaagcccaaatcttgactcaatttcatccgttgcttatcatctggatgtggacattccttgaataatctgcaaaaatgtgtaataaacttatttttattttgaaattttgcaaataaaatttgtccccttaaaaaaaaaaagcaaaacaataaactagagtgtttaattttatgattaagaagtactatacttacgcttccatttcttggatctgacgagcagtgtggcggtgatagcgtttctttttgccttgctgctgaagcagtagttgatcactgctattttcttgttcattccctgacttctcctccatctgctcgctacccgaaccgctctccaacatttcatcctttcccctatgtaacagcgagtgttcttccttctgtgaacaaaactttcttatatgtcaacgttgtttggcaaccatgaaaacaaaatggctagcggctggaaaataaacgaaaaggaaaagatccctatgttattaaaagtcatcaaaacttacaggaaggatggtggagaagggttgataaggcatggtagagatgaagttgaagttagggttttggatcggagatgagaataaagtttctgaggaaactacgttcccccccatggaggacattacttgacaatctccatacatgttttctctctctatatatatataccttttcgtcttcttcacttagagagctcgaatcgttttaaagctgcatttatatcaattttgttagtaccaaaagttaaacaattacctagttccgaatatgaaacatgcagaggaaaatcgcccattgcgacggtgacacaattttcagtcggaaaagaataattaaacaacaaaatttaaaaaatcctttttttcgtttctgctttttaatcgaaattttccctattgcttttatttatattaaaaaaaaaaacaaatatgagtttacatatgaggatatatgcacctaaaagtaatatcttacttatcactcaagtcaaaatgaagtagtaaacattgaaaataaatcaagcgaggcaccattaaagaagaatattatgaagacaatattcaagaccaacgagagaaaaaacaaattaatattaataattaattataataacaataaaggagatggaaaacctcaaatatgtatagctgagtagtataatactactagctgcgtagaaaccaaaataaatgaatgtttgaaaatatttaaagcagaggaagaaaagtgaattaatgccaatatatatttaaacacaaggactgtgagacggtgagagtaaataacatggccatgcacacacctttcttctgtcggcgtctttgatggaaaatgaagaacatgaaaaagaaaaatccaaaatccaaaatctctctctcctttcctttctctgtcttccttacaattttataaataaatatatatagtataatgtatatcaataccactcactcatgactcaacgccataataaatcgcaaatttattgattttaccgtggttggtaaataaatgcgagggtttccctttttttctttttgcatttttgaacagaaagaaacagatcaacgcatctctcctcgtcagctgttattttacacatgtcgtaaaatgagtggaggacttgagtgtccttctcgggcagtgtttaccaaaagtcaaagtcataatttttatttctatttttctttatgaataaagtcaataatatttcttatcttatcactgttttacaagagtgctgacgcgtgatgtacaccctcctttctaattgatacgtggtcacactcgcgtattagctggcctttccttttatattttttcttttgaaatggccttttgcctctgctatttttttattttattttatttttttcttttcgtttttttaccgagcctttaagaggtaagccgcttggggactggaattgactttgacaatgatggaattttttttttctgaagacaatcagggaaagttttttttttttttttttttgataaaaacaatgacggaatgttagaaagagaaatttagaaattacactgatttagagagtaaataaatcacaatcgtcaattcgggtatcgaatcatctattcaaggaaaacataaggtaagtattttgtgctgaggaaaaatgtgatttttattgttttccaaatttcctatacttctttcattagcacaaaaagagaaataattaaataaaaatcaaaaaaatcgtgctataccatttttttcttcacaagaatcaagattgtgaataataattttctcaaaacattagataattgattatagacataacagaaactaatataggttttcttttttttgatagaaaaatatgatcttaactctaattttttatcatattgttgaccttaaaaagtaatcaacttacagcaaggttgtatagatctgatgcttgccacatgtgacacaaacataatgaaaaagtataaaacacacatttgttatagatgttcggcccccttgtgatagcgggtaattgacctactccctttttggttgtattgatacttaaagataatactatttaaattgtcataggtgggattcgatatagctctctataaacatacaaaacatgaatcagtaggcaaatctctaatgacggagccatattgccttagaggcgtgtgagagagatgaagagaggaggccctattggacgtgtagcagagagagagagaaagagagactagagtttctgacttatagtgatttgaaggcttagtgacttaggttttttaagttagagttaagcccaagcctgaaatcctaatttacaataaaacccttagatatttacatattaaattgattaaatacaaaagactaaactaccccttgaaagtagatatttatcatcagtttgttgggctgttaaagggcccaattcgtaagtagcttgtcgtccacattttgggctgtacatagagtccagccatgttaatcctagccgcccatagacctacaagggaggtctggccgaccatggcctgcaggttgagatctggctggcgaaggcctacaggttgaggtctagcctgccatgcttctactaggttctggtaggtcatgtgtctacaaggatcctgtaggccactatagctctactaggaggaggccagccttttgatgtgaaggccagccttttgcaagttgaggacagctttgtacactgtttccttgtagaggtcaggttgccttgccgaacggaagctcccttagtctaaaagttactttttggccagccagcttgtgcctagatcttggtcggcctatatgctcaccctggccggcctacaagcttctcttggctagatagggatgttggtacatccctttgatggctcgctttactcctttcggttgctgcataacggtttcaccatatcttgcatggagaccctgtctcgctactagcaaggttgtactctacctatacttcgtctttggcttacgtgaacatgccacgtcaggtggacaaaatttaggataacatttgcccccaagtccctgttcgaatatctagtcggatagggactttctagctcccgtaatgtttgtagcggtctctattgtgcaaccttgtctagccaagtgttggctttttgcatggcatacttttggatctttgatcctctctctgtatacttctcatcttctcttcttggtatcttttctttgtacatgccattaacaagttttaagcttttggaaactttttgattcttattctagtctgtaatccctttcgtatattgatcctcatgacaagttttggaatgtttaatgtgtgacttttcgatggaaaagattcgaatctggccttcgttatgattcttgactctttgagtcataaagaatacgaggcacatattcgagttt

SEQ ID NO: 300463 - DNA, 634 bp, Cannabis indica
ctaaaaatgtctctttttttatgtctatttagataaagatctaccgaacactcctttaaggagtgcactatcgaatcgacttaccctataacataatccccaataatatactaaaaaatgattactttttttttaattctcaatttgcagcatcactactgatattttccctcaagtaattttcaactttgctggaaatgcatctatggttctagggcctaaagattaccttctagagcaaaattcaatagtgagttcttatactctttcatcactaaatttcattgttaaaatactttaattttctttcatttcgatctgatttcgaaaccaaattcattggcataggatggagctgagctatggtgcattggatttcaaaagaatcaaggtcaagatacaactatacttggaggtaatctaatttgaactctaacaaaactcttctttgtcttaattatgtttctcttcttggattaataacttaattaagacttaatcatattttgacagaccttgttctaaaagatagaattgtggtctatgatttgggtggtcaaagaattggatgggctaattatgactgtaagttaattatatatatgcacgtaattaataattatatataattttt

SEQ ID NO: 300464 - DNA, 3427 bp, Cannabis indica
cactaactacactttatatttttcccccctcactttaaattctgggtccgccactgattagcatcatatatatatatattgtaatgattatcattaattggaggaaagcacatacaaccttgcactagatcatatcactacaaacactacgatgagaataaatatatatataagagcattgttttaaggcaatgatgcttaatattattactaggtgaggccatacaaataattagtgatatttataaaatttattatattattaaaaaatatagaattcaataattaattgtatttatatcgatagaataatttatggtataaatatttaagtttaatattctcgatttttaatatatatttaagtttaatttttgacggtaataatatttaaattataattctggaattttcgtaaatacctaactagtaacttaagcatgtcaagtaaattattatgtgacaatctctaattaatctatgtcattaaattactagtactgacacttaatagtcaagtatatataaatattcttgaaatataacttaaatattattactgttaaaaattaaatttatatatttatttataactaacaaattatttatatataaatgatattaaacatgataccttttactattttttttatatataatatatattttctatatgtatataataaaatgcagaagtactcatcatgctcatgcatattatatatatagctttttggtggctcaagaaagtttgttgttggttccataaaccattgaattaattatattgtccaaagccaacttatccatatttatatatattgcaccccatgtggctatatatcctttcatatatataatattaatacttttataaatatattattagacattacccaatgagaagcatcatattattaattagtctcatgaaacatagtaattggagtagtacacatacacaataataattatttatgataataataataatttataataatcacttttgtccaaaattatattttatattctctcaattttaaaataataccattgaaaatgatggttcaaaaagcaacgttgaattccattggggttgttgaagctatttatttaccattactagggaagaaaaaggaaactaataattgatttaattaattactacatagataaaactaaaagacatgttcatttgtacgtactttgatggatttagtgggtaattaataatcatatcttcttgtattagttcctaattggagtttacataagggtaagtaaagtaaccaataactaatgttgaacactttaccaaaaaaaattatttatttattagtaaatttaaaaaaataaatactattttgaaccttgtattttataaaagttaacgattagaccatttattttattaaataacaaattagattctgtattttataaatatatagtacaaaatagtatttgaacgaattttttgttaaaataaaatttataataacctgatgtagaggtattataacaagactgattatattttctgcattttgttcatgctagaaattatctttaagttgattatattaaaaaaaaaattgtgaaaaaacttgatctcctgatactattttacaatttagaaaatataggatctaatttattctttaacaaaatgaagtatcaaatcgataacttttacaaaatataatatatacaaaataaccatgttatatcattttatttgctatatatgataaaagttgatagaataactaatttataacactataaatagtttatgatatatttttaagggttgaaaaatttaagagtacaataaccaataaactataacaccttttcttttcctcttagtaggatattagaaaattttaggagcaataaataatatatatgagattgacctagctagctatatagtactagctgagattatagagttgattaattatgtgataaaattaattataatatgccaagttttggtgtgtgccgacactttaagatcgtttgtgcttttgactaatttatagaaacttcgactacatacgtcctatataaataattaactattgtcacatcccatgctacaacttctatatataatttttattttaaacaaagaaatattagttgtacaaatatattaaggtttttgcggtacactctttttattttgagaatgaaatagtaatttcaatataattgcattcagagtataaaagggtctgagaatcaaccagagcagtgctatatttactatttagcaatgctacgaaagagaaatactgggaatgtctagctacatattgaactactaaatttattgaacgtctaataaaacgtaatttgacattttgtagaggtaaaagtaaaagtttacatagtgagctacgaatggcttgtagtgtgagtgggcgtactatcagtttcaatctctactttcttccaatgcttacacttgacccaactaagtccctcttcaatgtccatatagtttcaacaacctcagttgcatacatacctacatgatactcaacttttaagatactcagattactgaatttttttatgatttgagcaatgtaggtgagggaggggaagattctcccacttctaatggatagaattttatgttgaagtgtctgatagataaatagtgcctgaaaatatagagaagtgagaagatacatttttaagagaaaattaggaatcgtttgtctcttagaaactaaggttaaagctcacaaatcgggagtttaatttatacttaagtctttttagcggttggtacttttttataattcttcttaccatttgaatgatagaattattttagcttggaacccgttgtcctttgatcttgatattagagattgttcaagccaacatatgcattttgaggtgacgccaaagcatgtcttggcttttgaagcaactttcctttattctcataatgaattaatgaatgatagagatgttcttttgactttgttgaaggaaaaggctgctacccaacagaatttttagattattcttggtgattttaattgtgttagtctttctaatgagagaattcatggtggaaaatgtactaaaaactataaacaactgaaagatttcttggaagataagcaagatgacaagagtagggtgtatgccaaattatatcgagttttgggaaatcatgtgtggattgacaacttttcgaatgttgaagctaattttttgcctgagggagattttgatcattgccctcctactgtttacttgatccctaatttggggctaaacctttttcattattttgatacgtggagtttgcatcctgagtcaaaagtaagaatacttgtgatagtcagtagtcccgtgatccgtaaggggaaataccgggtaagctgtgcaa

SEQ ID NO: 300465 - DNA, 2283 bp, Cannabis indica
aaaaaaaaaaaatcaacgaaagaacattctctctaacgaggcccctactagaatagactcaaaaagcatccaaacataaaaaggatctttagttagaccacacatgaacgagaccatgcctattgcccgtgtatatttcgttgcgttcttcatcatagaaagagcagttatgtcttccaaggcctcactaactgtgcttcttaccggagagtatttctgctttgagcagttagaactgcaaccacagtcgtcagcttcgagaggatgattagtagagtttattttagccaagcattttccagtcaggatattgctgatattaatggatccagcttcataacatagaaaatcaatcttcagtacataatattatatagagtaagaagatatctagtagactagtatcagtattttccctatagctaacaatacagttgagagaaatataccatttccttctgcccaatgatcatcggatgaagccttacagtaggatattataagatcctgatcacaagtaatatatatgttgtttgtattgcaatcagggtgccacaacatatgatcctcgaatgaagttacacgctccccacggaagttccaaacagacacagttcgatttctaaatgtcagaaacaactgattctcatacaaaaaaataaatgctgaaggagtcatgaactcagttttgctaacttccattaactcagtattgcgaacctacaggcattatataatttttaatttaagtatgcttatatgtaataagataagaaatctaaagagaattgccaggaaaaaggtaaaaaatgactacttacatcaaggatctgaagattctcactttcttgcttgacgagaagtttctcattgaactgttctatgaactctacctttttatttcgatgaagtagatggttgaaggatttgagaactgtgccatcttcaattgaaagaattttaaggggaacatggctggtagctctattgaagatcaatagcatgatacctggactgtaacaaacgaagaaacatcaagacgcaagaacactcgtgatatctaaagtaaaatacattattctgtttgtaagtttcactgtgagatatttcttcgtttggaaaacatggtgaacataattatttttaaaaggtatatcttgtacccaaatttatcagtgcaggtacatcagaataaacaaatcagcacagatcaaactcgtagagctaataaagcaaatttatttcaacattccaatcggacaaggcaaccaggaaagtagtcttttcaggttatttagcaatttaagaaaagaaaagcaaaaataactcaaaccaattcaaatacaatgagaagctaaaattgtaatgtaaacttgtttagattactacaacaacaaggtcatcgcatatggttagctccaaagtgtacggttagactgagaccacatataaaaagattaacaggtcactccaacaaccagaacattcatgttatgaacacatcccatacaatacagatacagaaaatgaataatggcagagcacataatcagaacaaaacaagtaagtaagacagtttaatctttagagagaagaaaattacctaattttgatttcttgcacgtgtttatctgatatagagtatagcatagtgtagtttttaaggtcaaacaccttatatatgctgaaaaagaaagaaaacgtaagcttgtaagaatttgaatgcaattggcaatgacaaagtgcgaagcacaaatcattctgtaaagatacctatcttgtgcagagtaagttagcaccttcccattaacatcatcaaactctacaaagccaggccacttcaaagattcagactcaaaaagagcaaatccggcgtcaggcttgcctcttcttatgtacctagtcacaattcacaaatccacaaatattcccacaattcacaatccacaagtaaacaatatattaacatatagaaaaataaatgggtaattaaatttttcttttcactacagatagtacaaacattttaagagaacagatgcatcttaatggaaacaactacatgtttgtaaagaaatacatttacgagtttatatcatacaatattcttgagtttaaacaaaacatacttttatatattattaaaaattccagaatgaacttctgtgattaccaaaacaaaacagataacttttatctgaacacaggtgaactggatttatttattaatttcttttttttttttttttttttgaaaaaagagaaagagatcacttgtcttag

SEQ ID NO: 300466 - DNA, 5438 bp, Cannabis indica
acaatttttttacttttagttacaaattttattgtgaccaaaagtaagaatttttgtagtgcatagcaaactgctgatggtcgtaaccctagcaaagagtcgagcttctttcgaaaaatgtagtctcctgcacgcaactgcatgtccattgtgcctatactataaaaacctctagtttctggattatattcacatttttaatatatttaactaaagaaaaaagtaatatcactcgtgaatgaaagaataagccaaggtacgtactgtttagtgattagctaaattatattaggggccagggaatttctttggattcctcctagctatacataatcatattattatcttttgcttgagtcctttcatggagaatgttcgtgattctgatataattagatactttataacataatgaaaaagaaattattacaataataacagtattattaatgcatatcctctcgtaacactttagtttatcgttaataagactccgtttttagtaatataaagaattatttggtcacttaacaatatcccaccaatctgttaatcattatattttatctgtagcattaccagtattaaccatttgacaataaagtaaataatagttcatgaacattatcaattataatattcgatatgtatataaataaaaatgtaaatatatataaactaatcaatattgatggctatcctagcaattttgtttggtgtggtcggcaaatccgtccaattttattgtcgacaaaacatgaaactctatcttggatcgtgtcaaagtaagaggggatgaaagctagttttgtacctttttgggcatgaatgaatcaccacaccacttaattatactaaagcttccatgtctacagtcttcctatctatctatctatctatctcttctctttttttatcttcatttagttatcatgaggaaaagaaaaataagggcaagacagaaaaactggatttagagataaaaccttactttttctttttcactttctttttactttaatttatttctcttttcttaatttatttttatattttttgtcatatcttttattatattatttttattgagcattttaaggtgttcaatactacactaatgtgactcaatattaaattgcaacagtattaatatatcattcattattgtgttttgaagtgacccttaccattctagctattaagaaaattattttaaagtatttagcattttttttttctctgatactcttattagtataattaaatatcgaatttaatataatttaaaaaaatattttttaaaaaatatacctaaccaatcataatcataggtactaaaaaacaatggttttctattaaccattctctaacggaaacagttaatgatgtgatatatttgggagttcctactaaggtccaggtcggcttgatggagttccacgtagtgacatctttgtcctgactaaacgactatattaggaaatgtgaatttactgtatatgtattatatttaaaacatattatgtagccacaaaaacttttatgaaaaaagaacgatatttttaaagttaattaaaacttaatgattgtgatttatggtacatccacccaaatgaattaatggggagttttttaattaaatttttaaggaatatataatatgacagtattgattttctttaattaattaatatcttgttttgaaactatatacctaatatgtatgtactttgctagtggggattattattattgagtataaaacaatgtccatattgaaactagctattcaacataaatttatatatacttttcatttgtatatatataattaaatagtgcctaaagaaatgttactttaagtcactaaaagtaatatattactataaatatacatgttttttacttaaaaaaaatatatgtggctgaaggcattagttagaaatagaaaatgcattttgtttgtaatttatatattaatttttatcccatttttttatatcgctatatatattaagttatagctaaaattatatcaattagtggcaacttaaaagtaaatattaactctccattataagaattttaactagatttatgttatatatatttatataaattgtcactaaatattaattcttttttttttttgtagttgattgtataggatgactcaatctttggttaaattagaagttatttttccattattaatttcttggaatatttattcatggctggcctggggttactatctactttaacgaatttttcaatcaatcttgtatatattattattgttgttataatctattttctttattgggttcgggactataggagagctgtatcattaggatgttgtcaattttttttttttatctaatgatgattaccgataatgtttatagtattaagaaagtatcatatcagataaattgtgatacgataggatgttgtgaattaatataagataacttctaataaatatttttcttacccattatttagttggaagggacttctatatataaatatattatttcaaaaaaaaatacataaatatatttgacaaaatatatattatgtaattaattaaataactatatatatagccaattatttaaaacttaatgacttcatgcttggtttttaacgaataaattcaagtatttatagaataatagccattaacaaatgtcaaaaaataacgaaatttattggcagagccagccacaaaatataaaggtgcaaaattattttcttttaatataaaaaagtacttataaaaaaaatatatcattttcaatataaagaaaaatgttacttttatagaggttaaagtagatatatgagaataaatatgaaaatatgtgaagataaaaaataaaaatataaatttatatgggcaaaattataatatgtgatggaaaaattaaaaaaaaataacatttatggagacaaaaatacataaatgtatatataaaaaatacatataaaaaataaatttaaaaaattcaattggacaatgtgcctccacacatgaccctatatcttttcgtcacggacgaaatccctcaatagtgggaatatgatatggtccccgaacatcataatgaatcaaaaatagaagtagatttattattgtgggaaataaaaggaacacaatttagacaaatgagaaataaaacaatgaaaatatttattatgtacttttttgaacattaaaaaactgtaatttcttatgagcataatgttctttgatacaagaagaataatccagcctaaagtgccacaaagtattattcaaaggaatagtacaagccaaagcatgagagaccgcatgaatgatggtgtgtttatgatgaatgagatagtaaagattgcctatgcctcatccaaatctagtgtactgtccaagaatggttctcaattatgcaagaatcaactaaaaagagggaagagtagtgagttgatttactcataaatgatacttctaacacaagtgtagaagacaaggacatggtacaagttttagaaatttgaacagattgaccagtgggaagaacaatggaggcaagaaatgtgaaacaaacatcataaaataaaggagacatcactacatacatggggtgtagcgtaccaatgtctattatccaagaatgagtggaaacaacataagacacaccaataaatttagaagctattggacgatctttagaagcaagggatgaatgtgattatgactgagaaatagcaaacaactgaatatgttgttgacatttagaagaaagtgtagaaaccacattctttgagccatcagcacttacttcagaaccagtgtttagcgaagctgtgagcctaaggactaaaattctgagaattatgatcattcaaattctaataattctgattctcagaagatggagaagttacatctttgaatttgaaaccttgtaaatatccacgaagttttgttgggtgttcaaccaaagtctcacattgattaaaaatggaaaggatcataggcatataaggatagacatatctctattggtataaggccttttgggaaggtgctcaagaacaataaaaacgtgagggcttaggcccaaagcggacaatatcaaacttggagtggagatggatggtgtctgttaatccttgacaaggggtatcagagtaaggtttgtaattatggcttctgtgaaatacgatgttgaaaagtttactaatacgaatgactttgaattatcgtggatgaatgaaggctttactagttaaccaatagttgtatgaggctctgctaggagagaagtctcttcctgattcgatgtctgaaaaggataagaagagactctctcaaaggttgatagtgtgaacattttgaatcttggagataagaatctgagaaaggttgcaaaagaagatacaactgcaggtgtgtggaacttgaaagtctgtatatgactaaatcgttggtgaatagttgatatctaaaacaggtcctatattcattcaagatgatgaaacacaaatatgttagagaataaattgatgagtttagcaagttgattcttgatcttaaaaatgttggtgtcaccattgaagacgaagatcaagccttgtggttgcttagttctttacaaaattcttttgtgtactttaaagatacaatattatatggaagagagtcgatcacactcaataatgtgcaatcagccttgaattcgagagagttgaatcaaattagtgaatcgaagaattttggaagtggtgatggattgtttacaaggggcggaagtgagaaaagagaaagtcactaaggttcaaaacgaaaatcaagatctaaatcgcagtctgatggccagaagattcttagatgttggatttaaaagaaaacagggcatctcagaagagcatgcctagagaggcataaggaggcggtgatttaagattagaaagggatgtaggtgtacgtagttacggttatgactcaagtggtgctttgctgttaacctctgagaattcaaatttttaatggatcttggattccaggtgttcatttcatatgacaacaaataaatcttggtttgaagaatttacatctagaaattatgggattgtgtatcttggagataaaagtcttataagatgttggggattagaaccgtcgaatgaaacttcatgatggtgaggaaagggtgttgaatgatgtttgactaatacctgatctcaaaagaaatttgatctctgttggaatgttagatgatcaaggatttcttgttaaaattgagaaagagtcatgaaagtttgcagaggttcaatggtggtgatgagggaaggaaatcaaatgggatttaccttttggaaggcaccacagtgaaaaatacaaaggcgtgtgtttcaagcaagcatgtaaatgaaatagaatatgg

SEQ ID NO: 300467 - DNA, 4427 bp, Cannabis indica
cggtgaactaggtggaaagtgcaagatcgaaaaaaattagatcctgatcccgggtatcaaaaagatctctcacaacatcttcatcccaagcacgagcttccatttgaagaagacaaccaacagatttgttggcaagagcaggatgccttgagacaacaaaactattagttttgtgagaaagccaaggatcttcaagaattaagacattcacaccattagcaattactcatagagcaccagtatggatcagatctttggctttaaggatgcttcaccaaatgaaacttggattatctcccaactcagctaaaaacaagttaccatgcgcataatactttgccttgtaaagcctgctaactaaagagctttcgttcaccaacagtcgccgaaatttcttccctagaagcgccaaattaaagtctctcaagctcctaaaacccaatccccctgcatgcttatgtttacacaaccgatcccagctcatccaatttatacccttaccactactagagtccgaattccactaaaacttagccataagcctttctaactccttacaggtatccaaaggtagaagaaaaacattcatagcataattcggcaaggattgtgttacagatttcaataaaacctcccttcccacatgagacaagatacgaccttcccatccttgtattctctttcgaagcttgtccttaagaaaaccaaggatagcattcttgttcctcccaactgagcatgaaagacccagataataaccattttcatcagcctcatagatttccaataaagcacaaataacatcacgcaattcactagttgtattgttgctataaaacacaaatgacttagaaaaatttattctttgacccgaagccacctcataagtgtgcaaaatcttctttatattatgtgcttcttcctcagtagctttacaataaatgtagctatcatcaacaaaaaccatatgaggaatgaccgatgcacctcgtgcaatcttacaacccatgagcaaaccactctgttcataactacgcagcaagctagagaagccttcagcacatagaataaacaggtatggcgataaaggatcaccttgacgcaattctcgttgagcaacaataggccccaactcctttcctccatgcaaaatggtataagaaacagaacacacacattgcattaccaaatttatccaacgaccatcaaaccccattctttccatcatagcacatagatagccccactcaattttgtcataggctttacttacatcaagcttgagagccatataaccatcctaacctctttgttttctcttcaaatggtgcataatctcataagcaatcataatgttatccgaaattaaacgaccttgtaagaacacactttgagtgtcgaatatgatagacggcataacactctttagcccattacactactatggaaaaaatcttgtacaacacattgcatgcaacgggtcttaagtcccccatatccataaggtgtttctttttaggaattaagaccaaaatagttttattcggatcagaaggaaggtgtccatgattaaaaaactgctttaccatattgacaatgtcacgcttaacaaccgaccaacacttctgaaaatagccaggggtcattccatcgggccctatggatttattcggatgcatttgaaataaagctttgcggacttcatcatctgaaactggtagcagcaactcagcgttttgctctagacaaacttgattttgcacactgctagtaacctctctccagtcagtttgagaagatgaaaaaagagcattgaaataattaatcataagctgatccaggccactattccaatcaacccaagcaccagtataatctttaagctttgtaacataattattgcgtcttcttgtagttgcgaaagcatgaaaaaacttgctattattgttcccttcttgcaaccataactgtttcgatctttgacgccaaaagacttcccgttgaacataaacttcggataagtccttcttagcttgtttgtagcttgcaattgaggcatcatcctgacccaacttccatctttgcacctcatttttacacttttttattctatctttaaagtttcatgtgaactccttcccccaaacacccagatactgcccacaaaatagcactttatctgtattctcgtcatccccacaaaactcccaactgtccttaatgacttgataacaaagtggttctcgtaaccacgcattttcaaaccgaaaccgtttagcaaaatgataaccagcagtaggaaacagttccataaaaattggtgcatgatctaaagtagaaatttctagattatgaagcttagctgatgagaacatgttcaaccaagcaagattagctaaacccctatccaaccaaacttgaatctaatgattagtaccccttccacattcccaagtatatagatagccacataactccatatcttgaagaccactattagtcaaagcttgctgaaaaccttgaattacaagttcaggatatcgattaccactctttttgtgataatgagataatacattgtttaaatcacccatcacacaccaaagaagattagaattagcagccaaagtacgtaaaagattctaagtagatgctcgtcaacttctatcaggttccccatacatacttgtaaagcgccactcattcatgcctttagtagaaactttcacttcaatatacgcttccgagaagccaagtaatgaaacttcttcttcaattttccataacaaagcaataccaccacttttaccatgtacatccacaaccaccataccctcaaatcccaatataactcgcactctctccacctgtaggcgactagaaagagtctcacagagaaacacaatactggatctcttttggatcacaagatctttaaggaatcgtaaagcccatgggttcccaagtccatgacaattctaagataagatattcataatgaatggcggggctggataccagcacccaccagattcaagttttttgatccatttacctcttgaaccgttgccacatcacccatgtcaataagcccatcactacttgccatatcagtcctcctccttttcaaatcaatgtaccaacaaacaagcctcatcattgagattattctttgatgattcctgatttttatctgtttatattacttcctccacaattatagggttcccattaaccacctttgaagaccctatattcccaccaagttgacccgtgaccctccaccatcataaggctcgtaaacgtggcacctagaagcacaccactcattgtcgaaattggccgatgttctgaagcaggtgaagttgcattggattcagttgggtcatcttccatggctaccatgaactgctttagccattttgcaccaatcatatgatttttacgttgcagcttgaccctcatcgagtccccatacggcttgactaactgaccctcaccaacctcaaaacgacatggacaaaacttttctgaatgccccacaattccacaaataaaacaaaatgtgggaagatgttcatatttgaaattagtccataactctaccccttcagtattgcgaagcttcatacgtctctttaatagcttctttacgtttaaagtcacacatacgcgaagataattcctccacaaacccaagaaattcctttcatccgattcaacaaacttaccaatataattagacacatccttagcaattgtagcagttttgaaccctgatcggagatcatgcaattgttcccacatgtccatttcattcaaggtaaccaatcttgaattctcaccctgttgcaatattttaaagattaacaagaacttattaaatgtccaagggttgcgattcatcatgctttggatgtcggtctcatgataaaattggaaaagatatcgattagtatccaattgtttaacaaacatctccttctccgactgccatagcgaagcaatcaagtgttgcatagcatcaaaatcaatcggcctttccgtcaaaaaccttcccacgatataccacctatcatcatactcattaacattcgttgcactagcatcataggacaaaatagcctcctcttcatctttaataggtatatgagcccacgtttcctcctccattaccgtatgatagctactggaagccatgaaaataataacaaatcaagaaagacacaataaggaaaagactaataaacgagagagaaaattacaaaatcatgtcaaaagacaagacagttaatttatattatttagtattattagttactagatataatttctaatgttagttatttttagtattattagttactaaatataatctttagtgttattttttttttataaactttatttttatttttaatttattt

SEQ ID NO: 300468 - DNA, 856 bp, Cannabis indica
atataaaattgcaccccatcccccaccccattacccattaaggcgggtaatccccgtcccatttgagatgggtacctacgggtacccgtccccgcgggtcaaatttccatcactactcaagagtaaggtgggggcaagaatgtattactgggtagcattttctattaataagttctaaatacaatttgggtaatatggctaccaaatagtgctagtgcacgttgttaaagtgaattcagctaagatatcggctacaaaattaaaatctctagatcaatgtaaaaaacaaacatctttgaaattattagaaagattaccaatgtcattcatgataagacccaaaaaaaaataagaagaaaacttctcgataaaaaatacaaataaataagaagatgactaatccacagggtcgatatgtcctcagccataccaaaaataagaagatgactagcccataggttcgatacattcttagtcgtttggcccacatgaatgctcaaaacaaaaaggagcaccactaacacccgaaggactaatgggtccttatgtgcttagaaggattctcacaaataaaacaatttgcaaaagaaattttcccatgaagagagtgttgacctcagattttggccaaccgatagtagagtcatattaaactgatacttgccacgtattacacaattagaactagaaagtaaaataacacaaggatttttatagaggttcggtccccttagttagcaggtaatgacctactccccttttagttgtattaatacttagatataatactattcagatcattatacatgggatctggtataaatctcttaaggttataatgtatgaatcagtaagt

SEQ ID NO: 300469 - DNA, 830 bp, Cannabis indica
aaagcaatttgaaacagttacaacttagcatgggagcttaacttcgcaacttctgcattaaattaaagcatctcgacaaacgaaagttaacataaagcacatatcctcctccacagaacaatgatttcttttcaacttcgtatttccacataccaagcatggcctgccagaggcttaatcagcaagtcaatatagggaggagcagttggactcagtcccctctcataggggaaaacagttgttatatattcaattctgcaaataatatgtctgaaccagtatggagtggctctttaacgacccctctcaaacccaatgcgacttctgccagaacctccaccctcgtagccatctcgcattgcagagcctgcagttgctttcattgtccctccagaaccaaccttgtccatagctttcttccctttcttcacctctgtcaagaactggtctagtccaaaaggatcagcctcttcagcatccttctcaaactcaactggcctatctcttggacctgccctctcggaagtaccagcaaatgccttgtcgggtttgaatcgttcagtcttcatgatcttgtccaattgctcatcagcacctccatacatctcagcatcaatatctttcttaggtctgtagagggttgaaagagtaggctgggctgtaaacaagcccttgtcatacacattgtactggtcatccgtggcaaaaccagattccattcctttgtcttgattgaataacctctggtcatacataacctctccccttccagttcctgtagaagccatgccaagagcgaccttctcactgatatcacgatctctatctct

SEQ ID NO: 300470 - DNA, 3735 bp, Cannabis indica
atttagattatgaatttttagttttttttaaaaaattaatttaaatatactaataaaaaaataatacgtgaataatattttgacatttaacagttaattatttatagaattttaaaaatataacattaccgctaaaaattaaaattatttaataattaattacttatagaattttaaaaatataacattaccattaaaaatgaaaattaaatattatattgtaaattatttcaaaaattattgtttttctgtagtctgtctattttgtaataaaaaaataatttttatttttatttaaaataaaaaaaatcaaaatgttttaagatataacttgttttaagaaattaaataactaataattaaaatatattgtttcttttttttctatttttttaagtaaaaagcaccctctatgtttcttctgtctaatttaattatgagtaaaacaaatattcaaattgtgttgtttttttgtgtgtgtttatatagctattgtttaaatttttttcagatattttacaacttttatttatctattagtggaagatattataaaattgtgtaaattatcctaagataaaggactattttgttatttcactaaaaatagatatttctttcctttggagtactccaaagtccattaacgacggctgtcttttttttaaggacacgattgtgccacgtgtcaaatcatcaaaggagaaaatttactctcgtggccactaaatttggtcaaaacgctatctttcttttttttaaaatataaatttaggcgcgtgagacttttgacccactcgccatctcattggtcgttaaaaatctttaaaaggattggctggcggtgatttttagacggtctaaaattacgataatatccacgaatgtgtgacacgtggcatcctcgtatagtggtgcggcgaatataagtgatcgatgttaaggcgtagctgacatgagtttgaggttgtttagtggccctaatttttccacgtgaccgttatagccttggatatctatattgactaatttgtttattgtcacgtgacatgacgtaacatcgtacacgtgactttttatttaagtttcctcttttttatgagatagtaaataataaaataagtaccaaaagttttatgtttgtaagcggtataaattcaatatttaattttagcggtataagtacttaatgtttgtgaaactgtaatttttctctgattatgattcggttattatcttaaacatggcatatataagacctaaattcttaatcattgggtctagatagaaatatatagtatcagttagttccaaatgttattttgataaatttaaaatagagtctgtactaacgaaactagataaaaattatagttttacaaacattaggtactttatgccactaaaaataaacattaagtttatgccgtttacaaacataaaattttaactacttatgtcactatttagcattgtttctaacatatgaatacaagcacgataaagataaatgaataggattttttataagctttaatatattttaatattatgatattaccatcaattatttaatttattaatgaacattgatggtattttattttttataataatttattttttaaaatgttattgtacattggagtatcataataaatatagtattgattgagatttttggcaactaatttatcgagtgattaatttttttaaaaattaaaatcatgtctttattaaaagataacctctattaccaaatgaggtaacaaaacaattagaatagacgacttaaaacgataatcagggcataatatagcagcttttgtaaataaatgagccaccatatttgctagttgtttaacaaaatgaattgaaacacttctcagagaattaagtatagccttacaaccattaatcacttgaccgaatgtggaaatcataacaatatagctacgaattgcttgcacaacagagagacagtccgttttgaaaatcacctgtgaccattgatgattttttatccaactcagtgcttctcaaatccccattgctttggcaacttcaggagaactcgacccctggaatagctttgtgcaaccttctatcaagaactcacctgaattgtgtgccacatacccagcaccaaaactccaggcatcctcaaacaaagccgcatcaacattgatcttaatactatcaacatgtgggactacccattgctcagccctatctcccgataagaaatcagcaaacaaaggatctagatgttaattttgagcaagtagtcattgcttaagatagtttgttgctgaagaaacgatgctttcgacacccacaatcttatttcaccaaaccttgtcattccttgcattccatatggcccagcaaatagccaccaacaactaaatacgatctgtttccaacaccaaaaactgagaaatacaccagccaagaaaagaggtacccgactgcaatgtggtacatatcccccacccgattcccgcacatagttgggcttgaagctaaagcatgtatgattgtttcatcctcaagtgaacatcttggacaaagattagcaacatcaacatgctttgatcttagctgaaccatggttggaaggcaacatttaccagctctccacaaaagatttttcattttggggggaactttgatctgccaaagcttcttccaaaactactcctccaacacatcatcgacattagcgacactaatcatctcttagagcagccggtaagcactttttacggtgtataaaccaaacaactccttagaccagctcaagatatcagcaccactcgtcacaggtagcaataggataagatgtcgatccctctattcaaacagattggcaccaatttcttcaacccaactcgagccatcaactgtcataatgttacacaccttagcatgtatgagacttgggtgattagaaattaccatggggttagtctcatcgggcagccaaggttcgctgaacaccgatatatccccactgttcccgactgtacaatgagtccctttgataactaaattttgcgcctccaagacacttcgccaaacaaagcttgggttggagccaatagtagcagtcagatacgatccatgagggtagtatcttgcattaaaaatctgagcaacaagagactcaggtttagtaatgagcctccagccttgcttgcctaagagcaccaaattaaagtcctgtaagtttcaaaatcccatttcgcccttactttatggcttcaaagccgcttccatcgagtggttaatgttaatagagtgtataagtagtgaaatttctacgtgattcatgcattaaaaagtcttagtccacaagtcacttgtattgaaattgagagttataattatgacagagtgtttagacgatttgacaacctttatctaaaattcttcccccttttatagtggacatgtcttcctatttataaaaaaaaatgtggcttattcaagaaggcaaaggcccatttatcttacaatcactactacgaaaaagattttttgtgttggtcaatgtgtttggttaaagtcattgaccggcgtaaaagttaaccctcacttttttgcttttattggtaacatatgcaaataatgattaatttgcttcagttgtaactctgacactaaaataaaaactaacgctaaagatataaaattaaaaaaaaataatatcaataagcttttaccgtcgat

SEQ ID NO: 300471 - DNA, 2611 bp, Cannabis indica
cataattataaaatttgcattcaaattccatataatcacatagagctcgaaacgagctttccaatgacatgcagatctcccgaaacggagttcgaatcacaaagatacgagcattcgaatatcaccgttcgaatctgtctagaaacaaaggggcgggccgcggcactccccacatggggccgcggcacctaggttggaaacccaagccaccaacagaggctggccacggcgcccaaagagtggggccatggcccctgggtttcaaactcaggaaaccccaatttcagcataggaactcaagccaaaaacctcaaaaaactcacaccaaaaccaacacaaactcaactccaatattcacatattatagctcattaaaatagggagtaaacacactaaattcatgcattaatttacaactgaacatgcatccaaagtctagattaacaacattcaagctaggctccaaacattaagcataaatcaccacaatttcaattccaaaagcttgaacaaccaagaataacaaatctcataacctcatgcttgaacacaactaaaatcaaagccaacaatcagatattagacacaaaataaccttaaaatctcacctaaaacatacaaagaacactacacaacaattcaacaactcaatcatgcttcaaacaccacacttaatccaaattccacctacatgcatatataaacataaatacaagtagaacatgattttcaatctttcatttctgcagcaaatttaaaattaaagatggtagaaaaactacctcaagctccttcaaccttaagcaccaagaatctacacactccaagcttaaatccaaggtaattttaagagataaatgaaatttttgagatgagataaagagagggagatagggtcggttcttggctgagaaacaactagaaaaataccttcaatttttagtcgaaattccctttgttgcaaaataagtcaaatgtcaaaatgattaaaatgcccctaggaccatataacacacatacatacacttaagggcaataaagtcattaatcacgcacacattgttttaaataattttcaagatgttcatataacaataaaatgccaatataaaattccaaacccggttcggtccgaaatacccgattgtgactatatcgcgccgacctatcagaaaacacttgaaaaaggacacaacaagtatgctacataataatatagttcataagcacgcaattaaattaaatttacagttttacccttctcaggtcaaaattactaaaatgctcctggctcaacaacggggtcttaacatgtcatttatcaaagtaattcacatataataaattatataataatataattccataataaatacatatttaactagttagattttgctaattcgttctcttaatcttaggatattacactagagctggtcaattcccatgattaagccctagggccggccaggtctcaagcaagacctcccaggccagacaaggttattttttaatccaaatgggtatttttttttcaaaactcgaatatgtgcctcgtattctttatggctcaaagagtcaagaatcacaacaaggcctaaatcgaatattttccatcaaaaagtcacacattatatattccaaaatggtcatgaggatcaatattctaaagagattacaaactaacatgagaatcaaaaagtttccaaaagcttaaaaggcttaaacttgttaatggcaggtacaaagaagacatatccaagaaagagaagatgagacgtatatacagagagaggattaaagatctaaaagcatgccatgcaaagagccaacacttggctagacaaggctaatcgacggagactactacaaacaagacgagagctagaaagtctctatccgaccagatgttcgaatagggacttgggggacaaatgatatcttaatttttttttcacctgacatgacatgtccacgtaagccaaagacacagtacatgtggaatataaccttgccaatagcaagaaaggatctccatataaggtatggcaaaactgtcaagcaacaactgaagggagtgaaacgagccatcaaaaagttgtaccaatgtgtctagccgaccaagagaagcctataggctggccagagtgagcttgtatggtcggccaggaatcgagcacaagttggccgaccgcaagctgatttccaaaccaagggaacctgatctctataaggaaatgatgcacaaagctggcctccacttgctaaaggctggcccccacatccaaaagctagcctcctcttggtaaaactgacagtgacctgcaggattctggcaggcacatgacctgccaggtcttggcaggagcatggcaggccagacctcaacctacagaccttgcatggtcggctagaccatatcctgcagtgcataggcagccaagattgaccttgcaagatttcttgtacaacttgatacgtggactacaagctacttgcaaatttggcccttaacagcccaacaaactgatggaaaatatctactttcaaagggtaatttagtcttttgtatttaatcaatttaatatgtaaatatctaaggaattca

SEQ ID NO: 300472 - DNA, 2246 bp, Cannabis indica
tcaaggttttcccttagaaatttgatcaaagaggattttgttttgctgggtaaactttgacctattttaattatcctggtcaatatgtgggtctatctctacatcttataactcttctaccagccctatgcttatatcagagtccccaaagaaaggatctgtctcatccttcccaccttggaagacttcttgctttatttttagtttgtttggcctttgaactttgatggaattattcttccttctttgccttttcgagctcgatgttgtaacattcgcaagctagacaatagtatccttttatacacccaactccattcttagtagggaattttatacagaggtgataaatggaagttattgcctttaagtcatagagagttggttgatcaatcatgatattgaattttgtgggcacgtcaatcacaagaaattatgccatgacagtgctactagttggcactttttgacagtgagggataggcgaactactcctagaggtgttatgctaccctaaaaaaccatagatgagttgtgcacaaggaactaggtccttgagccagaggcccactttttcgtatgttgtcttgaaaataatgttagatgaagccccatcatctgtcatggaccaagctacggtcatgtttgcaatttgcacctttacaactagtgaatcgttatagggatagtggacatgtgtagtgtccgcaacactaaaagatacaatttgttctcaaggtgaggttgcttaggatttcgttcctcgacagccaatgcttcttctttctgctcgtgctagagtgttcaagcatatatttctcgttcttttccaatgttcccagctataaggggccctcctacaatcacgttcatgtgcctgtcaactggtaggggcattaaacaatttcattatccccttgcttgagggcctctattgttttggtcttaatgcatcaatttaggtgggaattatttctccgaatgagaaattcaatcatctacttcaggtttttacattcattggtgtcatggccaaagtcttggtggaaatgacagaattttttgtgtccctcttgtttatatctttcttaataggagggggtcttttgtatggtacctacaactgggtagccatgcagatgttttcttaagtatcagtgaggatggtgaaggcagtaaaccgaggagctctttcatgaggattgggcttgtagttgtgggcattggtgaattttccctactttttattttcaacattattgatgttgccatttctattgttagaattctttcccccactgctatttcacttattataattgttccattgcactagggaatttttcttattttgggcgagcactataaaggctttgctcgcctttggtttagagttgtgtacactgtcaaccctttgtgatggctccttgagttttatgaactcctctgcccagtttaagaattccccgacggatccaacaataactcgcttgatgtccgaccaaagtctcttttttggctctatgcctaccagcactgtagccaggtgcccttcgttggtaagagatttgactttggtggtctctatcatgaaaaactggaaatagtcttttagtggtttccctggttctttctttactttgaccaaaagtctttgaggttagcaggtatctggcgggagaggagaattgactataatcaaatacaaaggcattcctctaatcgaatttccccagtggtagtttgaagtaccattgttagtttgactctatcaatgttgctagaaaaatcctacaactggcatctccctttactccttctaggtcggttagaattttgaaatatttaatgtgtgacaggggctcttccttccgaatgtacatcttccaggtcggcatattaaatttggtcgggatttccaaagcgttaatattgggggagaatggggaatctctactctgatcaagttcgaggtcagtgagttttgggtcggtcaggctttgtactagctatgtaagtaaatctagttggggttgcatccctgaatttacataggcggcttgttgatcatcctacgccattggtttccccatggagttttctttggtacgaagcttccttaattggttttcccaaggaaggatgtagtttgaatattgattctcctcttcaatttagatcatctttgagttcaccagcagaccttggatgtaacaccctaactagcataggcgtattacgtgatt

SEQ ID NO: 300473 - DNA, 4297 bp, Cannabis indica
ggcagaagatggaaaatcctgatttgcgcaagtctatgggcatgaaacctgatcaaaaaggtgttcgcattaaaagaattgatcctacaactccagaagctcaagttttaaagccatctgatataattctcagctttgatagtgttcatattgccaatgatggaacaggttagtatagatttgatgcatctatgtttgttattcatatataataataagataaaccgtgggtgttgttgctgtcattattccccatgaaagaaaattaatagttatagaatatttttcaacctgtactgtttattattttgtggggcttatttttccttttaaattactgaggaatctttttgttttttggggcgtttaacctgtatgctttggacattgaatttggattaataaccaaagcatacaagtcaatgagttacaacttacaagtacatgtgtcccgagaagatatggaaattgtgaatacggaggaaagcatgtatgagttacaacttacaagtcttattcttgtcttctgcttaatgtgtaatgtcacttcaaatccctttcttttgttgatttttcagttccttttcgacatggagagcgcataggttttagttaccttatctcccagaagtacactggagataatgctgctatcagggttttgcgcaactctgagattctcaattttgatattgaacttgtaacccacaaaaggctaataccagcacacaatagaggaagacctccatcatattatatcattgctggatttgtttttacgaccgtgtctgttccttatctccgatctgaggtgtgtaattcactttcaattccattcaatcttttttctttttcctgcatggcaatttgttttctgtatgagctctgttctatactgctgaataagcctcagcttttgtagttaggtttgtgtacaagtttttgtaatgtttcggagcatctagaagttgatttacaattcctattttagaatcaactacaaaaataattccatttctgtttctatattatctagataactgtaccaataatcatcactagtgtttctcatattttgtttttatggtttttagaactaatatagttcctttttcatgtgtcttggctcatgaagaacactagtagtttattttcagaatatttaaacgaacttggatattaatttccctgcttgtgttttacagtacggaaaagattacgaatatgaagccccagtgaagctattggataagctgttgcattctttaccagaatctcccgatgaacagcttgttgtggtttctcaggttcactttctttttctctgaagttatgcactgtgttacaatggcatactcatttttgtgatggtattttctaacatttatttctggatttggaaaatctttttaaggtgcttgtggctgatatcaacattgggtatgaggacattgttaacacccaggttagggttggcaccaatataaatatgaatgcagtttagtagcttaaattgctttacagagtgaggtattgaatttatttactattttctttttctaatgcatgcataggttctggctttcaatggtaaacctgtaaagaatctgaggaatctggccaacatggttgagagctgtaatgatgaatttttaagatttgatttggaataccaacaggtactcggctcatgtcgactttgtgtttgcacttgtctgttcggttagtgcatattgcactttcttaaattcttacccttgtgcagatagtggtcctccgtacaaagacagcaaatgacgctactctggacattttggcaacacattgcataccatcagccatgtctgatgatctcaagacataaaattcaattgggcatactagatactaccctgagttgctgcttcttgcaggcactagataaggaattttggattctttttggtgaacatgtagctgtttgtataccatagtaaattattcgttaacctcagcttaagcctgtttcattctccggtcaaaacatgtaggcctagaatcttcattgaagctgatggaaaatatggtaggtgtaaaatctagaggcaatcctcaaattttgatagggcattcaaattttgaaagtggtggcctaactaattttatgctgtcaagatcttcaggttgaggacatgtttcatgcaagatgaggttgggcccaatcaagaagaaaaaagtgcttttgctcttatattgcatatatctattctaaaagaagcatttgctatatgattatttagtaatttattataaagagcatcaaccatgcgcattgcctggttcagacaaaattaacaaattcaactctggttttgaagtaatgttagtaccttgacatctttgacttttatttaaatggggatgtggttagctttctaaaagtggggactgtggggagactgactgcaacccatcaacaagtccatgggtctcatcctttccctctactgattgcgaccatattactccatagaagcctataacgattaaaacagctccaataacactgtcagaaaagaaagaaagaaaaaagatcagaagtcaatcaaaacatagtcgaagagtttatgataatggataaatcatgtgctttagttgccgatatggaaggtggtattaccttccaatgtaaagtgcctcgccgagaaaaatggagcttataaaggcagcaatagcaatccctaaaggctggaacattgcagtaaaaagtgggcctttcttttttatgcaccatgttatcacagaaaagggaaccacacttccaaaaataccctaccaaaaaagttaagtttagcaaatgactactaaataactagtcatattctgatcacattagtggaattgagagtgagaaaatgttgtgcttactgaatagaggacagagatgagctcaatattaggtgttagtgcccagacacttgaaccttctcccacaattaaagtaagtaatgcacactgaatggttccaaagaagaaataatagaagagtatggttatctctgatgggtacctttcaagaattgctgccttcaaacataaacaagtttcataaaagtttttggataagaaaaaatgaagagaattagataagaatatacctgaatgaaacccaagaagtttttatttaattgaatttacctggccaatattccatatggaaaaacataaactaccaactacaattataaggcctccaaatatccaattattagttgctcccaaaatcatggagacagagtttgttgaataagtattttgaccagaatgcaacaatggaggcaaaattgctggacctttgtatatggtgatgatcagtgctcctgcgattgaaaccacagtgcccatgactttcatcatcccttttcgatttttcaaatccaacttttccattctacaccaaacaaaacaaattataagtcatatgattgggagagaaggactttccgatctctttcttttctcttaatctttctcctataagcaataaataagtacttgaagaaaacagctagaatgaaagtgaaggccggagccaggctactcaaagctgattcaagtgttggggagctatagcttatcccagcaaatgcacaattttgcacgagagttatcctgaaattttaacaataagaatttttattttttttaaaatatcacattatgctgataaccaaattaaagaagaaatgctacttacccaacgaagctaaggaggaagaatttagagagaagagagaaagtgagtggggttggtgtcttctttctgtgacttagaagaagaaaaatccatgaagggatttgagtggttatgaaagaaaattagcacatatatatatatttatagagtaattggtgaagttaaatacctatggcagatgaagatggggaggaagataatagtggcaagtgcatttgtgtagacaacaaaagcaaagtgatcctttggtcatagctgctttgctcattgtggttagacacaatatccaggcattcaaccatcaccatggctgcaaatggtgcaaacccttttaaccatgctcccattattcccatctctatctttctcttcttctctaaatatcctcaatttaatgctagactttgcaagctatatgtttgtttagtaggtaagttgtcctatggcgttgactaaatttctattttacttagagctaaaatctaatattttttttttgtaaaaatctcaataaaaaattactcagcaataatgcacttcttctgaaattttctttcccat

SEQ ID NO: 300474 - DNA, 3132 bp, Cannabis indica
tttaaaggggtgcattgttaattttcctaaaaaaaaaaacgacacctagttctctaatatttatgtctggataatacaaatatttcaattatattagtagttgaaagaaaaaacaagatgagcctaagcaccataactgccaccaccaccaccacaaatcttccttatcagttcaaaccagagggcttcagtacagaaacctccacgcccacatcccatctttctcagaaaacaatcttatctatcttaaacacaaaatgtataaattctttacatcacttaaggcaagcccatgctctagttttaaaatcaggccattttcaggaccattacgtagcaggaaccttggtgaaatgctatgtaaatccttatttcaagaacttagacattgcactcaaggtgttcgatcaagtgccaaagccaaatgttttcttgtggaatattttgattaaagggtgtcttcagaacaatgagccattgttggttgtgttgttgtactgtcaaatggtggccgcgaattgtaggcctaataagttcacctttcctgcggttttcaaggcctgcaatttggtgcaggcggcgaaagaaggtgttcaagtccatgcccatgttgtgaaacatcagtttagcagtgatgggcacgtaaagagtgccgggattcagatgtatgcctcttttggatatgtggatgaggctcggcggatgcttcatgaggctggggattcggatgttatctgttggaatgcaatgattgatggttgtttgaaatttggtaatgttgaagcggctaaggaagcgtttgaggcaatgccaagaagaaatgttggttcttggaatgcaatgataagtggttttgctaggtgtgggatggtagatgctgcaagggagttttttgatggaatgagtgagagagatgaaatatcttggacagctattattgatggttatgtaaaagaagggtatttcaaggaagccttggaagttttctatttgatgcaaagagaggaaattaagccgggaaagtttatgttatcgagtgtgttagctgcttgtgccaatgttggagcatttgatcaaggaaggtggattcatgcttatgtcgaaaggaattcaattcggttggatgctgtattagggactgccctgttggatatgtatgctaaatgtggccggcttgatttggcatgggatgttttcgaaaagatgaaacacaaagaaacttttacttggaatgccatgattggtgggcttgctatgcatggtagggcagatgatgcctttgagctattctctaagatgcagtggaaaaagtttaaaccagataagattacattagtgaacattttaaacacttgtgctcatgcaggcttggtagataaaggtattaggattttcagctctatgaaaagattgtatggttttgaaccagaagtagagcattatgggtgcattgttgatcttttgggtagagcagggttacttgcagatgcagaggacttaataagctcaatgcccatgagaccgaatgcagctgttttcggggcgctattaggtgcttgcaagatacatggagatgttgaattgggtgagagaattgggaaaatgttgcttgaattagagccacataacagtggtcggtatgcattattgtcaaatatctatgcaaaggcaggaaaatggaaagatgttgaaaatgtgagaaaattgatgaagcaaagaggtataaagactattcctggaattagcatgattgacttggatggtacagttcatgaattcaaaatgggtgatgggtctcacccacaaatgaaggacatttacttgatgttggaaaagatcatagagaagcttcgaatcgaaggttattcgccaaatactacccaagttttgtttgatatctcagaagaagagaaagaaactgagcttcagtaccacagtgaaaagcttgccatggcttttggtctccttaacacaactcctggaacaacaataagaatagtgaaaaacttgagggtctgtgaggactgccattctgctaccaagctcatttcgcagatatataaccgagacatagttgttagagaccgcgttcgatatcaccactttagaaatggaaaatgttcatgtaaggatttctggtgaatggttttagactaaattagttgaaaacatctctttctggtggtggaacatatagctaaaggtggaaccagaaatttgattttaaggcagttctgtgtaattaaattcagattttttacatcagtgatgttggaccttgttggttattcaagctcatagttcttttttcttatatgaactgaaagtttaatactacttcattggcttagaagccttacaaccatgaatataacatggtcaactcaactgcttacacattgaattcaatcatagaattacaccgaatatttatagaagttcgaaaatataattcgagttattaccacttagatatttatctgcaattaagagtacaaattatttcttaagatgttgaacatcttaatctactttaactcattattattttttctactcgcattaaatctctaataattccaagagaatctttgttaactcggaggatctaatcataaattacttacaaatttacttaagcatttgaaaaattaaagtggaattggatttttgtttaattaaaggtaattatataatttgatatgtttgtttgactatataattatacaataattgtgtaattagatgcaattgagaggtttaaattatactttctaattctcataaccccaataaaaaatgagtataattattaatttttttttatcataaataataattattaaaaatattatttgtatgtataattaataactatttgtcaagactattaacaattcatatgtaattactaatgcaacctttttggagcaacaatattcctattgaatcttattgtagaagtttaatacttaagctcaatatctccattttgttactcttgtgggtctagttcttagggatattaagacttcgtgtaatattgttaatattgttagttttcatcttagcccttttaatgtagtaaataatactctaattatattgggaaatttacatatatactgtttt

SEQ ID NO: 300475 - DNA, 1017 bp, Cannabis indica
agagagagagagagacctgagtggtgagcatgacaatgaaggcaggcaaaatagtgagactcctcttatacaaaagtttaacagcagtcaatatatgagcagcataaacagtcccagctccagaatttgcaaaaatggtgatcaaaacatgttctttaatattaaaaggacctggattcatagtaaactcaaaaggggtgccttgaaatatagccctagtgggaagagacttagccattagatgaccaagtggcacaacagcaatctgagcagaaatcgatgtaatcatcaatggttgagtcctgtaccaaaaaaactggttgataaacgataacaccacacatgcagtcaaacccaaaacccacatacgaaaagtgagaactggcattgttgggtcatccgttttaggcaccgttaaatccacttgtttaaccacacactcatcatcatcatccttgtctacggacctagactcgtccaccattgttgcagagcttcaaggaaaaggagaaaagaaccagaacccagagaaaaaatatgggatctgggaaacagtctgaatgaatctcaccacaatattggtttgtatgcgtgtatatatatatatatatatatacacagaatactatacagtcggggtttaaaaaggtagtaaggaattctaatttaagcaaataataataattaattgagtaaaaaccgtgattatatgccagccaagttcttgataaatatttaattttttaaaaagaaaaatcagaatataatattaaaaaattatataaatgtaaattttttttttcaaaataaaagagtaactactatttgttagcagttgggtttattaaatctaatgtatataagaaaataaaaaataaaatatcgaagtatgtataagggtataatattagaaaataggtaaatattattttggatgttttgcaaaaattataaattggactcttgttaaatgacaaaatggaccttgtatttctaaaatagtaaaaataggaccct

SEQ ID NO: 300476 - DNA, 1644 bp, Cannabis indica
ttttaatatttttacaattttatttacgaaaatacggtctttttatgttgtactcttattaatttgttgttaattttttgttatttatgtgttattttttattgttgttttgatgttatttttatattacttttatgtagttttcttattattttcatgttattttatagattatcgtaaaaatgtaaaaaaaaaaattataagcgtaaaaaatataatttttatataaaaataatacctcgtgtaattatttctaaaaattatatataaaaacttttacatatgttaaaaatttaaatttttttttacaaaaatacgtacaatatagaaaaatttacacttttatacattgaaaattttttatttataaaaatatatttttcagtaaagtaattagtttttttaaaattcagaatacctcatggatacccttaatctcaagtaactcaaattaatgccacatctccacaaaaacacactctcatagcttcaattagaagccccatatgatcacgaactaccattctaaaaccaaattgaagagtattagcaagcaacgcaacattaatattaatcttaatttgatttattgaggtctcaccttataaactttagcaccatcttgtgccacaccaatcaacaaaggtgcaaaatgatccatagtttgagcatttttctattatttaagatacaatttagccgaataaccacatcacttgcactaaaaattttcttattccaaacaaatccctcgccagatagtccaacactccaacatatataagatagcttagcccgtctcttagcaaaggtaagcttaagcctgtgcctaaggcctaaaaaatatccttttataaatacacattgttttttattaattttgaaatcctatatatttttttttaaataagaaccattttcagtttcactgtccattaaaattcagaatcagccttagctacctccccttgcctttcctttcctgatcaaaccaaacagagaaattgtccacaacaacagtattcgtgttaattacatgcgtacaaaaatacaaatatgtataatttgaatgttttaacttaatttttagcgtaataaattattaaaatttttctaaaaattaaattatatataaaaatacaaaggaataaagacacctgtcataagccaaaagtggtgccctaaaattttccgaaataaaaataaaaaagcaactttgtaattttctaatataaaacagcgtggttctgtgagatatatgaccaaccgataatccaaactccttattacgttctgagcaaaaactgaaaaaagaacttacgaaatcaagcttattggctttcccttctttctctttcatagatacaattatatatttatatttttttaatttttatgtttaaatttgttttcatcgaaatcatctctcgaggtagagaagagagtgaatgagtggattttataaaggtcgaaaatgggagctactttttaacaagtgtagcagaagaactcacttccccaaaacacacaaacacatatcttattccatttctccataagacagcaaaccaaaattcacaacaaaaaacattcttttttaattattattatttaatataaaaaagaagaaggagaagaagaaga

SEQ ID NO: 300477 - DNA, 2202 bp, Cannabis indica
atttcgttatatttagtataagaattttaaaatttttttttttggtacaattgtctttttatattaccttgatcaaaggcaaaaaggtggtctctaataagaccctgtccatatccgcaccagcaccagcaccagcacccgcaccagcaccagcaccagcacccgcacccgcaccagcaccagcaccagtccccgcacccgcacccgcacaagcacctgctcccacactcgcacactcacccgatgaaatagagatgaatcagtattataaattcttaagtccgataagagatcaaaaacaaaaacgtaagtattaatacaattcaatttatatacatatatatgctttgtatttcaacactaattttctttcttttttctttaatttcagcttattgtgctgcatttgctgtagttgcatgcattgaggctttgatagcacaaagatatggtatcaggaaaaagttatcaatacaatatttggttgattactgctacgatagaaaaaggaaattaggacttaaaactgatattttacttaattttatcataaaatatgggatatatactgaatctgattatccatatgatggagaaattaattatccacgtccgaaaaaggtaaatttatttatttgtttaaagcagtacttaattttttattattattattataataaattttaataatatgctaatatagtaatacatgctttatatatataggataaaatgattaagagaatatttcccatcaatgggtatacaatggtagtgaaagaaaaagacatcaagcattggctgaaaatagctccaatgttaatatcagttgaaacaaatggtgatattaatcatagttgggtaagaaacaaatttattcatttatttatttttatttgagtttttttatgattaaaccctcttaatctttattctacttgcatataacttttcgagctcaaattttttagtggtaaaatcttccaaattactcaactcttagtaaatttaagatgttatctatttctcaccgtttactgccaacaagaattgtttgtgtgtatactcttgtacatgtcgcacgtttacattggtactcttaaaattattatttaaaatttataatatttttaatttttataatgttatttaatttaaaaataaattttgaaataataatattaggtgtactaatataaacgtgtcatgtatacaaaagtgtacattaagtaatatatatttacagttaagcgaacgacaccttaaatttattttggaagtttttactatcaaaagttaaagattgaaaaattaagtacaagtaaaataatatttagaagggtttgattgtcaaaaattcttttcattatatattataaataaaattaaattaaattcaaataatttatattgaatcaacatgtttatttaggatatttattgtcgaaataagtcacaaggaaatgataaacgtagtggtcatctcatggtacttattggatgtggagaacaagagcgtccttattggctttgccaaaactcacatggagagaattatggtaaaaaaggctttggaaggttcttaatgaatagtacagataattacgttcaagtatattccctacatctttcaaaaggtaatttaaaattaatcaatttattgatttgttggcgtttaaaatttaattagtcattttgtatgtgtatgtgtgtctattttgaaatttaattaaatttgtgagctagataaaatatttctactaaaagtctcatgcattcttttatgtttatttgtttctttaaattgtattattatttgtgaaatttcaacactctttttttgtttttctttgccagattattacacagaagtgttatctaagagcctaactcataataagatagagatcaatcattgcaaatacttaagtccgataagagaccataatacttttaactgtacggtaaaacattaattacatatacatataatttgagtgttacaattattattattattattttgttaatattattttaggtcttatattttttgtaaaaattattgattagatcttttattttgttgaatgacgaaacagacccagtcttatctaaaatagtataaataggatcctaaactcaaattttgataattttttaaaatataatcaacttgaagacaattcctaatacgaatag

SEQ ID NO: 300478 - DNA, 5608 bp, Cannabis indica
ttttttaaccatagtggatgaccattcaaggcacacttagttatatcttctaaaagctaatcagatgcctctttggccatacagaactttttttcagttaatacatacttaatataaaacaaatataaaatcagttcgaacagacaatgctaaagaactgaaccttactacttttatgcaaccaaggggttttccattataattcttgtgtgggtagaccacagcagagaatattgtagttgaaagaaaacatcagcacattaaatgttgctcgagctcttgcttttcaatctaacttaccactgccttactggagctttatggtaacaacagttgtttatcttttaaataagactccttctattctattaaaggataaaacttcatatgaattactacaccacaagccacctacttacacacatcttcacaactttgattgccttgtatatgcttcctttgtcaccaacataataaaattctctcctcgggctagaccatgtgtcttcattggctatcctcacaatatgaaggcttgcacccttcttgattttcaaaccaacaaaaccttccattccagagatgttattttttatgagaatatatatcccttttcacacatacatcaaacacataacatttgataagtttttgtttctccttccccgtcttctcctaatatagtttatgagacaaatcaatctcaaccaaccattcttgagaaaaatcaatccaaacaacatacccctgagaccaatccatctcagaacaacaatccatctccacaacaacaaaacaaagcaccaccaaatcaggtcgtgcacaccagatacctccatgattacaattgtgatttagttctcaaaaattctagtttagaatatcatcttgccaattttttgtcctatcaaaagttctcaccacaattcagagttgccatccttgctctaaatatgacttctaaaccaacatcctttaaaaaagcatccaaatacaaagtttagaacagttatatggatgtcaaaatagatgcccttgaaaaaaatcacacttggattgttgtacctttgactccaaatcaacttgtcattggcaataaatggatcaatctcaggttgttgtattttcttaggtcgctcactcattttgtgaaaattgaagaaataactaacaatctcgagatcatcagccaaagtagagtatcgagtaatggcaaatgctacctatgagctcacttggctcacatccattctcagagacttcaacatcaatatcaagcttccttcgattctattctgcgacaacaatgcagccattcatatctcgaaaaacccactttatcatgaaagaactaaacacgtcaatatcgattgtcacattgtccatgaaaaaaataataaatggtaccctgaagatgaaccacgtttcttcaaaagccaaccttccagacatactaacaaagtctctattcccttctcccttcaaagaaatcttatccaagatgggtgtgacaacctctacactccatcttgaaggggcctactaggattagttaggaattagttaattctgttatttttctgtttctacagtttagcttttctttatatgtatatataagactcttcattgtaccattccattaattccaattaattagaaaaattctttctctttcagagtttctaataaagtcgtgtccaggtttttgggagggtttagggtccagtgttcgaggctgaggttttgggtctggggttgtggcttagcccaaggtccgagtctagggccagggttcgggttcggagttcatggcaaggactggggtccaagtctgagactagggctggaaggttcgggtctagggccaagactgtagctagggtggtcggggccagagttgcaataggaatttttatacgattttttgttgtgatttaagttgcaacgctagttgcaatagagatttctatgtagacttccgtaaaaataaaaaataaaaaactattttaaagtataaaaataaaaaaaatccctaaaatttattagtctgacatacgatcatgaaaatagttagactaagaaactcatctaaatgcccaaaacaaataaaaatatttaccgaaattttcctgcaaggaggtcatgtacaacagatttttttcattattatatagtattattttttaaaataataataataaataaataaggttgtataacataacatgggaaattggtgggatgcttccgaaattatttatttatttagaagagaaagaagtaaatagtacgggaagaaatgttatgttattagagaaaaaaagagaggtacatgaaagagatatgggagatagagagggaccgagttgtcctttgcaatggcaacactttggaagttaacccaatgggattgcctctctctctctcttcactaccccaaaacacccgtggtctctgtcctatgcccccacatgcccttatactctctctctctctctaaccctttctccccataaatacacaccatctgttgatcctaaaaactcattcacaacacaaccctttcactactacccttaaataaataaaaccaatattcccaaactaaccaaaatctcaaaccatggccatccgatcaaaatccagcagcagatcagtgctcccacaaacggcggtgctaaaacaaatcctgaagagatgttctagtttgggtaagaaacaacacaacgaagactacgacgaacaaggcctccctctagatgtaccaaagggacattttgtggtgtacgttggggagaatagaagtagatacattctacccatctcattcctcaatcgtcctgagtttcaaaccttactccataaagctgaggaggagtttggcttcgatcacgatatgggtctcaccatcttgccaagaagacgtttttctctctctaacttctactctcagatgaatgaatgaatcaatgagtcatccttttaaaacgacctgtcgttccttttaacccctctcccatctcctagtactagattttccttattttctttttgaaaaagaaatggggaataaaataggtgaatttctttatcttaattttttttcccattttcttttcttactttttttttagggagtaggggtcggttttaaatttatagtgattctgacccaaaaggaaggaaacccattgagtagtaattaataggtgggtttgaactttatttagaatgtaaaattataatttagacatatatgctcttgaaaattttcctcacggcggtgtaggccagtaagtacctgtactgtagtggctgatttgataccctgtgagagaactaatgccaaggatcggtttatttttattatataaattttgtctgttatttttattttatttgttttggttgattgatttaggatattatttctcttattttgatgattttgtctgatttgcccttatcttccgctgaattgtctccggttaactcaacagttttggccgttaaaactgttaaaatatgattccatttcccaaccaacacacaaaaacttacacggaatgttctcccacggaccaaacaataattaatcatattatattcttgctttggctttcaattaataaattatttacggctcaactctttttcttttaaaaaaatttccaaggcatttaatttaaagctaaaattgtaaactatacattagattcgattttataaagtgagaatagatcgagtagctaactctatctatgggtattaagcattaaaccaaaattaaagtaattggatacaattgttaaaagaaaaataaaatgtttgatgtataaaaggcacgtttttacacctttctttgttccgttaaaataattgggtgataaataaatccattagaattctatattaaatattaatttttaattaattaataaaatatttcaacattaatagtgactattttttgtcatctaattttatttcttaattgattatcaaatattttaatagttgattgtggctagaggtacaaatctcaatcatctattttattatatacaaaatataaatatattttttcataggcatataaattcattttatcaagcatgtacacttttatatattaattggagggatatttacggtgattttttttttaattgttaaacatatgacattaatcaaaaatagtagtagcaaaaatattttaacttactcttgtatcgcaacagtgtgtctttttctctgttaaatgtcacttaagagacatgtggcgatatattattaggtcaaatgttaaattttagtattaaaaaaaagttttagaaataaatttaattagttaataataaaataataattaaatgactataccttattaattttaagaaataaataatttactaaaacaatttttttttaagaaaaaattgatcaaattatttaatttcacaaaaaataaaatagaatttgaaaaagaaaaaaatataaaaaatctatttataaatatatatatatttataaaaaaacctcataatattatatacatataaatatttggtagacgtataataaaaataaaaataataataataacagggacgtggcgagcggaagtataaaatggtggaagaggattgggcctgatagttccattacagatgaagatttaagttgtgcccccaccaaattcgatgcttcagattttaaatccacttcgtaattcacaatgaatcatctacaaaatatatatccctcttgtagttgaccctttttttaaaacaaattttttatatgtataatatacatatgttaagtatggactttgatgtagttcgcacaaacaaactgccattatttaagtaattttataaattttcacatatataattttataatataattattataattgatgtaattatatagaacttgaattttgtcgatcggtatgatcataaattctgttcaaccaaataatgtatattaacaagtccgatacagtaacaatgcaatatgcatcggaatcggattgcatcctctgatctctctcttaggtataatttaaactttttttgagagaagattagggtaagtggtccacaccccaaacatggccttaaagtcgatatgtggatcccgctaccctccatttcctggctacacttcttcttcaccgttggatctcacttttcattgcatggacggccagggctatctctcaaatctcctttttttaattcctgcttcaattaattattgggagttatatttgcaccccataaaattataaatacacctattattaaaaaaaaatataaacttaaataatttttaaaaaaattactcttaatatttttttaaaattttttccttcacgttattttatgttaattttaatacttattttgaatttattttccataattttttctaactcatgtaaatatttatttatatttttcttaagaaaatttcattataattttttattttaatttttttgttctataattttttaaaattataatttaattttgttttgattaggtatattttttaagtaatataaattgtaaagaaaaaagttaaaaat

SEQ ID NO: 300479 - DNA, 1274 bp, Cannabis indica
gttacagcttgtattgtttttaaacattgttagtttgtattttataaaactatttgcaaattaggttacacttatacaaatttataagcaaaatgtttttaaaatttaattaaataaaaaaaatattaccaaacaacatttgaaatttataagctaatttaataacaaagttctaattatgaaatagtataaactataagccaattctcaaaccagttaacctattaagggaatgtttattattatcattattttatttttaaaaagtttattattatgagaagtgtctagcaaaattcaaaaacttggttctcaaagaaaaatacaatcatataaaaaataattaaataattacacaataaattactaaaatgaaaaaaaaaaaattaataaaaaaattaactctctaaaaaataacttttcttatttggggtttttttttttttttttttattttttttgtgtaaagggtattacttttttattggttaatgttgaactaagactaataaagtaatttataatctatcaatttaaagatttatatatatagctcaattatgcaatagtctagggtttgttgagggtcaaattggtgtacaaaaataaacataataatagagtgtcattgctttacatgcatcctatgattcataatatgaaacaaaagaaaaatgacaagtatatcaaacgttttgcttcaaatgagttggtgtgactttgatgggtctttaaaaagttttatgattatccaaaacattttggatttatgaaaatcttcaaataattatccattttataaatatatgattacttcttacacaatgatatgcaattttacaatacgaatactttcaaatttgatcatcctaccaaataatattatcgcactcaaacatacttaactgtagagttttgataaaatctaatttgatgaaattcaataccatagtagcgcaaaatatatctatgattacatcatcaaatacatagtataacaataatcaattttcatttttcgtgagtagatttttaacttgataatagtttctactggaagcaatacatttttattataattttaaagagaacaactatcaaatctcgtcatagttaaagaaaataattatacgaacgtcactaatattgttctgagtaccaactattgagctcgagagaacaatttgtatgttttttgataattaaatagaaatgtgtcaattatcaaagaaaacaacctctctatctatagcctttatttttatttttttttt

SEQ ID NO: 300480 - DNA, 5960 bp, Cannabis indica
agggcataaaatcccaacattaagagcaaagggctgatttatagtgctcccaaattgtggaataacaacacttcagctagaggctcccataaatgtgtttaatgactgagcaacaacattactcctcgtctgtggttgatgtggagcaaatctgttcacttaagattcaacagatggtgtttgttcgccagacgacatctcaccgtgggtaggtggctctaataccaagttaaataatgaatggaaaaggtattgaataaggatttactcaaggattctgaggcaaattttatttcatttatagaccaattgtacaattacaagaatactctagaatggtgatagcacaccaacatatttgttacacaaaagacaagagagagtgatattcccttaacaatacaaaatacaaattagagggaaatcattcaccaaaagctgacgtagggaatgatggagcagaggaaaaacagagtgctgacatggatttgaaggagctgagtaagcatgactgagtaggatcatttctttacagaaaggagacatattttgatgtgctacacctatgtaagtattctatactatatttatgttataggaaattaatatttaatattcatgaaaaataaaatcgatcatattaagtatattttatcaacagttgatgatgagaatagaaatataaaaaataaaagaatatagctgtcatgagtataaaatgtgtcttaagatatataattctaaatcaattataaaaaaagtaacttcaatataaataaacccaacctcaatatatactactaattaggttacagattttagtaaggaaataatactactaaataaatttgagaataccatactccaagattttacccgtcgttactttttgatctgttacttaattgattctacttccgctgataattaatcaaaacaatatgtcatataataatttgatctccaagcacacattaattaaatatttaaacctctaatttaaataattatttacttacataatatttatattcaactatataatagtatagttctaattaatcccacaaatttaataaagtctactaattattctaaatttataattagagaaactgaaatattacaagtactgcaagcctaatttgtttatacacaagaggattcaaccttgtaactaaatattatcttttgtcatcatatgatttttctatcaatataacgagtacattctcgtatataaaagacacatgaatttgtacttacaaaagcaagtataatatgttaatagggacaaccccgataaataataggtatccttgcatgataaaaacatacgagaagtttagcagttgagacctggtcaagccgcacattacctcacgtactaatagtataaaagcactgcctcaacactcaagaatagagtgggctgaggtatcggggagcctggtattgaactttcctagaggcactttttctcgctttctctctctttacggtgcttcaccggagctatggcaaaaagggggaaaatggccagaaaagggaatcctaaggggaagaaaaccgatccttcatcttcgaatagggtcatcaagaccagatacatggatgcggtgtcggtgtgtaggaaatagagatagcagagaaagctatttcaatggaatagtgtgtggaaccaatggaacagtgcttcgagccaatagaacaatatgtaaagaagatctattcacctgaggaaactgaagccattttcaagtgaagaagtgagattaggcatgatttcttagactggctaagtgttgctaatcaaaatcttaggaatcagttcaaggaagaatccttctccccttatactcaaatctggaatcattcataacttagagaatagcttcgcgagctctgaaaaacatgtcgagttaaactcatctgcaacttcaaaagttaagattcattttactgatattgaagaggaggtgaactattggcaatcttatctagtgtgactatgtaattggagctaatcctccaatctccacactcgaagggtttgcaaggagattatggaaggaaatggttgttaaggtgggattacttgctaaaggaatctttataataagatttcagaatttggaacaaagagataaagtaatgcaacagggctatgtgttctctgataggaaaccaatggttatgaaaccatagaatcctattgatgactttactaaagaagaggtaacatctgtgccaacttggatacaattgaagggtctggacataaagtactggggagagtcttctcttttcaaaattgtggcacaatttggggagccttttcaagttcatgagattacaaggaacagagatcgatgacaatatcccatgattttgattcaggttagtttggctcagacttttcctaataaaatttcctttatcgatgaacatgatcatgaggtggaattagaggttcagtatgaatggatacctttggtatgctacaagtgctcagggattggccacagtacagacaattatagaagcaagagagtaaaaatgagcaggggaagcaagtttgggtgcctaagaagcagccgacatttaaggagattgaaactgatgctgatggatttcaaaaagttgtgaagggtaaacaagtgaaagtggagaaggaacatggagaaactgatgtgcacaacagatttcaaatcttggacaatgagaatgaacaaggaataatatacaacatgggagaggggggagatccctctactttcaatggatcgattcctatgtttgaatgtaagggtgattaagaaccaccaaaaacacaatgaaattagaaatttaattttctcaaagcagtggggttggttagcctcctagaaactaaagtgcagaataagaatatgggtaaactttatagtagtctatttcaaggatggtgtttcactaataataacccttggctggataaagggagaataattgttgcttggtagcccaattcaacttattcattgttttgttctttcaaagcaacaagtggggaaatttcatgttacttttgtgtatggattcaatgatgaaaaaagaagagaggaattatgggctgatttggagggcttagcagagaaaattaaagaatcatgtctggtgatgggtgatttttataagatactctttgcaaacgaaagagttggcaggaaagctcatgctttgccttctcaaagtttcaaggactgtgttgtgtaatgcagtctagaggatctgaaatattcaggtgcttttctcacttggaataacaaacagaagccagatgagagaatttattcaaaaattgatcgtgctatgatcaatccttcttggatgaattcttttccaagcttagaggctgtttttctgcttgagatgtcatttgatcaccgccatatactggtgtctatttacaaaaacaacaatacaggtaaaaagcccttcaggtacatcaacatatggaaactgaatcctcaatttgaaagcatggttgttgattcttggagaattggggtcctgggatctagaatgtatcaagttgttgtcaagttgagaagactcaaggaagtactgaagaagttaaatagagaagggttctctgagatccataaagcagatgctctggctagtttagctctttctgatataaaactagattgaacaaagaccctttgaatatggaattgatgaaggaggaacaaaaagcaaatcagcactatatagaggtacataaggctttctctcttttcattgcatagaaagttaaggtaaactgggctaagtatggagatgagattcagcaatgtttcatgcttcattgaaatttagaataattcacaacaaaattttctccatagaagatgaagctgggaactggagagacagtccagaaggggtacaaaaagctttcttggattattatctgggtctattggggactttgcctaatagaaggcaagtgcaccaatctgtgatggatattgggccaaaactcaatgacactcatagaggaatcatatatacaccttactctgtagatgaggtgaaagaagttgtgttttctatgcctgggaactaggctcgagggcctgatggctttaggagtactttcttccaggattgttggcaaactgttggtgttgatattgaagaggttgtattatcattcctgaattctgggaaaattcttaaagaaataaatgccactacaatgactctcatccccaaaactgtatgccctgagagtatggttaatttttgacttatctcatgttgcaatgttttgtataaaattgctactaatgtgatctgcaatagactaaggagagttcttcctaaccttattgcagaaaaccaaggtggctttatgcatgggagatatatagcacataatatcttagtgtgccaagacttggtaagattgtatggaaggaaaaattgcaagcctagcagtatgataaagattgacttaaggaaggcctatgacaccattgaatgagattttttagaggagatgttaaatgcttttggctttcctaatcagttcatacaattagttatgtgttgtattaggactccaaagttctctctcctcattaatggttcaatgtgtggtttctttgaagcaaagagagggttgaaacaaggagatcccatgccccccttctttttgttctaggcatggaatatttctctagaatcttcaagaagattggggattggcccggattcaaattccatgacagatgtgcatctctcagattgaatcacttatgctttgtagatgatttgttggttttctgcaatggtgatttcatctcagtcatgcttatgcttaaaggtctgaaattattttcttcaacttctggtttggtgcctaatgctcaaaaaactactgtgtactgttctgggatgctagaattggaagttaacaggatcttagaggcatctagtttctctagaagtacattgcgtttcaggtacctgggaattcctatttgctctaaaagattatcaagaatggagtgccaagggctgcttgagaaaatgacaggtagaatttgaatgtagagcaccaaaaatctgtcctatatggggaaaacaacattaattaactcaatgcttttggccattcatacatatgcattttgccaaagaagctattgaagcgatttgcagatcctttctatggaaaggtattcaagagagtgcaggttctggtttggtagcctgggagagaatttgtcaaccaaaaaatgctggaggacttggatttaggaacattaaaaattggaatatttcagcaatgtgaaggtatgtttgggatattgctagcaagaaggattgtttatttgttaagtggatccataatgtgtatttaaaagatgcaaattggtgggattatgatacaccttctgattgctgctggtcatggaggaaaattgtaggagtgaaggacaagttgaaatagaatatagatgttcctggttttgtgcagcagaagtataaaatacagcagggttaccagctcctatttgctagcaatgagagattgttctggtctaagacagtttgggatagattgatcattcccaagcacaagtttactatatggattgtgttttgggaaagattaaacaccaaagagaggataagcaaatataatacaagcatagatatgacatgcttgttatgtgggcaagggagagaatcgatcaaccacctattttttgacaacaaatattaaatccaagctacagtggggattgaggacaacaaatatgcagtatttagtgagaaatatcagcagaaacaaagcatttttgaatgctaggaagagcatactgagaacaatcattgcatggctggtttatcacatatggagggctaggaatgaagtccttgttgggttttgtgcccta

SEQ ID NO: 300481 - DNA, 1863 bp, Cannabis indica
tcatcttcactctccacaaaccaaaagcattctttcctgtaaacttttcaaaatcaaatttcgaacttcccatcctctttgatctgttcacctggttcttgatttttcaatccaagaacattcttagaactcccgagctctgataccagttgttggatcagttcaagttatctagtcaccacatactcctaaagcaccaacaccttaattacaatcaataacacttggacaaaggttaatttgaatgtatgagtccttgctacttttattaaagtaaatctgtatttacaaggctaaattcattctaatgagctgatcctatttatagacataaagtcaatgattacaaataactatgcaagcctaactaacggacagataagctagttgtcctaataacaattagtaactaatctatccaactaacaaatattccaactagagttagacacatctgacaggcatttatacatatttatgtttttctaccatgatagattgaggaaattaaaacaaaaataaataactaaagctggagagactcaaaaacaatataaattaaataatttacctatgaagatttaaaaggaagtttttctttttttcttttggataaaaaaaatcaatcacatttggtatttagaaatttaaaataatttatctgacaaaaaaattaggataatcactctcatttgtgtgtaaatttattgataaattattgtcttacaggtgcacatacacttggcgtggggcattgcttaaacatcgcaagtagattatatgatggcaatcccgaagatcaaatgaatttggggtttgaagcacacctgaaatggaaatgcccaacaagagttcctctaacaaatctcacttttgtgcccattgactccaccccaattgcattcgataaccaatactttaaagatctcttaatgggtaaggccttgtttggcatcgactccaccattgcaagagatcccttgaccaaccccattgttacaaggttcgctactgatcaagactacttcttcaaagttttcagttctgccttcgtgaagctttcttctacaaaagttcttactgctaaggaaggtgaagtgaggaggcaatgctatcgtagaaactaagaaagtgagaaaatattattacatatacatcattctaaagtgtgaataatggaaaatatcttccagccttgaaaaggtaagctatggtccatgataaagatatggttaaaagtaggagagtggagctaaattcttttgtactctttcatttatgtataaaatgtataattgtaataataataatgtgtaacattatggagaatcaaaacctatttttcattgctcaaaaaaaaacctatttcacaagatctaaactatgctactccactacctaccatgtctccctcccatcttccaatatttcatttcatatggatgtaaacattagatgtcgactagacacgcagtggcgctagcttttgtttcaagatctgatatagtctctagatgattttctttagtacctaaggttatgatttcaactatgttagttgacagtaaagatatgatcaaataaccatggaggtggctctaccaatgcagacacatcatagtgaccaaccactctgtcgctcaaaaggcgcatagcagcaccctgggaaaatttccttgcgaatagaaaacaaggaacgggtgtaaaatttgaacggcaccattctgttctgaactcagtctcatagtatatatggttgaccttctgcagggttagtcagatcatttggtcaaataagaaacaagaacagcaatagaagaacagagaaatgataattttctatagaagagtacttaaataaaa

SEQ ID NO: 300482 - DNA, 2936 bp, Cannabis indica
tatttttaatttgttgtttgattattgttggttttaatatagttgcattgtatgaatattttgtggttgttttccaggaggttcccacttcccttattggtgatgaagtgtacaaatcagatgcgactgtgtttgaggaagaggaggatgatactcttccttgtactcctcttcttgacaagaggaagcgtgcccctatgttgaaatctcattttgtagattttggttcgtctgatttgaagagctctggaacggagttattgtcttcaagctttccttcagcaagagatgagcaggaattcaaaattgtcacctatgtcaatggcctttatgctcttgatgatgctatttctgatcccgtttcttctaaacttgaggtaaaatttgatgattggattaagaaaggaaggcttaaatatcctaggtgatgtttgtttaatctatttatgcatagtcttatattggcttttttaccatcaattatttaattaactttttttgatactcacgaatgatttagtaatattcttaacttcacatgttctttttatagttatttatggttgttcatttttgttttttagttgtgcaactattttgctgcaattaaaaattgttttcatctacttactgtttttttttcaccatataaataatatttaccaagattttgagaaactaaatatttgagaactaaacaaataataaaatacaaaaattaataaggtggggatttttacgtggttcaagtgttaattaaccttactctgcgagtcagtctattagcctttgatgacttatttgatgtgtttacaatatttggcaggaaaccctaactctgtactcttagttactttggaagaagaagaagacttagagcaatattggcagagctttggctatgtaaggttctgacccttcgtatggaaatagaagggtatatatagactaagtggcatatatggacatgcccataacccgcctagagtttatgctcaaagcccactaatggggtagcttgggtcccttggaaataattgtgcccatgcgtactgtagttggacaattggggaccatttatactctatggacacgtgtcgctcaaaggtttaacctttaaaagtagaggggacgtgtcatccaaaggttttacctttaaaagtagaagcctgtaatatctgtctggtgaaaaggtggatgaggtgtgcgtactaccatgcctgaacataggggacaagatctgatcctatgtcagaaaaagcataattgtcattgggcaatctgagttgtaccaaaggtagatgtctgcgacattcttgggcagttgacatttacaataggcccttacccatctaggtatgagctgggcatccttccatgtttggaccactccgggtttaggagagacattatgtcttccgcgtctatgaagcttggacaaggcagggtagactcccacttatccattagtcttggcttgttcttggttccgtgaggcttcttcgtgataggattgtaataggggatattggttagcgagattatgaggttaatccattccttcatatgccacgtgtcatatgctcagaaacatgaataatatttatcccccaagattttgggactcttcgaggtctgggagcttgcagtcttcatccatctcttggagataaatactttacacgtggtgattgctaggatcgtagatgtattctgtgagctttcatcaaggaaagggccattaattataggtaccattggtgtggtatgcatgtggcgtctttaatgcagttgtttgacaacacgtgcatactgggggcacattccttgggagaagttacaatgatggtaggatgatttaaatgacccctcctttaatgcgtacgagactcgaggtgtgtaatgatgaataataaatgccaggggtgagtttaaaattccatcttttcaacttctcatccatcagatcaaagtgtgcttttgggtcaatcaattcaaatcgcaaggatcttggtcgaagtataaatggatttaccaaacccatttcttattttttcatcacctcagactcttgatataccttttttcgaatttcagaccaaaactttgtcttttcttgaaaaacctccacttcatcgccgtatttgatagtgaatgcaaaaggtctttgactagttgattcaaatttttctaaacctctatttagcccattttgcagaagtaaagtcgttggacgatgaaattttccatccctagagcgacaaaatctttgatgttcaggccagctacgatcaggtaatcaactgggttcagtattcctaggcagttttccacaacaacctttcttttccaactcttacaacaagtaagtatcccaatgctctcttaactattttctatttcgtatctaagatagaaatacttattttaagctaggtctggatgtcttgtatgtttgagtggtaaagtgttgcctgtagagtttcattcctagggtaggattatgtggaatttttttatgtcgtggaagtgctgattttgtgtggatagttagggtcaaccgcctgtatttcgtagatttttgcatgtcactagaattttagaattagggttgaactaggcattatgagtttttgaatgaacactaagccaatgtattatctacacacttatttggagttgttaggactccgaatggctttaacttctggattcttgctttaggctttgttctagaaatttccccgggttcccaatctattgctctgggctgtctggcaaaggcaggcttctgggaatgataggttcggtgggaacctctccaaaaaattttaggggaggcctgttgggttttgtgccctaaataaaacccatttcaatataatcaattttacttattaataaagatcaaaaataacattttatgttgcatggtt

SEQ ID NO: 300483 - DNA, 1343 bp, Cannabis indica
ttgcttctaattctaaaaaaataaaaaaaataaaaaaattgaaataaggacatttactaacatagtcttatgatttagggtcatttgctatatttttttgaaatgaagacataaactaacatactcctatgatttggggccatttactataatttccctttttgaaagccttttcacaaggaataaaaactatattttcaaaaataaataataaacaaataaagctaatttcaaaaatactacaaacattatttttgtctaatttattaaatatgccaataaaaatatttacataactattattggccggtttaaagggacaaaacttaaaaggccaaataaaaataaagtcgcacaaatcttcacaagaaatgaccaaaacaacggccaaaccaagccaaatacaaaaatggccagaagccaacgccaccgagaacaaaagtgctaaacatcattgttacatcaaaaaaactctaaataaaacaaaatccgatatgcacaaagaaaggaagccacaaatatctatacaaaaacaataattagagagtagacacacaggcaaatgagatatccagagacacagataaatagtgtgttggttccaaatctgaacagatcgatacaatagtagtaaatgaaatggataagatgagctatattgtactgagtatcaaggtctagtgtaatgatgtcctttcctatgatctctaaagcttaatagccacttttatgataaagatttggtatgtcacatccttgatatgactactaactctaaaactacagaccccaaataaatgatattagaagatgacctaaaaatagagccagatagagtagacttaataatggatattgggagattcagaaccaaacaaacaaaatctcatctattactcttctgtgccacaatcattccatttgccaactggatcaacttatgttgggattccctctattttatcaagaagaaaaaaaaacatacatttaatatttctcttacttaatattgcatgaatatacttttaagtaaaaactgtgttatcttttttttttctttaaccaatgaaaatttaattaaaaatataaataatgtcaaataataactagactgactaaaataaacaatgagatatttttcaatcaagtataagttgtatatcaagcgtcctataatagcttattttttttattataagaaatgttttgattttttttaattattattggagaaaaaaaaggttaactaggagtactaattaaggaaaatattaagctaaataaaaaagaaaaaataatatattataataattgatgtgcatatagtgagctgttgatagaga

SEQ ID NO: 300484 - DNA, 7349 bp, Cannabis indica
ataaatgcatttttttttcagtagcaatttcaacataacactaacgagaaaaaaaatgaaattttatataccaatataattttttgtatggttatattacaatgtttggaattgtgaaatatcaaaattcagaagagaaactagcagccttagaattattaaccctaataagccaagtcggtctgcctgagttaattgatacatctaatcggtcataaatcacttaatcttcttcttcttcttcttcttcttctttctttttttttgaaagagcacttaatcttctttagtgtggaactttttatcaattacaatacagaagagtacacagacaatcatttatatataatacaaaaactatagcctttttaaaaatctttcccccctttggttttctagcatagaaaaaaaattgacgtcaaaagatatacaaaaaataaatgttcgataacaaaaacatcaatgaaaataaatgagacagctatgcacatgaaaatgataaagaagaaaaacatagatcttacctaagttcacatttaattaattaacttgtaattataagtactaaccctcattgacatcatgtggtgttcgtagatccaagagacaaatgttgtaattttggaaggacaaaatctgggtgccaataaatatatttatatatgtatatacatgtttgtatatagaatgttttggatatccattattgtaattaagtttgaataaaaatgagatttatagaaaggataaagaaatgggtagagagactgaaggtgatgacagaagcatagagagcacaaaggagtgagatgcagcttggagttattggctttattttttttgcatattatcatctgtgctctctatcttctgtcaacagcctcaaacaatgcctcttgtttccctaatctttaatctccttcaaataattaaaagaaagttctcaataatgaaactttattaataacagctccatatatagatattttttgtaaaagagatctagggagagggagaggatattgtttgctataatagactgctctcaagtggcctctatttataggaaaggaaagatatagccagtactcactgaaaagaatggtaaaattatgtgagtgtgagaaaagagggataaaggtacttctacttatcatgtactatacaatgactttctattgtaccatcttttttctgtaaccgtttttcacgagataaaaatatctcatacatataaataggacactctcgttcatattctaacaaacacctaaacagatacgtactccaaatccatgcataccatttcaactcacacaaaaacccattccacatttttctctttttacccacattattgtttaggacacatattcaagattaaaaaaaaatcataaattaaaagttgaataagtcagaaataatctctcaatccacaataatctatcctattattactgttatcgccaaggacagcttttttggatatggtccatgtgaatagggattttctaccatcttctagagctagcttatattatatttattttattttttagaatggagaaagttttattataaatatatctgatatagtatcagtttataattacatggccatatacagtcatatgtgtatgtatagttctatatttgctattgttatacttcacatcttggtgaatgctgacccacgaagatatggggccaaaactagaggatatggagcagccttcaagtggttgaaatattttcaagcggttggataaacatttaagccaaaatctttaattgatctataattctgtgtgtaatgtagacaaaactaattaatcaatatgtttcccagcacggttaagaaaatctagccaataaggtaacatgtcttggaatttatcatgatcaaagaaaaagacacttttgaatttattctctggccaggcaagaaccttgataaaagacacctccactacaattgaatcccagccacatatggacactattggctacacctaaaagtcttaaatagtaggcagatgcagtctaatctggggtgggccactctacattatctaatgcgtgatgttggctcaagacttacatttgagttgctctcttataaaattaacattcgtatcaaattgttttaatttcatgtaaaactgttataaacgagtatgagaaatgctaaaaggcagagtagtacgtattttttgtttgagaaaaagaatattatattaatctgaaattaaattacataatggtcatgagtaaaggttttctccaattaaatacattccaaattcactgtaaaagcaaaattaaccaacaaatagactttattattagcaaatctaaaaatatgagaaattacttgagctcgtagaaaattgaataccggaagattaacatcattaaggatagcatgaaagttgtaaggtactacgctaaaatctttaatccttgaactactttgagcgaatccgtttcaataaagtcaacagatagttgaagagtgaggagcaatttaagacctcaggcaacagctaaagcttccatttctttaaatttaacacattctctaatagactttgccattgcagcaagaatttcatcattagagtttaggaggagagcaccaagttcaaacacacctgaagaaaagttgactgttgtatcggtgttcagtttaaatcaacctgaaggtggagttagccatttaggtcgctggcaagttgtatgtgatgaagcaatatcagatattgatgggggtaactagacttttttgctgttgtgaaggggtagcatctttgagttgagccctcttttaatctgacaagtatgttgcagcaaaatcaagtaattttcctactagtttagccttcttaccatgaaattcattgtttctctcagtccaaatgcaccacattattgtgataaaaagttccaacaaaccagtagaaagatgcgtagaggcatgtattaaataattaaagacatttgagtttcgtgatagctacaagtcgatagccaatccctaacttttttacaccttttttgaacaagtacaccagaataaatcattgtttatagtctctttgtggtttttgcaaacaggacattgggaattttgtagcaatatgtcaatgatggagaacagcagcagtaggtaatgcctcgtgaaaaactcgccaagcaaagatacaaattttacaaggcaacattagactccaaaaagttagccaccaactttcagacaaattggagctgcttggtaagttgtggtttagagcctcaaccaccagaacatcatcacttgtggaataagttcaacgagattgaaagtattctatcaatattgggttgacagaatttagcctgaagtgcacttacaacctcacgtgatacttaaatttagattactaccaagaaaaaccaaaggcttgaaatgagaatgaccagagatccaaagatctttctttctaagagcattagaacccattctaattttccatctcaaacctttttgaagtagttctttacccaaaataattgatcactaagtcaacgagagagaataacgaacaccagcatcaaaaaaattcccactcaagaaatatctattccttagaactctgcttaaaagataattaggactttccaagagtatccatgcttgtttagctacgagagcttggttaaaatgaacgaaattgcaaaaatctataccatcatagactttagccttgcaaaaaaaattataattcttataatgaatggggtgaccagatactagagaaccccaaaaaaatctagccatgagctgctcaatttggcaacacaatttaactggcaacttgaaacaattcattgcataagtaagaattgcttggactacaactttgagaagtacctctttccctccaatagaaaaaaaattatattctccaagagtttaaatgttttcatattttttcagtgataccactaaacagttgatgcttatcacgaccccaaaatgaaggaagtctcaaatattgctcatgtcaatgatgaataggcatgccaaagagatgctgaaaaaaacttttgtctgaagctcttgtgtttggtgaaaaagatagtacacacttatctggattgatgactggtgtggagcacaactacaaagatcaatacaacgatgaacaactcgtgttgaggatctagaggcacaacaaaagaagacattgtcatttacaaaaagaagatgtgaaactggtggggctgttctacaaacttataaaccttttaatgctccaataatttcttcatattgtaacaaatgaaaaaaagtcttacgagcaaattagaaagaggtaaggggataattgatcccctttcctaacaccaccttggggagatacagaaccttgtacaacaccatttaagagaaatgaataagatattgatcttaaacatcaaaggatcaataggactaaggtgctactgaaccccatcttcaacataacttgttccacaaaattccattcaacccgatcaaaagccttgctcatgtctaacttcattgcaacatatccttttaatcctctcattctatttttgagcaagcgtatgacttcaaaggcaacaagaacattatccgtaataaacctttgcgaaagaaaagcactttagaattatgatattaccatagagaggaaaggttgaagatgaagaatattagtgttggagataagtttgtataggacattgcacagacttatgggtcggaactaagttatattagttggcttatttactttcagaatgagagtgatcagagtattatgaaaaagagagggatcacaaccattattgaagacatctaagatagcagaagtaagaagagaaccaacaatattccaatattgtaaaacatcactgacattccatccaaactagggctgcaatcatcacacatatatttcaaggcttggaacacttcatctactgtgtaaggtattggaaatccatataaaatatttattatatgtgtttgactgctcattagattgatgatagttggaagttgcaaaaaagaatcattagtttcattaaagttcctagccattgaggagatatgctggcaaaagaattgattaattgtctcaattagtggggtattgctcaaccttttctatcaaagtttataatgcctcgtcaaatgatgtagatttgagaaaggtaaatgagtatttcacagaaaaagataaagatttagtgtttgatagagaaatattttatatgcgttgctgtgcacaaatcctaaacttggtagtttatgatggtttaaaagatatgtcctatgccatatatagcaaaaggaatgcggtaaggtatgtgagatcttctccagctcggttgaagccgtttaaaaaagcttgtaaggaagaaaatattgaatcaaaaggattgctatgtttagatgtagtgacaaaatagaactctacatacatgatggttgaagcagcattgaagtacaagtgtatttttaaatatataaaaagggatgcatactacactaattgttttgaagaagaaataattaatggggaaaaaattaatggcccaccagaagctagtgatttgagcaatgctaaagtatttattaaatttctcaactctttttatcaactcactttgaagttcagtgggtcgttatacataacatcaaattttttctttcaagagattttgtaagttaaagttgagttcaatgatatgaaggctagtaaagatgagttgatttgtaaaacggtagagagcatgcaattaaagtttaacaagtattcaacaatgttgaaaaggttaacttgttgcagtatattgcgtctattttggatccaagattcaaacttgatttggttgggaagagtttcaggtatttatatattgcgtctattttttctcttctatttgttttcacatatttaatattatgtaatcatattactatttatctttttctatatgcattgtttaatgtttattatttaattacttgttagctatctctatgatgcaattatagcagaactaattattcaaaaagttgaaaatatgatgactagattggatgttttttatgaaaagattgttgtgcttcctaattcctccaatgatcaacaagcaactaaaaatgccacttacaaattcaatgcaatatcaagtaggacatcattctttatcaagctcaagtttgtgtcaagtgaagtagccactaatgatttggatgattatcttaacgaaagaaaggaaaatttgcttgataatgtagattttaacattctagattggtggaaagggaataggaataagtatcctattgtctctcacattgttaaagatattttggcaattcaaatgtctagtgttgcttctaaatcagctttttctactagaggatattataatatttttatttatggaatgaaataaatgaattaatattgagataaatgagtatttcatatttattaaatttagacaatattaattgcgtgatactctatatatgatcagattttaatattcatcaccggatttgatttcctaaattaattgtcaaaatattctgaaaattaatgtgacatagatattgatggagtatctcatctatatggatctctttattattgtatttagaatattttatatttaaaaacatgcaatttggtcgtcataattcattttttcggtcaggtgcttgggtcgagtccatcgaacccacagggaaaaacgggtcaattttgacccgtctgactgaagaagaagctccaaacgatgtgtcattcttcatgtcttgggaaaccttcattgttgaaaaatgacgtgtcgtttcgcatatatcaaaaacgacatgtcgttttgcatatatcaaaacgacatgtcgtttatggcaacggctttttacaaaaaaaaaataaaggaaaaattttgatttttttataaattttttatttatttggaatattaattatatatctaatttttgttaatttagtcaataaattaaatttattcaatttttctttttttatttaatacacatatttagaattaatatgttatttagtataacttaaaagtgaaaaaaaaattaatttgataatttattagatgatttatttaggcatgtaataatagttcttatttttataattgtgcatttaattatatattaccaaatttatgtaacttattgtctaaattaataaattttgaaaaatctgtcattaattatatctttagaaatttacattttattaatttatgtttgtatgatttaaatgctatacataaattcc

SEQ ID NO: 300485 - DNA, 1582 bp, Cannabis indica
accaattggcaatgagtggagtagttcatgttcttatatagctcaattctctaccatttattccatgtgggacattatccacaataaggtgtgagattaatatcaagaatcgttggtacaaccaaatggtttaaaaaaaaattaacagtttttattttttatatttatgtagaatatgtattttttacactattttttttattattattattattattacacaataattttttacattcgatttctacatagtggcctacgactatatttttgactcttgcatttgcaatccatcctttttaatataataaaaccaaagcaactaattaatgttatcaaaatatgaattttgttgtgaaatttaataactatgaaagtacacatataatgtaatattggtggtcttacatgaaagggtatagagattaattagtaattattagtattgcgtaattagtatgaatatgtaaagtcattttacaaatagagaattaatgaataaaatgagagaaaattaagattatttctattagaattaaaattgattaaaaaatgcaacctaatacaatacaattgtatcattagtactttcattgagagaatctcagtgtcactatgattgatgaagagcttgttgaattcgtttccacgacgttttaaggctcaattaaaggaattagatgccatatttgaatgctgttgcccatcgacagaggcattaattgccggattcctcatctaaaaccacttctacagaggttgataaccccaacgatgaccctgttgaattagtgaaaagtgagaatccatcggatattcctaaggaagcttcacacatagctatcgatttgggtctcatccgatatggcagggaagcactgccaagagtgaatcgcaggtcgctgaagttggaggagaagctctttgctccatcagagattttggaacgggcaattttaccacccttagatcgggcaatctgatcctcttccatgtatggtactgtcagtggagcatttttggaccatactgtggtcatacgagatgttgttttcggtgttgatggtggcacaccatgggaattgttccacacgcagcagtcagaatggaggtggatctttgattgtggacgtcgttggatatcgatcgaagatgacaaacaaagttgaacgacaatggacgggatggagtggttactggcgggcagcgggaatcgtggtcgcgccgaataggagaaagccattggatgaccaccttggctcttgtgttgcaaagaaagaaaaggaaaatgatggttgctgagaagaagggtgacggtgttgagccaattttaatggtttatatataaatactcttttgatttgttgaagattggaaatctcaaagagaaaaagggcaaaggcatgatcatgacaaagattgaagattgccaaaggctgctgtttcaagttttcaatataaaaaaagttgaagaacgtggctgaaggctcacagaattacaaaaatacgatttcacggaattttaaatatttttataatttttttgattttatttacaaaaatacggtctttttatgtcgta

SEQ ID NO: 300486 - DNA, 1611 bp, Cannabis indica
attttttataaaaaatataaaatttgaatagtttaccgttaatattttaaataaaaataataaaataggatattactataaataaattttgagatggaaacaaaacttttctaaaaaaaatgtactaatgtttcaattttttttttttttgaacgacacaatgtttcaaattaataaaatatatttttttcagtttggagttatattaagaaaaattaataatgtcattaattagtttaaaatgaaggtaattatgtcattagaaaaaagtttcatcaaaatcacaatggtggtactatttgaaatgagtggaaaattaggattgggagttgatttttctttttccttcttcttcattgaaatggagaagtaatgtttaaaatcggagccaaactaatgtaatgggataaacttgaatgaatatgaaaatgggatattgatgatatgaaaataatactcgaaatcgaatagtataaattgattattcaatgtgttttgagattactgtaaagatgcaagattaatgcccaaaaaaacttaatataatgttctttcttattataaacattttatttttatgaaccttattataatataaacattttgagaagttgtaagcaaatgttggcagatttttgcagttggaatagtcaaccgtagtgatggtgggaccaggctaaggatatgccaatatgcaacaactgaatattccattattaaagccatgctactatctccactcattcattttttttattcattaatgatatagtgatgttaaaaggtactaatagtataagtatagttggtattattgtaggtataattgaatattaaattttatataatttaatttaataattattattaaatatgctaattatttataaaatattaattttaggtagtactaaacactattagtgactaatagtaatacttttaatattagagaaatgttaaaaggtactagtgctgctttccaatatgttaatattgttgttagtacaattaagtatcgcgttctatataatttaatgtaataatttttaaagagtatcactaactaattgtaaagtaacacgttcagaaagtgctagacactactagtagttaatatcaatgttccttagagcactcccaataacttttctactctatccttcaaaatatgttattatcaaaattttattttctatatttttttctctaaatcctttaaatataatatttttatatacttttatgctaattaaaataattaaataattaaataaaaaggaaaggaaaggactaaggagagagaaactaataaaaaaaataaatgaagagcttcagcttcttagagcactcacaacaagtgaggtataatagctaaacggtaaaataaaatagctaagaatttaaaattgagctccatctgctttaaactcttagctattatacatattttcaaactccaagaaactcttctctacatataactcaataaatagtgaagaggtaaacatattttatattttttctttctattttttgtttctttaattaattttttattctttttttttattcatttgtgtattgtatttttatttttattaataaaat

SEQ ID NO: 300487 - DNA, 3062 bp, Cannabis indica
tctgcgaggtcttttgtgtggtccctactttttatccactttaccaacatatcatcgacgtagacctccatgttcctccctatttgctttttaaacatctcattcactagtccctgatatgctgccccattgttcttcaaaccaaaaggcatgactttataacaataaagtcccttgttggttacgaagcttgtatggtcttgatcagggacatgcatcttaatctggttatatccagaatatgcatccatgaacgtcataagctcgtgtccagcagttacatccactaattggtcgatccttggtattggaaagcaatcctttggacacgccttatttaaatctgaaaagtcgatacaaattctccaagttccatttggttttgggacaacgacaggattggataaccacgaccggtagactgcctcacgtatcaagttgttagtcaacaacttatccacttcttctttaagtgccctttgtctttcagaatccagggccgtccttttgtctctttgctgggtaatttgggtcgatattcagatggtaacaaataatgttagggtcaatccctatcatgtctgaatggctctaggcgaactgatcctggtttgccttcagaaaacttgttagttgctattttagtttctcatctagaattttcccaatgaatacacacttcgtgggattttctggatctaaaataacttcctccaattgcttgattggtttcaattggttcttttcatcttgaactcgaggatccagatcctcgacttacttcacgccttactccgttgtgactgccattagttgatgacttgcttttctattttgtagctctatgtggtagcattcacgagatagcagttggtcacctcacactacacctacaccaattggtgtttgaaacttcaaagataggtgtttaattgaactaactgcccttagtccaattagcatgggtcgacccagcagtatgttgtaggctgatggcaagtcaacaaccaggaaatcttgcattatggtattggataaaagcgcctcgcctacagttaatgggagttcaattattccttgactggcgacactactgcttgtaaatccacatagatttaccatgcaaggttttaacttggcactttccaatcccattttcttcgatgtatccttataaaggatattcactgaacttccattatccaccaataccctctttattcttttattggcaagctggattgtaatcacgagcgggttgacatgagggtactacacatgttttgtgtcttcctcaaaaaacacaattggaggttcctcagtcttagctttctttaacgattctggagcaaagactgactgctcattcttaattttcttaacatatctcttttgggctattactttctctagcgagatgtggccctcccaagataactagaatgtcctctccttcaagaggaggaggttgtaatctttagttgcctgggttattgggcgaattcggctggttgtgtccattgccttgtcgcttcacataatactgaaagtaatagcgcgagataaggctctctatctcgtctttcaattgacgacattcattcgttgtattctcgatgtccttgtgaaatctacagaattttgtagcatcttgtttgtgccttgcatgactcaagctcttttctgcagacctgacataacctttgctataaattgacttagccaattcatgtttcaacctacaacagaacatggggagcttgtaaacgtgttctcagatatttggttggcactcaacaccttggcctcacattcaaactagcacatgttctagatctccaaggcttcaccgatgctgattggggtggttgttccattgacaggaaatccaccactggctacaacatatttctaggtggtaatctcataagctagtgctccaaaaagcaacaagttgttgctggttccagcacagaatccgagtacagggccctagccttagtaacttcagaaatcatgtggttgcaatcactccttgatgaattatctctccacatttttcaaacccctattctttggtgtgacaatatgggagctggctctcttacatctaattcagtttttcatgcaagaaccaaacatattaaagtggatcttcacttcatccaagatcgagtcttagccaaaaagctagatgtacaccatgttgactcaagcaatcagttggctgacatttttacaaaacctcagaagctgaagatgagtccattcaaactgaagcaattacttaatgtttttgtatcacgtgttagttaaatcagttagccttttactattaaagattagttgtaaattttgttacaattagttggtttaactaactactttgtaattgctcacatacttgatatataaatacattcactgcctcaatcgtttcatattgagcagtaacatttctctctcaaattctaccgagttcatttcccctgtttttctttcttttcttgttcttcattcttcttcactacatataaaagagttcgtaacttgaattcttccgtaactaacatgatacaatgatggaataaaagttccaagtgtacttccaaaattagtctattcaattacttaatttgaattttgaacttaaactcaagataaataaagcgaagtgagttaggttaagtaaatgagttctggttaagttcaagcctataaatagagcctaagactttcatttccactaaacctttgtagtagaagctatctatggctagttttctccaagttgtacttgtctcttcaagagttaagccatacatcaccactaccaccattttcacattcaaatttttagtgctctaccagatttcttttggaatctaaggtatcattttataattttgagtttttagatttaagatcaaagtctcatatatatatatatatatgtaatatatatatatgggtagctaatacaataggtattgtaatttttaccttatctaataggatagtattataccattagatttaatctaatggttctaaatcaactc

SEQ ID NO: 300488 - DNA, 3496 bp, Cannabis indica
ggggaaagatgaaacttgtgaataaaattggagaagttgtccatatccttactatcataataattacttcctactttatcataataattacttcctactttatcttaaatacttaacatagatattttaatatgttaacacaaagttcaagtttaaataaaaatgaatttcattcaaaaaaaaatagattaaacacacatttcaaaaatatatatatagattaaacaaagagtaaacatattttaacaattcgtttttcggtagcactaaaaatttaagagttggacttctaattcacaagtgatttagatcaaatagttaaatcttgataattcaaaaaaaaaaagttaaaatcctaataattcacttataaattaaaatatgtaataaatattgttatctcaattttcgcacagagtgacgtagcattaagtaggatgacatatgaaaactatttcaagacctggacggatcatatttctctaatgttccgtccagaatggcttatgctcaaaaataagtttaagtctccaccaagcaatatccgaacaagaccactgcgtgatgctccaagcagaacgtctccagactccagccagtgaggcagaattctccactcagaaggacgctctgaatataaattctctaagatatttttcttaagtatctccacatttgtaatatggttaaatctctacatttatgggatcaattttgtacaaccaagagattttagggattcaatatttagtttcctaattatttcatattattttggataacactattcattgtaatcccctataaatagtggagttattttattgttaaagaatctaaatgcatattttcaagagaacatttatgttatcaaaatacttgtacactttcattcaagatttttaagaaactcacttggccgactccttgtaatcttgataatcttcaaagtaatacaacaaaaaggagagtaggatattaccaccataacagggttgaacctttataaattctggtgttcatattgcgtattattatttttttattatttattatgaagcataatcccatcactttaaagactcagtgtggttgctaaaagtgaggtcaatattttagtacttttattgtgagaaaaaaaaatatgattccatcaacctctgattgtcttcagtttgacaagagacggtactgacgagaaggtctcaatccactaaatcaactgattcgatggtaacgaatcccaattcaagctcacactaataaaaatgattcaatggtgattgatccttatccaaacactcgactgcctccacgagttctcccaccagcaagacatagagtgacaacccctctagttagatttactcctagcgcataggagattggaaatactagttaggtatacactggagaaactagaccctaattttttgtctcagtggaataggtgtcattctatgaaccgacactataggtataagtgttagtttaaaattgacaccagaagtaatgtttgtaatagtgcattgcttagaaataggttgatcaaaagcatgcatatctatttctaaaagatcatttattttacaggtgctcaatgaaattggttctctaagagtcaatttgtatccacgccaatggaagccaatttatctatcaacaaagatattagagcccctgttttaaatcctacttcgtacagaaacctcattggaaaacttctaaatttgaccatcaccagacctaacatctcatatgtagttaatcgactcagtcaatacctcagtgatcctcgacaatctcacatgaaggttgctgccagaatccttcaacacctcaagggtaccccaggccaaggtccattcttccattcccaatattcatctcgatttttcatctccaagccttctcgaatgttaactgggcaacttatccagacaccaaacgatccatcactaggttttgtatcttcctagaaaactcccccatatcatgaaaattaaagaagcaaaccactatatccaaatcatttgcagaggctgattatagattcatggccaacacaacctaagagcacctctagctacttaacattctttttgattttggcataaagcatcatcaacttgctacactctattgtgataatcaagttgcaattcagatctttgaaaatgttgtattttatgagcgtaccaaacatgttgacatcgactgccacataatttgagaacaagtcaccgaaaattgtctcaagctctctcatgtcccttcttgacacaatattccacattatgaccaaggttctcttcctaactcaatttaatttttttcactgtccaagataagtgtcactaatctatatacttcatcttaagagagagtattaaagtctatattagagttagttataatttgttagttagacatttggctctttatgttatttttccaatgaccttagctgcgttgcttgatctcttttgcaataacattttggttcaaatcttgtgtatatattcagttctcatatcaataataattttaaacttttgatcactaacattttgtaatgatttaggttccttgttggaagatattaataatttactcttcaatctttttgaagtgtccttaatttatattctgatcactcacggctaatatggccactcaacaattagttatatatggattgtgaaatatttttttttatcaagaagaagaaaacttcattacaaaatttaattggatgattttttaccctttttaagatgtctaattattttcaataaaaaaaaaagtaattgtgaaaataataataattaataaaacactaacttaaaataaagtacaatttttaacacaattattattacataaatttaatgcatatttttttttgttaaagtctcttaatatctgaaaaataatcccataaatttgaatgtataatttccacaatagttataataaattgtaggtctactttgtctcctactctcctagtcccgtttttaacaaaagtattgctttttccgaatcttatttgaataaagttgagaggcatataattaactattcatagcttttctttatattagatgttagttgttaaaaaaaaaaatatatagctggtttcagtgactaaatgtacagacatatttttttaaaaaaaaaaagaaaaaataggtacaaaagtgtaatattttgaaaatgttaattatatttaccaccaaaaaaatgtgtaaatgttacaatattatgtataataattgtgtacaatttgagtgtgtctagcattattaactatgtttcacgctttgtttgaaaaaaaaaaaaaacattattaactctgagatatattagttactcttaatttcatttttggtatatttaattgacaaaaatattttattaattattgtatatttcggctggtatgtgtttaatatgctttcttatttgtgtgtatctaaacttgaaaggaaag

SEQ ID NO: 300489 - DNA, 4126 bp, Cannabis indica
aatagttaaacgaaaagtggaatatgtatcttaattactatctatgattcgaacaactatctttggttacttaaaacggttagttatgtctgcacttttgatactgttattagtgtataaagttttttatatggctttgtgtgcagaattattttggatgcttcttctcacttccaatagtgatttcatcaatgagatggggaattccagctggaagaaagactatggtctgtcaccattaatggcttacctaatgtgccatatatggagaattctcgtatatatagctttgcatatgatttttaagtaagtttttatttttaactctgatggcaataatctttcatcttggtaggtggcaacactatgctattacttgtgttgtccggtcctgtaaaagcattaacctacctggtgagtcagttttcatttttattagcttattccctaacacctttatttgattgcttagataagtaggtttgagtatgaattctaaggttcttaaagaatttaacttatattgtctagtatatatttgtatatgacttggcagaagcacaagaaaattaattgctgtcacatcccagaactatcttcagttaatttctgatttgtttactggacttagcttaggatatagatgctgtgaaatatcagtttctattgtgtaaagttttaaaagttgcttcaacagaattaatatcctaaacaagtttatagatggatgatgactatgatgaaaacatttttgtttgctgacaaataagttgtgtggcatgttgaagtcctctgttgggtagaactgtaataaaaaagagaggctactttcacacaaatttagctgaattgtctctatcccaagttcaaaatgtaggtggtttattgtcagatctctcaaacagaatcaaatttatggaatttctgaatcaacaaggaaccaaacagacatggctagtgatttatagtaatcatatagctcggaaaatactcctaaacatctactggaagctttattttgacatgattggcataatgggtttttttagagtgagcttgaatgtaaaactctgatgcatatggtgcctgagagggattacatcatccatgtgtgttttttttttcttttgttagttacattatcattctttttcttcaatgatttgaagatttgggaatattttgagaggttagtattggactttagattgttcggtagctgaaatattggcggagtttactttttgaaagcaagtttgtaacactacatctaatttcaacactgtagaactagtggaatttcgcttcacatagtagcaagttgtttgctttcaagattattagataattctgaagaataactgaggccggtctttgaggagatcgattggttttgtatgcttagtggtgatttttttatcaagctgccttctaatgtctgttcttaggcttccagaggtgtcaactgatagaaaggcaattgggattgtatcatactacatgtacttagataattattatactattggagagaagatgattaaaaagacaattattattatactatttgagttctgggattgtattgtatatctccaaggatttggtaggaataatggtgtagcaggctttgtactgaaaaaatatatatttataggattaaaattgttacatgtgattggtggtttatcatgaatgctgagttttaggaatcagttcagcccgattatgatgaggaatgtaagcagaagggttaatacaaaatgaacttattgactgtggcttatcatttctccttaaaatcatcgtaggctttgaagctgaagttttcgctttttgctagacttggattttgatgacaaaattttaacatggattggctttttattctagtccattttgtattataaaatgcaattgcttacaatcaagagtttgtaatcagtatatttgaagagtaaatgaaaatgagcaacattgagatgatgttttctagtattgtattcatcagttgattaaccttacaactcataagctaatttcattctctgtggctacatcttgtgcagcttaagcatggtctagttggtttgacaatgggtgctttgtggaggtatgtgtgattcttctctacgcaaaataaaacattgggaaaactatgctttgatgtttgaaaagaaaagaaaaaattacaaccttttatatgattatttattgtcttgtcactttgtggttctaatattggttaccaagtctgtattatgcataaattttcagttcaagaatcaaaaaagagttagctttctgtatgttcctctagtgtggttacttttaaggatatataatataaggacagaattatgaaacatcttttttcaatttccttcataatgatagacccaagatagtagaataggatacaagagattaaataaaagggtatttgtgtctttgtattaagggtagtgttcgggtgggaatagaagagtatatataggatactaaggagaattagagggtatgcaatgtattgagtaaaactctttgcatcaaaggggcctaggggcacccatcttttgtaactagcttttctcatacattcaatatcaatcttctataaattcctactgtttggctattgttctattgctatttaaattaattgtgtttaggagtatacttatgacataattttattgtttttatttttccttgttgcatctttcaggtcaggatcagattggaagctctcaatttttctatgcacaattgtactgtcctctcctcgattgtcttaaatttgtttcaactcctttttttttataagaacaagcttataatgtctttatattaacaggtccgcgctcttggtgctgtcggatatgttttgattacttcgtttataatcagggaaaacatattggctttggtaattaatcatctatatctttagtttatttttgtgtgtttgtgtattttcttttcttgacattgtcaggaattaacaaagtttttggttcacttgcagatcacaataaatatacatgcttctcttacattcttgatcactgcagcaggagtttatacagttccgtcaatgaatacaatttacattatcttcggggttttggtattttcacatctcaacctcctcttatcttaagcccctccatgtttttcttattcagtgttaactttgtcgtgttcactcgaacaggtttttctaaatagtggatcatttgtgttcctgctgcacctgttgtattctgttttcctaaccaggcttggattaagggcctcattaagaatgccaaaatggctggagaaagcaatataatttagtaaagcatttgtaaagatgagttaattatttgttggggcggctaaattagtggtattcagttcattcatcacatttttactatcagctaccctttcaagaaaatatgattcctgtaattattaaaagaagtgccaatatcatagctgttatgggactcataataatgtagtagtgatatttggaatgcggctgcattggtagtaaagggaggaaatagaattagaccagagtaatttatttaaaatataaaataataaggaatatttgaaatgaaaatacttaataaattattatatttgtaacattttttaaatatctaagttgtttttaagcggcgaggacattaaaattctgaagtttgtaacaatatctaaattattttttagcaacaaaacaactaaattattacaattgtaatgtttaaagttatattgttataattaaagtgttcgtttggtacgttgcgttgcgttgtgttgtgttgtgttgcgttgcgttgtcttgtcttgtgttgtcttgtcttgtcttgtgttgtcttgtcttgtgttgtcttgtcttgtcttgtcttgtcttagtattatttaatacaatacgatgtttggtattgacttgtattaattgattgtgtaaagttataatatatttttaatacattcgatcccaacaccaactatcggttcgggtctcgggtctgggtctgcatccgaggtccaggatccagatcttgggtcggggtccggggtctgggtctgggtccaggtatcgttctacccttcaatgtat

SEQ ID NO: 300490 - DNA, 1248 bp, Cannabis indica
tgttagtgaacctatcttacagagtccagctgtcacttaattttgttttggttgttattttctgttgcttgttagttagtcagttacggttgtaactgtttttctgttttctggttttgtgttctttgcctgtatatatactctgttgctttcagtttgttactttgcacatcaataatacaaaagaactctttctttcaaagcttctacatggtatcagagctgatttctttcagcaatggcgttcgttcaaagccaaggaggttcgtctcaaaccgctgctaatacaaatcctacaaatccttctcttccaaaaacctctcctacagttttctcacactctctctcagtcagattagatgagcacaattatctaccgtggaaataacaagtgtttgcagcaatcaaaggagctcgactgcagcgatttcttgattctactcaagctccgatgatgttcaacacagaagcagatcgcgctgcaaatcggctcagccctgagtatgaagactgggatcaacaggacagtgttcttgtctcctggctcctctcctccatgtctgagaaaatcctaactcgaatggtcggatgtgatacggcagctcagatctggagtactctgcgtgagtattactcggctctcaatcgtgccaacataggccagtatagaactcttcttcgaaatgctaaaatgcagggatcccttggtgattatctactcaaggttaaacgattggttgatcttcttgcttcgattgggcatcagatcacaccagcagagcatattgaagcgattttcaatggattgacaagtgattacaacgtgttcatcacttctgtcaataccagaactgaagaatattctgtggcagagatcgaagcactactaatggctcaggaggttcgtctcgagaaagctactcacgaactcgacatcgccaaaccagaagcgaatcttgctcataccaagccatttactggtggacgaggtacattctcttctccttatcttcaatcaactactcacgcaactgtatctcctctatccagaccatctgcacctcattatggccagtatgctatgacacatgctccacctggttttggatcattcaatcaaggccgtggttcctcatcaggacgtggaaatcagtccaattccagtaggcagctactctaatggacgggacaatacactgcctggggccagaaggtgcagtgccagctttgccacaagcttggccacac

SEQ ID NO: 300491 - DNA, 3764 bp, Cannabis indica
tgatgttgaataaaatggattacattgaaatggagttttattaaaggcataaaacccaacatccttaacctcaggcacacccctagctgatgcaacacagtatcgaagtgtcattggtgcacttcaatacttactcatgacaaggccagatattgctttcgctgtaaacaaattgagccagtatcttaaagctcctacgattgatcatttgggtgcttgcaagcgcatcctaaagtacttagctggtacttcaaacattggtttatccttcactgcctcctcaaatttcagccttcaaggatactccgatgctgactaggctgggtgcagtgacgacagaaaatcaacatctggatattgcatgtttctaggctccaatctcgtaagctggtgttccaaaaagcagtctgtagtcgctcagtctagtactgagtctgaatatagagctcttgctcttgcaacatccgagttaatttggttggaatccatccttcacgagttgtccattcctcttgtgcatactcctgtcctctggtgtgataatttaggtgctagttccttggcttccaacccagtgtaccacgcccgcacaaagcacatcgaaattgatgttcattttgttcgaaatagagtgttggaaaacaagttggaagttcgatatgtcgactcaaactatcaagttgctgatattcttacaaagccccttcacaatcctcaattcaattatttaagggacaagtgaacactcaaagcaatgtaacttgaggggggatgttagagataccaaacacagttagttaaaactgttattggttttctgttaaggggttagtcagttagttaggattgggttggttgtactctttctgttatatttgtttgtaactgactacatatataaatatcagcttctcactctctttcttaacaaagcttctcaacaaagcttcattttacattctctctttcatctttctatctttccatttctctctttcataacaccactcaatttaaatcctgaatttgtcactatacatgctctaaaaagttaactgggtgatccttatatacttcatcttgagaatagataaacttcataccaggctagtatatatactatacgtaccaaacatagtttcatggttggttattaggcactgctttctatgcctagacactatatgctttaacagtaatagtcccttttcactatttccaatacgatgttatcgagctaatgaattctataggtaacaaaatgattgtaaatttgaaagatcgagagcttgtaaaataatatgcaaggaattgctaaaagattttcaagatgaaatgtttgaatatattgcactctctagctccaaacactctcaaaatcaatgtggatgcatatttattggtcataacaccaagtgcatgttgtagtgttggtattgttatccaaaatagtcaaagctaggtatatttttgttttttttaattgtttgagtatttttttttttgaaaagaagtacattatcataaaacgaaatagttagacctctcggttcttataaaataagttttccggtaagaagaaaaccgaaatagagccatttaaatgatgagtaaaagcccacttagccatcttgtagtcaaagagagatttaacttaagattttctttttgtgaaaaaagatgtaaaactactaagtgtatatatatatgcctatgatcactactttctagtaaattatagttgccatcaaagttggccttcaagttaattgctgcaaaatccaacctcagatttgtagattgaattctttgcttgcaaataatcaattaccgatgatgatgaaattttgcgagttattaatttgagttgtaattttggtttgattaatttgttttaagcatataagattattgctttaaaataacaaagcttcaaactagatgatgaaatgagcgcttcctgctcgtctggcttttgatattgacacaagcgttattccatttaattagtttgtttatttaactatgaaaatagaaaaagttaatgcatacaataatatttttttagtgtagagtagcatagtagaaagatttatagtttattaatatctcacaaacatgtacacatataaagagcactgttattaggcaccagtggtacctagcactttctcgacatgttgcattgtgattagataacgatactccctaaaagttattatattaaataatataagacccgatacttagttagactaatagcgatattaacacgtaggagggtgctatagcatttctccacatatgaaatatagagaaatgctaaaggacactagtggtacctagcaccctcctatttgttaatattattattagtccaactaagtatcagtctcatatattttaatataataacttttaaggaatattactaaccaatcacaacgcgacatttcagtttattgtaacaatgctctaaaatatatcgtactaataaataaagcaacaaataatattaataatatattttgttttatttacttattaattggtgtgtgtaaatactaatcaattaacaatgaaactgaagaaattaaggggacctacttaagcatgagttattatgactatgatagatcattatcaggggagggattgattcaaggactgtacactatatacatacatggctttgcagtgctgcaactctctgtccaatgcgcatcatacaaaataatgttatcgtcttgtaaatcgaaaatataaaaaaataataacaataatcattgtttatatatgatcatcaccacacacacagaaggagagaaagaaattatacatatattatgttcagataattcagaagagacctaataagatccgacgaacaaatgattgctattgtatataatgtcccctctggcctcaacactgtgtcgctttccttgggttgggtcccataaatatgtatatatgtattatatacatgtagttaccaagtgtacatgtatattatatacacaatgatgatattattattattattatatatcgatcgatctctagctcaccgccattattattattattattatttatggttgcgttttgtatttggttggcttctttaaagttcatttatttttattttttctttttaaatttgtattatagtttttggttccaacattacgatctgcctcgcgcccataaccctagctatagctaatatacgacagtacaattcttacgtcaatcctctgactacgacttccatctcccatcttccatcattatcatactcacgctcctttcacgtgactttgtcccaccaccatcatcttctttaattattatttactattatctataatatatataatatacatctaagtacgtatagacgtacataacattgccctatctataattatacgatactgctttaaatagttttctactacacaattagttagtatattttggtttgttttttttttttttttttttatattgactcgatctcattccctatttatatttacaattttgaagtccaagaataatttctaaattaatttctctattttcaaatagaaacgcattaggataaagtcggctggagctgttgcgttctcatattttagaaaattattggaactgaataaaatgacaaaactgggaatagaacaaaataatatataatggttattattggatctcaattattaattttggctatttttctttatttccgtatatat

SEQ ID NO: 300492 - DNA, 2419 bp, Cannabis indica
aaaacagtgttcaaagagtctgttgcacgcgtgactttttttattttatacgcgtgtgaaataaacggtttaaacattgatatctatattgtaaattattccaaatttttcaaaattttacaagatgtcttaaataactataacgtacacgactatgaaaaaatttagactaaaaacttcttatagctactgaaacagttaggggttgcatcaatacaccaattttgatggggtgtattgtagaagcactctatcaattattatgagctctttattgaactttacatgtctctagagacagctcctaactggcaagtgcgcatagtctataatagttacattttctgttgtgcttccttttacactttgtaaaaacctttgtcgttgctcaggtgataaagcactggaaggtaaacaatctttatggataaatttgatattgagataaaaacactagataatacacatgtttgacggaaaacatgctctcccccaaacaataatggtctgagcaccaaaattagcctggctcactcttgtaaatgacaacttcctaattaattccaactgaacctaaaactaacccatccactaagtttagtaccaaaaaaaaaaaaacagagcaaccttattagctatcttgtacaactaaactactcaacatcaccttcctagtttacttggattctatacttcctgctttcacatgaatcaaacagggattaagctgagaaccttcaacactgaattacaattgcctagggaagaaactaacaaaccagtgatcttagaaagagagggggagaaaaaatcaaattcatcccgattccagtcgcctgacattacaatgtaagtttaatgaaccaaaatcgaaagtaaaagaggtgtacaacaaacaaggcacctgaataatggatcagcaatgcaggactgtgtccatccttagaatgtctcactatactcccaaaggcactcttcccaccagcaatatcagcatcccctacaccaagcctccatgcctttaaggtcacaggtattgtcacttctgcaccaggtttcaaaggcaatgcagattttaaggtttcacttgcaaatgagataacagaatcttggttcttcccggatagtgaaatatggacctgctcaactgaaactgtgccagcatttgccagatgtatccatacatcacgaatttcaccttcatgtagaataattgcaccatcaccaacaatatgggataccagtaaaggtagtggcggtaccacagaaatatttggaacagatacattcttcaatttcccagaaccacaagatctaaaaggatcagagagcacaagtccttgcattgctccaaggagcagattgtcaacatccttaaacaggtgttctgtaataacaccaaagcagtggacagtgcacccatgaattgtgacaggccccactgccgttggaatcccagacaaggcgataacctttgaggaattagttggaagattaacggtaacagggaaaggatcaaaatttcttgaattcactgatagataaatactatcgaccctcaaatcaaagccacacgggtttgccaactcaaccaaaacttcaacaagttccccaacaacccaaatcaactcgtgtttactgttgttatttggctctcctttggtgaatggtgtataaataaaaggtccagaaggagctgatccagcccaccaatcttctttagctgaattccgcttaacaatgtccatttgtgattgacgaagtggaaaagaatgcaatctggaataatgacacgtttactaaactgtaattgcaattagaataaatcaatgagagaaatgaatggaaataaaatattaaagaatcgaaattatgaatttatttgttgttagaaaactggctggccagacagagaatcataattattttatttttgtttacagttacacaactaggaaagttaatcaaaatgctttaatttaactaaattgccctatagaaaatgtatattgtaagagagatttttttggtaaatttgtcatttaatttatttttatttttaaattccattaccggtagaagtattacttaagaaaatgggattggaagtaatcccggtgttttctcctaaattcatgtggccccattaagtattcccattgttactaaataaaagtaaacaaatgaacgattataacacgtgatccccattcccaattagtaaacatgccataaattgagaactgcagacaagagtaatagtatggtgataaaagtagagctctaagagtgaatttatccacctaggaaaattaaaacagtagattagtaaataattagttgagatactgcagctggaaattttgagtagaaaataagtaagaaaaaacaaatatatatatatatgcaaggaaaacat

SEQ ID NO: 300493 - DNA, 4299 bp, Cannabis indica
aataaagacaaactttcattcaaaaaaaaaacttatttcctttaaataaattgtaattacaattataacctttattaaatggccacatatgattttaggcaaaaaaaaaattgtagtgttttagaaagatttatattgtttctttaactaaaattgttagaggagcattattaataagcaaaatattataaagacaaattaaatttgatacggtaaaaaattcagcgagcaaaattattagttattataaaatttattattattacatgcacattattgttgtacgtacaaggggacaaacaagaagatattaagctggcgtttggttgagaggaatgaaaatataggaatagaaataggaatgagaatagaaataggaatggaatagaataaaatttaaaatgcataaaaaattgataaaaaaatcattaaattttttctcttgttacattggaatagtctttcattcccttttaaaatagaaaagtcatttcacaaaaaatggtggaaagaacattccattagaatgctattccaacactttaaaatgtaaccaaacaaatgaatggaatgaaaattatttcctttccattccattccatttcattacctctaaccaaacgccacctaaattttcttttcttgtgcattgtcttggatgtgtaattacaacgaccataaaaaaaaaagtagggtagcaactgaaaattcaaatttctgttatttaattaattagttttcctagtcatcatttacctctcacgaacggtaataaacatgagaatagggattagcaatgtcacaatctaaattaggtatatcaaaccaccgcaagagtaaaaaaacacaacaaagaaagggacgagaatgtattactgagtagcatttgctactaataaattctgaatacaacttaaagaacccaaccactaaatagtgctagaggacgctgtaagaacaattttagctaaagtgtggacaacaacattaaaatctctagggcaatgtaaaaaataaatatctttcaaactattacaaaaattactaagttcatccaagataagaccaaaagaggaaattagagaaactttgttcactacttttggcacaattcaagtaattcatttcaaagatgatattgtcataccctaagcaatgacattggaccatgacatttcaaagcgccaaagtctccgccactcaggatcaagacaaccttccatgtgccaaacagcagaagcaagaacggtacctaagtgaccacgcaccaccataccaaggccactacaagcaccaattttatcgacagtagcatcactgttaactgtgaaagaaccaaccaacggaggagaccatttcaaaataacctcaccagaaggcaaagaggttgtcagttccaaagagagaaaatgcctagctcgagcccgactatgttggaaattctaaagaaattcatgagcccaattcatcaccaagtcaagaggcagtttaatgttattatgcaccattttatttcttttgaaccaaatacgccacaaaatgaccacaaataattcaattttatccttcggcaaaggattaataacattatgaataaactaaaaaaatctgtatgagtggaaagaggattataccgagctcaaaatcacaaaaataatacttattttgtaccttttgaagatcaatagaatttttattaattcataaaccaaacatagttcattgcatgcagatattgctcatcgagcataatcatcaaaagtaggcaaatcaagccatttataataaggacaaaaatcctaatatcatcttcaactaaatgacttataagtagatttctatcataaatgtatatcaatgacaattaaccaagaatcttttcaataaaaattaagtaaagacacgtcatttattccaacaagaataacggagaatcaaaaccaacaatgtcaaggacaacacagatgaaagattgattcatagaacaaggtgttgatttagaaacccttacataacatcactaattatctcactaagaataaaaactactaattccgttaacccaaaggaatggtgtaaactcaccattattaagaacaataaataataataataataaaaattactataatccaaaacagcaaaaataaagtaccaaaagagacaaataataggagaaccaaatactacctcatccctatctagatcccaaccatcactagtatccataccaacctatgacataccaccatagcatgaagaaaagcttagagagaaaccctaaataaaatcgtacatacttagtacattcatatttaaaaatgttgtgttaaatataattgaatttataaaaagtatattagtgaacaaatgctaaagggcgtatttcttggtcaggagatggtgatcttaaaggtgagtacaagaaaggttggggtggaacttcgagagaatcaactgtcccttccaacatttcaattactcgattcatggctggtcggtttgaaggattggtctgaatacaccacaagcttactattatcatcttcttcactttcactccatcttcttcattaacaattttctttagtccaagattctcatctaactcgaggtgtttataaatccaatgtgggaaatatatctcacttgtattattagcttcaacattaatattttttcttcctcctatcatttccaataccatcattccatagctgtacacatttgatttatgtgacacatttccaaaatttctatcgaaaacttcaggagctatatatccaacagtccctcttgtacctaacattgaaacaccagttttgtctcttttacaaatcttggctaggccaaaatctgaaattttggggacaaagccaacatcaagaagaatattatgaggcttgatatcgaaatgtaaaatttgagtgttgcaaccacgatgcaaatactcgagtcctttagcaataccaagtgagatttgatggcatgtttcccaattcaagtgatgatgattattttcatcatttgtattgtcatcaaatatgaacttctcgagagatccattaggcatgaactcgtatattagagctttattagcctcttcgaaacagaatcccaacaaagagacaatgttgacatgggatgttctgcttatggttgctacctcattcatgaaatcttccctatccttaccttttgattggttcaacaccttcactgcaacaacaaagccatcatctaactttcctttgtagacatcaccaaaccctcctttgcctaatttttgtgtgaatgagtttgtcatttttataatattggaataactatatcttctaacttgaatggttccacagatttcaaggaaggcatcaacgtcttcattacttggattctgtttcttccagattccaaaggttaagagtaacacaactataatcattgcaatagttccaccaagtacatcacctgcaagatttttttaaggatatgctcacatgcattattaagggagacatttaaatcaacaaacacattagtctttatcaaatgattcaaatatatattgtttggattatatattctgcattttatatatatgtttttcaaaatttggaatgaatgagaacaaataatgtcgagaaattaataagttaagatgatgtatctaacctactccactcctagtcttataaagtatagaaaaattctataatgcatctcttgaaagggatgcactcgtgcattcctatctgtttcgacattcaaaaaaaatttaattagaatttttttataattgtgtacgttgtagttatttataacattttgcaaaattttgataacatagttgaatactttagttaaagtgtcataattggttggtcatttgttagttattttctttatttataatttaaataacagggtaattatgtgtttacttttattgaaagatcaattattaataatcattttgttgcttaattagaggtcgtttattggattcttaattgagattattgttaaggttattttcttctggtttcttgtaaacagtttgattagcctatttgtcaagttttcccttgaatgatcttatcaataaaagtagagtaaagaacactagagagaaaaaaaaaactaagagcatgtttggtattgttttctattttttggtttcaaaaaattgtttttagaaatgagaaaaaaaatagtttttgaagtttttaaaaacaagtcatgtttggttagtgttttttaaaaacaatattgaccaaaagtgaattggtttttaaaaca

SEQ ID NO: 300494 - DNA, 3101 bp, Cannabis indica
ccagcataaaatgaaaagcgctagtaaaagttagattttaaccactgcaaatgtacgctggtaaaactttgacttctttgccagcgcagtttgcaaaatgcgctggtaaaagttacttttaccagcgcagtagcgaactgtgctggtaaaagtgacatttcttgtagtgattattcaaaatgctagtaatagtactcatccattgctctgcctttataatatcagtaccaaacccaggaaagtcaaaggttgcagcttgacaaacctttcaaagattgaatcactgtgtggttgcaggtccaatccaagattagctaccggggctgcctgagtcagttgcctaatccggcgcgactcttcctcttaatagagtatgatagtgtgcatttctataaatatttactgacaagttggcaagaggattatcattgttcatccccggccgcagtattctaagaattttgcgaaggtgttggcggtaccggtagattggttggattatcatcctactctacagactcgcttagtgttctagttgatttagtagggtccattctttcaaacaaccctaaaatcatcaatcccagcaagtcacgcaccaaatccacacttacacacttcttgccaaaatcctaactaacatacacaattcttttccagatatagcaattactactcacaattaatgatcatgtttttcattaaataacatattttttaaaatgctcgtatgctgcttattattaaaagcgtaaacatttaatcacataagcagacagtgagtttgtctttgacgaggattgtatatattcagctggttttcaagaagtttaaaaatcttagtgttctaatataaaattgtaatatcctacccagaggaacgccatgtatcgtatttacaataaactagtctcgttaatcggggtccataagctaagtgatttaaagtaaatattaaacttgatttaataagtaacttgcaataaacatactttacttaaaacaaaaatatttaaagttagatatttaggatcccgtaaaattattttcaaaacattacaagttattttatatagaccaatctaagcaataaaatggaatttttatgcaattccctgttggatccaacccctcgtggtctagcttggccgaaacatgtacaagtcatcctcaaaaccctcgaattcatggctgacctgacactactttactcttgcctgcacaatagagcacccatgagccaaggtccagcaagacagaaaataatacaaaatgaacaattataataatcacatttcagatattatgcctccgcgtatacaactgtgccaccgcattgtatattatattattccatacataataatgccactattattagtgtctatatagaatagacctacgtgttacgctcacacttctctttaatttatttaaggccttaatatcatttatcgattataattaccgagtcggttatgccttactcacataactctatttaattatcaacttaacatattattacatatatatatattcatcaaagtacatataatatataaatgcgtcatggtgctatactttacgtgctcagtttgctgtcttacaaattttcaaggtatgtgaaaaaatctcaaattataggtgattctaaccaagcgtcgatattcttagtcacaattttcaagtttcacaaagtaggattaatctccaaaatcaaattatcaataattcacagttaagaatatccacactgaatcaagtaatagagctaaacgagctttttaattatataaaaaacttctcaatcagagttcggagtcaaacgttatgctcaaaataagataataaaaattgaactgtcgccgccatctcgtcgtgaccagattggactcgctgcgaccagatagaggtagaggctaaccactgttttgggtttgagcctcatcgcagtgaccgtatatctggtcgcagcaactagcttaaaaacccataaattcccaaaaatcaggcttcttaccaaaaccaagcatttaccaatcacatccaaacttcacttagttcatgcaatctctattaaggttccaaactacagttcaaaaaatataaacacaagcattctaaatgtttaaacacataatcataagctcaaactcacaaaattaaaacatttagaaatttaactcaaatttatatgcttttaaaaactcaagaaaaagtataaccgaaattctcaagctcaaactcacagtaccaaactaaattaccaaaacaataactcatgattcaagtcataaaaccaacaaacaaccggcttacactcctcaattacaagccttaaaacaacaattaaggcttactcaagtccatagcttttccgtaacaaaccaacaaaacacaacaacatgcaaccaacatcttaacaatcaaaatcaaaaatcagaacactaaaagaattagataaaaactacctcaatgttcttcaagattaagaaaaacacaaatcccctaaaagagccttccaattcttcctcaaagttaacaatttgccaagtgagtttttgagagaaagataaggtcggttagaaaggatagaaccaaaaaaattgatagtgttttctctaactttccaaaaagaaacatataattcatttattgtatttttgatcaaatgaccatttttctcctaagccttaaaattaatcaatattaatggcaattaaagaaagtatagtcattcataaccacaccaatatattcacacattaatcacaaagttcataatttttggactccgaactcgatccaagccaaaatacctgattgtgattaccatgtcaacttatcagaatttacttgtagtaagataatacgaacatattatataataatatagtccattagcacaatatataaaaaaaattacgttttttacttttttcaagtcaaaattataaaaaatatacccctaacttaattataagtgggatctttgaatgcaataaatctcaaataattttcataattaactatataatactataattactcattatactcaattaatttaattagggttgctaatccatttactaatc

SEQ ID NO: 300495 - DNA, 4056 bp, Cannabis indica
ttaaaaggggataaatttttttaaggcccttagattaagtagacccttagcacaagcctaacccgtctatgcttagggttggacttgttaagaatatcacttttgacgggtatttttacttgaaattagaatttatcattatatatatattaacaatgtctgtatattatagttataataaatatatctttaaaaaatttggaaaaaaattatagtatcaaatatatagttcaaataattagttgtgtatacttattttttatacactaaataaacgttatttttaatacagtaaattatttatttaaaaaaatcaaaacttaataaaatatagaatattattattaggtatcagtggtacttagcaccttctaggagtgtcgtcttgtgattagctagcgatactctctaaaaattattatattaaactatatgtaacccgatacttaattgaatcaacgtaggaaggtactaaacagtaaaccaacttatacctattacaatttctctaaaaaaaaaatatatatgttatgttcaagtataaaattaaaatttcttaaaagtatatattaatattaataatatgataagttcaaagtggttgactagtagttagaataccaactttgatgtaatttaagtcaacatatttggttgaccacacgctctgactttgtagagtgacattattattgcatgcctttcttttttgttcaaagtcaactcaacagaaatattaataagtttattgatttttaataaaataaataaataggatcttaaaacatgaggcctataactcaagactcaagatgataccccactttcagctcaagttaattttgcttttacaatttaaaaataattattatgagtgtttttttaaactatatttataaaaacataaatgggataattcatttttacaaaagtgataaaaaaatctttttaaaaattgtaactgatatcaagttaaaaaagcccaacaaaagctaaaaaaaaaataaggcaaagtaagaacaaatactttttcaaaaaaaaagaacaaacaagatatatatgatattttaataataataataaagaataagtgaatgaataaaatagtaaccatcacaatctgttataatggtaaagaaacaaaataatagataaacaacaaaaatttgctgtaaagtagtataaaaagcatttatttatagtagggagatgaatttggtttctatatatagatatatttgaaataaaataaaataaaataaaataaattgatttattagaattgccaggccaagttatatatcttttgtttgattctcttgttgtttgtattgttgatgtacatacaaaaataatgtggctgatgaaatcaattaagaataatcggtgtaaaatttgcttatattttaatttttatatatttaatatatatatatattttttgggtaaatcccctgaattctacttttttatacacttaaagcgtcagttaaatattattattaaatatcactatatacctgtaaatcttcaaagtcaatacaataataatccattaatgatattcagttagcaaaaaaaaaatataaaaagattttaccactaaataaagataaaaaattatgtgtaaaaaatcaaaagataaaaaagagtttcaccgcaattaacccatcaattaattaatgtttctttctgttttttttttttttttagtaatttaaaatttgaatataaatatatatatatatttaatataatttttgtggggtttaaaaaatgaattaggatgtgaaggagaagcatgcacaatggtgataaggactctacattggatagttccttcatattggatatggggactcccattcttcttgttttattcaacaaggtcttctcaatttcttcatcaaaccccaaatcaaacacttttcaaaacctttttatgcctccttttttctccattggtaagtaaattaatcatatgtatctcattttttttattaataattactttattaatcatttttatgagctaataattaattgcaaaaaaaaaaaaaatttaataataaggtgagtgttcggtaaaatatgatatttgaagaacattttcatacctctttttctcttatgataaataaatcttatagcttatatcccaatttatttactaattactttatttaagttattaattaataaattctttgtaattacttttccaaaaaaaaatatatatttcgacatcctttaaaattaatagaaatatttggtaaaatatttatttcgagcatcttttagtaacagaagtattcaataaaatatatatgatcttccagacacactcgacacacacataaattaattatatttgtttagaataacaataatataataagaaaaattagttttacgacgcccagatcagtactaattattattaaataattgatatttatagagaagaggaatatcaaaattcatagagcaatacttgttatggaaactaccattggtgaagtatggactaaaaccagatcatccatttgaagaggactatgcttcatgccaaatggctattttgcctgagaatttctttgaggaagcagataaaggaaaattgaagttcaaaaaggcttcaaaatggggtttttggagtggtggtattgaatttgaagacaaaactagattagaagttgatgtagttcttcttgcaactggttatgatggcaagaaaaaactccagtctatatttcctcacccttttaagagccttcttcttgactccaatggtgtcatgcccttatataggtaatatataataataatcaaattttcttttgctatttcacaaattttttttcactatatatgatatagtaatatgggtatttgttattagagatgagtagttagcagttttttataaaataattatttttagataagtgagttttggtattaaagtatactaatagcggtattctagaaagattgtataacaaaaatggtgtttttaatatatagtgatcattaaaatttgaaacatggtatttttaaaaaataaattgaattactttattgaataaaatataaaatatgacattttaaacatattgggcctttacaagaaaataattatgtttttttagtatatagtagtaaataagaagacaaatctaaactttaaaaaaaaaaacatataaatctaaaatataattttttttaaaaaaaaaaaaaataaagggccaaagtggagcacatatcgcccttgcatcgagtcctacttatgtcctttataacatttctctctatttagtatttaatttgtaaaaaaaaaaaaaaaacatataatatataagtgaatgaaataaaaatatgtactatttatgctgcaaatatttctatgtataatgaaatttttgatatgtgtgacaggggtacaattcatccactgatacccaacatggcatttgtagggtacatagaaagtgtatctaatttgcaaacagcagaattgcgctgtaagtggttgtgtaggctagcggacgagaaattcaagcttcctccagtgaagaaaatgctagaacaaataaatgaagagttagagatcatgaagagaagtacaagattccacaaaaggcattgcatttcaacttttagcatcaaccatagtgatgaaatttgcaaagagatgggaattaatccatggaggaaaaccaattggttttgggaagcttttagcccttatagcagccaagactattatgatgagaatgaatgaatatatattattagaaaaagaaaagaaaagaaaagaataattttaataatattatttatgggattgggatatgcatgtggggtaattaggtatttaatatataatattagagaataagaaaatcaataatttaatgctctattatatgtgtttgtacttataataattagtaattatgatgtgtgtggattgtgatcacatgaaataaataataatttgaagaagctttagtagtatttatttataatttgttttatttttttttttttttt

SEQ ID NO: 300496 - DNA, 2309 bp, Cannabis indica
ttgttattattataattataatttatgaatatgtataatagacatagaaaatgatgagatagtggttgtgtttattgatacatacagaagaggcagagagaataataaaatcaaaaggaagggtattttgtttggaagatgaaccgggagtttatagggtgtggaggcctaatggtaagagtcctggactcgcaatctcaagagcctttggtgactacagtgttaaggaatttggattaatttcaacacctcatgtcactcacaccaacatttctaccaatgaccactttgtcattttagcatctgatggggtaattcttcttcttcttcttcttaattaatttttgggttattatatttaataaaagtacactcttaaaatggtgctgaaaataaaattttaaatgttttgttacacatgcaactgattttttttatatgtgttaaataattttttaaacattatcacaatactataaattattcaaaataaattaattttaaataagtacaatatttacgattataaaaaataaaattaaactagaaagctggcttaaatactgaaggagataaaaaatatactagaatgatcctttttgggaaaatattgtaaatgtattttttttatataccttttaatatgataaattaatgatatattatgtatataatccttgatcaggtgtgggatgtgatatcaaatcaagaagcagtggagatagtgtcatgtagtgtagagaaggagaaatcagctagaaggttagtggaatgtgcagctagggcttggaaatctaagagaagagggattgcccaggatgacatttcagctatttgcctatttttccattctcctactactaatatatctactgctttacagcccaatgactttttggtctctaagttttctaccttatcatcatgcaaatctgtctagatttctaatatatactcaacagtctagtatgttctctagcttttaagttagaatagtctaatatattattaataatatatagtctattattatatttttccttttaaatgactaggttaggtgatttgcttattaaagtgttggattatatattttgtttgagttgtgtaaataaataaatgtaattgcttacctattttataggacacacaccagatatttttacttatgaaaattttactttatttattttatcacagttgaaaattactaagaaaatgaaatggttttactcagctcaatttggcctgagtttttgctgcattttatactaattggaggagattgatacacttggcatcattctagaaagaaaatcatacacagaaaactaggcataacaaacttttacaaaacctataaaggaatattttgatttccttctctcctccaacagaatggggatggccaccctgtcaataccagctcagcattattaagcaaaatcttcatttcttagcaccactcctcaaacaataggctctgtctttttctctttctatgagggttggaatttctaatggatacatgagattatctcttgagtagttttgttctggtttagaatcctttgtgtgtgattttcctcttctttatttttactttgtggcgttttcctctcccttttactttcctcttcttgacaatcttttcttgactcttatactcttgagttagaatttgattttgaactcagtgatgacgttacaagaacaggggtcttggcttgcttctttgaaggtgaaggtgtctctaaaacccttctaaaatctctgaaattgataaataataatcataacacattttcatgaaaataagttttataaagcataaaatgcataaataatggtataatcattaatttctacaagtgtttcactaattactcattacatcaaagttcaaaaggggtattttcgtaaattgaaacccacatctacccatccaactatgctcatatgttatctgacgatccaaaatgaagtcgtgcactaggtattgtgaaatgaagcctaataccgaagattattctcctccctaaaataaatattaaaatttgatgggggtgctaattataactttttattataaaatttttagttaatttctatgctcgaaattacatgctaaaatatcttttttaatttttatagtagtattcgttataattatagtttcatttttataaatttttgaaaatttttaaataatttacaatatcaaaaatagagttatgatgttgtaagcataacgaatttttttaagaagaaaaaaattccaccatatattttcaagcataaaaattaac

SEQ ID NO: 300497 - DNA, 2438 bp, Cannabis indica
ttttcacttttccatttttaataaatttaaatttcaaaaaaaagtaaccggtagcaattttttcatacctaattatccctacatgaacccctacatgtaccctaaccgttggatcaaattaactacccatcaaacggttacagtacatcacggattgaaatccgtgtccgtaacgaaatccggtccctatatatttaatattaaaagataaaataaaaataaataaaatttattcaccttaaaaacattctttaaaaatttagtggaggaagtattttttttcttttatctcatatttaaaaaagtgttctctttgctaagtaaatgaatataaattaatgatttaattttgttgcttattaataaacatgagaactatatggatggaggaaggtaatctttagtactctcctttgtattatagccacgtattgttcaagcacaaatacaagagccaaactaacaactttaaacaaaagagctcagaggaagaaacttagctctttgtcaaagatactgtcacaactgcacaagtctaaatattcccactccccaaattattctattctatttaccaaaaccctagatacaggcataaacaagacgatagaaaatattaatctaataattaaacataggagaacattaaaataagatccaaattcattaagattcacaacgacaaagcttttgatttaagaaacctatgcacatgggtggttcacttaagatgaagaaagtgagagagtccatctttgactttctcaaggccctatagaacctagtaatattttagtatattataggaaagtgtttaaaaaaatgagacaaataatgattaatacttaccctttttttcagatcattgtctaaaatattccactactagcttctatggaattcgagataagaaatattatcctatgtgtgaaaaccttaagatgaggatattagaaaaattaaagaatattataatattaataataaataataattatgtatgtgtactttattgatctatagtaattactgtaatttaatagtataatactattaattaaatctttctccttttttattcaaaaatttctgtatatttctttttttaattttactcatacaataattatttatatatattaaattgtacctccagtatttttttttttgaataaaagatgaaactttattaaagtatttcttgcacaattacatcaaacatgttactcggaatagaggaatccgaataactacgatcaacatataaccatgagactcgagcaaaagcatgagcaacacgattggcagattgtttaacaaaacgaaaattaacattattcacgttagaaagaagagatttgcactcctcaatgcatctaccgaacggagaggccattgttattgaactacgaagagcttggatggtaacaatccgtctccacagtgacattggagacatttgaattttttatccaacttagaacttccttcactcctaacgcctcaacataaccagggtcgaccttcccttgccaagaaccggtccatgcatggatgacacaacctctagtgtcccgaaacacccaaccgaacccaaatttgttcttatcctcaaacgtagcagcgtccacattaatcttgaaataatcaacatgaggtgcacactaatgctcatcaccttctccaatttcaatcaaggaagagaagggtgaagaagttctttcttgagcacatacccattgttcaagatcgtttcttgctaacgccacaacattcttgacagaaccagatttaccgttccaaacctgcttatttctgtcttgccaaattgcccagcagagcatagcgctcagttgtttgtcattgctgctccatctctgaagctagtgatgaaaccagtccctaaaaatactgtcaccgatgctgccattgtaaagagcagcaaacttccagcaggcagccgcaaacgaacagcccacaatacagtgagaagtagtcttcgacatacgatcacacctgggacaagaagaggcaatttgaacatgcctttgaatgagttgcacccgagtaggaagacaattagacaaagatctccataacatttcctttacttttgggggcaccttcaaactccaaaaatctgtccaaaaacaagaaatagaagtggaaacatggggattcttcaaatgttgaagcaagtggtatgctgattttacacaatagttacctgaagtctccctactctaataccaagtgtccaccgaatttgacgaagaaaaagggatcgaaaggatcaaatccttgtctctaatattgaacaagtcagaaacgatttctacatcccaatcttctccatccatagtcattaagcacttcacttgtttgtcacaaaggttgggatgtgaagaatgtggttttgtgctctaaataaaacccat

SEQ ID NO: 300498 - DNA, 1315 bp, Cannabis indica
ttcatatttagggtgtttaaagaacatacttgtgagtagatctaagatcctggtaaaataatttccaacagctatgcacactaaagaagtggtcgggagatgcttacggttagaagtatccagcgaaacggtcaaaggtggatgatgctctgcccaagaacctagtcccaagcaccaaatattctcagccgaccgttgagaagagctcggtcatgcctccaactaaggttcctatggaggcagtgttagatgtaatccaccggccaagaataacccaaagtctcaggcaacggtcgcttcatccaaaggcgccaagtggggaagcaaagataggtctgggctgcccaaacccttagcaactactgccgtgctgaactctaagaatgcataggtccaggtaataagtttagcccagtcactagagtaaagtcgacttggctgaatctacatctcttctttgtgatataaaaatgcactttgtgtcccagtttcgatttgatgatgtgcatgagcaactgatagataagtctactcgaaaactataatggcactctctcaaattccttacattttgattttatctttaggtaataccaaccaccgccccaccaaatgacatgcctggtgtaatggtctgacactagaagtaaactgcttggaggtttttaaggctgtagaaatagaacacagaaaaatggaagttagaacttctatgtatttataataggaacatcgggcctatcaagcatagcaaaaaatataaaattgaccttgttatagtgagatttttctcacctagaaactcgagaccggactcctgtttaaaggacacgtgtactcaatttccccaaggaaagctgaggtgtcaatgagagactcctcgagtttaaacctcatctaagctaaactcagcgagatgatgcgaatatgaccaaagtctaatcgcatttacgaggctggcattatgtgggatcaaggaagggacttaactcccgtataccatgatatatgcgagtatcctctcaatcctcctgcggaaacatagaggacgattctctataaagcgagctagtcccaatgacccaacaacctcgataaaccaatacagactcgtgtgtctaggttctatcagctcgttatacgatgtccgtaagtgcgactatacaagaacgcagacatcctagacttaagtaaatgttaggtgtatcctaagcttgcgagcttacaccagaatatgaatagctaactcgcacattagaagtctcatacgttgttgtatttagtgaataaaaactgttcttcatttattaatgtt

SEQ ID NO: 300499 - DNA, 1757 bp, Cannabis indica
tgtaaaataaaaaaaaaaaaacaaaattacagttgactattctaatataatcattaattgttatatttttcaaaaaataaaaaaaactttatataatcaaaaaagaaagaaaacaattgttacacaccattcttattgagcattaatagtgtctaatattttttataaatatttcatgattaattaggaatatttgttatgattttagacactaataacacattttaacaatcctcaatattatttataaccattagttgttataaataaaaacaattttttttattggtacaaaaataaataaattattcaaaaggaaaaaaaaaaagacagtgaagaagaatcaaaaaaacttataaagagaaattgagtttaaaaagccatgttttactcttctgatattcccaaagccgattctttcctttattattttttctcctatctctctcatcttgaccctttgactctctcttcctcttattattatttcattcattttcttcttcactcaccaaattcacattttctcttcaccaaatttcctctctttttctcgctagacaaacaagttttaataatcgaagcttaagctagtagagcagcttaaccctaaatctctctggtgttttggggaaggattcgtcggtggtcaacaatggcggcggcggctcctaggattacttcctgggtgtttacgctctgtgtttgtctaaccctagctccattcgttcgtggaaacaccgaaggagatgcactttacacgctgcggaaaagcctctccgatccagataacgtccttcagagctgggatccgactctcgtaaacccttgcacttggtttcacgtcacttgcaatcaggataatcgcgttactcgagtgtatgtttctctctcttatctatatgtttttaatttatatctatatatggtgtttttttttattagtttattcatgtataatttgttaaagccatattgtttagaatatgaacatctttcactttgagagtttggttgatccaactgaatcccgtatttgagcttttgtcttttagttcggaaaatgaacgtggaaattcgtggaccgtagcactgtgagactttatatgtgatttcactgttttgaactattggaattttatcttaaagtgaaactgaattttgagggtaatgaatctttggctgcaattatcacgtttggtgctacagagatatataagccataatggaactgtatatgggttgcttctgtcacaaaattgctaaacagtatggagtgttttttcgtacaaaaatactggggattttgttttcgttagagctgtagctttgttagttcagtcatcaatgtggtagggtggggacttttgaattcgatggttctaatttttttttcttcttaaaggtttgacaactagatcgatgtgtcaccatggtttgcattaatatcattatcactattaatatccttttcatgtttctagtcttgtttgaattttgagatgttgcacaaggtatatatgttagaaaaataattacaataataaaaatgataacacctgaggcgtgcaaacaagacactgtccttaaggatttacaaagtaatcccccaggattcaacaggtcttctgattacaatgaaagaaccaggaaaatagaaacagcaaaaacaatataatacccagccaagaacaatcatatataagtaatagatatatatatgtatatatataaattgtatacggtatatatatata

SEQ ID NO: 300500 - DNA, 1499 bp, Cannabis indica
cctaagatggatggaggtgctgtattttaagaagtatttcaaagtggaatattgctaacccttttcaaatatgtttgggcagtgaccaaaaaggaggaaaacctatgggttcgtagggtacatagtgtatatatcaaagataaaaattggtggaattagcaacctctttcccatggtagttggtattgagaagattgattgctatcaaagatcaattcaaaaaatttgctgcaacacaacaattttttggggagaaatatcaaatttctaaaggatataagttgctatgtccaaaccaaaatagagtttattggagctaggaagtgtggggaagactcaatgtccctaagcatagttttgtgctttggatatcgatacaaaataggttgagaacaaatgatagattgctaaaattttacattattgctgatgcaaaatgtattttctgcaacacacatattgacacagctcagcacattttttttcaatgttctttgtctttcaaatttcttcaacatgtgaaaatatggttgtcttggagggttgaattgaatcagctgtacaaactaattcggtggataggaaaagcaaaatgcagcaggtttcgcaagcaggtttttgctgctgcaatggcagcattggtttatcaactttggcgagcttgaaatgagattgtgtagaattcgagtaaggacagggaaactcaaattgtaaataagactaaaaataatgttaaagctagaattagctgtgtttggtcgaagaaagtaaatgttatagatacaagttgttttttcaagttgtaattggaaatatagtaaaaaaaaaagaagaagagatagaagacataactatacagtgactatattgtaggtcttcaattgaaagcattatttgattgtaaagatatttttggagtaatgaaaaactctctgattcataaaaaaaaatttataggcaatgcatataaaactttcctataaataaattggaaagctcgcaataatcttgtttggaataatcgtacaagctcagctgtggaagttgcttctacgacacatcaagctcttggccaatggaagtttgctcaaagttgtcgctttgaaccgctgcatctaagctcgaattgtagcagcaacaacgaattttggacaaaactagatgaaggaatgatcaagaataatgtggatggcgcaacgtttgagccgacaattctttcgggacgggttttattgctcgtgattctaatggagctgtcattttggcctcttcaacctattcgactggttcattaagtgcccccattgctgaaatgatcagcatcaaagaagtgttaaattggataaaggcgtccaatttgtcacatattattattgagacagattgccttactgttgttcaaactttacaaagtcaaatggatatgccatcgttatttgggattattgtacaagattgcaaagttttattatcttctttgattaatgttactatttgtc

SEQ ID NO: 300501 - DNA, 1252 bp, Cannabis indica
gccttctcaacttcctccgcccagtttctaggtatcgaaccattgctcttctcagtagtcggagcgatttcttcctcatatcccagatctgcacaaggttcatgataaatctcctccaccggttcctcctcaccaaccggagagtgctcagaagctatcaatgtcgactcgagtggtgttgatgccggctttcggacggccctcttcttcttcgccatggaagaggagcaggtcgcacgcacgcctctcgtaattaaaattgttaattgaacaaaataaagatgtattttaagattaattagaatttttacttttccaactttaatatgtatcaaatcatgtcattcaaatttaaggatttttgttaaaattttgtttaattttactaattgtttatgtattaaatcacgtactttgagatttgatatctactaaatttaacttccttaactttgacatgtaccaatttgtgcctttataactttcattcatgttaagtttttgttagtaaaattagataaaaaattttgaatttaacaatttcaatagtttgaggagaatttttaacgtcgattgtccatatattaaattatgctcttttaaatttgatttctagcaaattttacctccataacattgacatgcaccaatttatatccactggaatttcattcacgttagggttttgttagtaaaattagacaaaaatctttaaatttaataatctcaataatcaggaagaattttaacagtatgaaaagtttaaggagcattattttatacatgtcgaaatttggagagcaaaatagttattgagtctactttcaataatttactagctaaaatagcatatataagacatgtgttgtggattcagaattagttgaaaaggcacgttagtacgttctttgttgattaactcagaaagttaaaaaacttgtgtaaaataagtcattaacttgtagtttcttctattaaatctaattagaacaaaaaataagatagaagaaaatgattattaaaaaaaaaaacaatattcaaaagatacaatttgagaaaaaatgtgcttgtttctttattaattggagtgattattaaaaatgaatcatattataatgaagaaaaaagtgcttggcatatgatgtagtcatctaattatatagtgatatttgagagaaagaaaaacacttacagttagtgttgctcctaaaatgcccaatatacgtggaccagtcaagaggggacacgtgga

SEQ ID NO: 300502 - DNA, 1511 bp, Cannabis indica
gttgttaatccaacatacttgttagtaaatctagatcctggtaaaataatcccaacaggccatacaccttcttagcttcccactcattcaatcatcagacgtctcttaggcgaacgagtcgaaccatttgcttctcgtggaaggtgcctcttcttggtacccaataaatgctttcaacatccattttacactttacattttttcttcttgtcgtaccaaagttcataccatttggtttcatcccttcctctaccttgcaagacctctttagcaactccattctcaggcacacattctgccagcaacacaacactaggatcacctacctcatttcctcttaaaaactggtaagttttcttcactgtttacttgttgtaaagttcttagggagttgtgcatgttgcgtgtgactgtttgccctaggaatattggcaccatgcctgcggtctctatcatggagagtaagagtcctagggtcttgtgttgtgctaacccattttgctctgtactaatgtttggcaagtacattaggtctgtgatggagagaaccagttcttcgaaaggcaaaggcttgaggcagccacttctaaaacaggggcccaccccagcgtcatgatccactattgaggccgggacagcctcggtcgtaccacccttttgccattccaaaaatatcctctgtggggttcactttcccaaggaagaccattccttccaatacccttgacatgcagaaagagaagaaagtgaacaaagccctgaaggggcgcctagaggcagagaggctccaagttcgtagaagggataccgtgccctcagcggtgcaaaaggctaaaattttagacagcatgcacaccctgccccttgctaggcatattgttgaggttgaagcctttaaaaagtttttgactttcaaggtagggagagaagtcaccccctttgtcgccaaacttttggatcaagtggttgggaacgcttaagagctgcctatggagacttgggcttcctacagcagcgtggacgtctttgtattggcccactttgccaagcagcaggcagtcggggtaagacctcaagatattttcttcctcttttctttctttattatgttctgcccctattctgatacctggctctttcattttgacttattttgacaggtggccttattggctctgaggactgccaaggaggctgacatgctggtgacagagctggagaaagtcaaggtagacaatcgtgacttgcgcaatgccaacaacacccttctggctgagctaactggggccaagctttagattgagggcttaaagaagaagaaccaactgctagaggccaattacgctcaatagactcacctcatgcgaggtataagggcatttcatgacctttaccgggagacggtcgagcggttgtttagagtggagtcctccaacccatctggtggcgcccagtcttgaattgcagcatgcctttttaaattgttgttgtttttttttttttattctttt

SEQ ID NO: 300503 - DNA, 1989 bp, Cannabis indica
ttttttttttttgttttcttcttcatctgaatagttgtgttaatggcgagtagttgggtcaagtctttacaatgcaaatcgaaagcttttcgaagacgtttaccaacccaaacccagaaacctcctcatacccagtacaagctgtagacatagtgttcaaaacattaaagatgtgattgataacactgccaaatacaagtccagaaagtccaaaacgacgtcgtcgccttcgcctcagaaaaaaccgacttctaaatcttcgagagccaccggaaacgaaccgggtcatgcccccatggtgagaccgagaatgagctcttcgacttcgacccgtcagagtactcgcacccgccacgaccagttcctaccggcgttaaaggagctaccggagggtcacccgtctcgtaacgtggtggatattatattccacactagctggagccccaagtctttctcgggtcggatcgagatgatattcaaggtccaaaacgggtcgaaggccgcggctaggttcgaggagtatcgcgaactcgttaagatccgggccgggtcgggaagcccagccggcgagaccgcatgcaaggaggagaatgcgcggtgcgtggcggacgggaatgaggtcatgggttttcactgtctcggacccacgtcaggtggcggtgcgtacgacgcgtgtagcggcgcgtgggcttttccggcaggtaataaagggtcggtgatatgcacgtattctggtagcggtggggcccatgagagcgccggcggagggagaggaatgagagccatgttactctgccgagtcattgctggccgagtctccaaatcactcgggatcgactcgttgttgaatggccgagttgggttggactcagtgagtggggaaagtggcgagttgctcgtgtttgactcacgtgccgttttgccttgtttccttattatctacaaattgtaaaaacaccacaaggttccccttttttttttactgtcttatatttttattttattttttcttgtaagagttggtgaatcttttttctacttactcgcatttatcaacattattttgggggtcattaatactttttttttttttgggtgtgattagcggaaaaaaaatcttgttgataaatgttgattaactaatttgccatttctcgttcttatatgtaattccactttcatacaatttgggaaggtttctctttttcacttttctatttactgaaaaagaaaaggtttatttctttttttaggatttatggttgtttttttctttttcatttaaatattatacttggaaacaattatttatttagggtttgatacaaggaagcttgtgtttgtaataatcttgtgtattattatgtgtaatagagtaagttttaggtcaaagcaaagctaatgtttattattaatagattcttagtgttgaggcttgatgttgaagaagaaacaacacaaacacatggcaacaattcacctgaaatcattaatacttcaaatcaatattttagtgccaaaagactagattttgaaatataatatgatatatggtatcatttgtttttttaggaaatggaaaaattcattcaaactgaacaaaaatataaacaaaggcagttgctaaatgcaaccccaacccaaagcaagaactataaagaaataatagaactcattacatccctatctctttttctaagtaaggtaatgttgatgcctctaactctcgctttgatagctagtttaatggatagactagtcttcttattaggaatgtcaatggggcgggtcggatctgatccgactctgatccgacctgatccagatcatatacggatctgccccgccccgccacgttggatcagatactcgggtcggatctgatccgacccaccttatacggatcggatctgatccgaccctaacttttttttttttttttaaaaaaaaattatcttttatatctaaatttataattttttttccaaa

SEQ ID NO: 300504 - DNA, 4545 bp, Cannabis indica
ttggcatctacctctatttatacaggcaaaaaagtcataagggagacagaaggaatctcatcctcttcatacacaataagaataacacgcttgtgatttgaaattaaacatactataataattatgttgatgatatgtctcccctccaccatgttcggatcttgatagtgaagggcacttgcactgtcataaaatgagttaaaacctgcaattataatgaccatttcatccggatcagcatggcttcaaatgagacaatagatgtggatagctcataatagagctggttatgttttcaaatactttgaaattggtgagcaaccgtgctgatgattccattggtctcctatcaacatggcagcagtgtatgtaagtttcgctgcattaagcatgtgagattgtcaagtctaataatagttttcatcaacaatgagaatctttacagacatgactttcaaatttaaattatttaatacacttctagtctcattttttatgcatgtacatataaaggattatatataggcaaggcatgtttgtatttctttcagttggacatgcctcatcccaatggtcaattgaatttgcaaacaagaggcagtgaccatcaatttagtgaagtaaatgcatgatttcttaaacataattacattatatgattgtgttgatggataagccttgttactcttgtttttgtctttcattaatagtttcattgaacgatagaaatgttactttcactgaagtaataaaatggatgaaacttaagcttcagcatagtgagaccaactttgtttgtctcatgatgtacgaggtagtatagtgcagcatcaacttatgcaaattcaattttcaacttcttcatagcagccaactcttttgctttgcataaacgtggaaactagagaccaaacaccaagttgagaatatgtctttggtctagaaagaataaggccaacaaagactcaaacgtagcaagagtgactgcttccacctctctcgtaatactaactaaatttgggttttcactatctgagcttttgaattacacaccattcaaactcatcaatgctttttggattgtctttttcactacttttcttgaggaagagtagtttctaatctcactctcaacactaacatttttatgcgtggttgattgaatttctagtgctcaagacaaaactgcatccttggttggttctaaaagagatccatccacaagttccttaacccacatctcttggtgacattgggagaaggcttgttgagtgaggggtaattgaatcaacttctcaataagtgatgccaatcctcaagaccactgatttttgcagctatggatgatgatgaagttttattagagtttagaggctcctaatctgatcaagtgatgagcaaacatgaaagttggaaattgaggaatccattgcttttaccaaattggattttcttctctacatatatttataaaagtcattaggtgagactgggggagacatcaagcatcttcttattcaatttgcacgtgagattatgattttgatataaacatagtagccgctgtctatgcaatgttccctgctcagttctcaccaatatttccaactcatttcttacaaatattaggttctatagataatcctagagaatctctcttcacgatctcataaaattaatattttcattgctacacgagtaaccaatttgtatcatttttataatctattataattatatatatatatatatatataagttttgccctgaatatcaatatgaatagggcagatgatgtaacaaaatttgcttcaacaagcttgtgaatgttttgtattacagtgctttcagtactaatggtgtcgattgtgcttttggctctacgactctacgtcagcagacattgatctacaatcaaactgaatttcttctatcttctataaagtacatggatttaaaagctatcatcgtatctacaaaccctttttttttttgcttctacctcctctgctgcaacgccagccaactttaaaatatccagagaatcttgttcagaagacactactcagccaaaaacatttgatgctcctcaagaaatcaattggaggattgtatatctcagtactgccaatagactggtttctcagctacacattgtgaaatgataacaaatgcataaccttcactggatctttggaaattatacgccataccgccttaaagctttgcttaaacttggcatcacattgtatgcttgatatgatcttctcagttcaataatagagccaacctggacaagggaaaaagaatgatcaaaacctaataggcctgccacatcaagcagttgtccaaatcactttatcgagtaactttttaacattattattttgttgttaagaataatgcatggtttatcgaatgcaattacattcaaaatgaaaatgaaaactgaactgatactatctgtggaatggaacatatttctgagcatgccatacaagccaaaataattgctggataatcaatatagcattacagtgaggattgtgcttacaatgattaagatggatgtaaacccaattgcaaatcctgcattgatgcggcgtagataatgatcaagtatggtcgatgacgttgccaaaaaacttaacagcacgccccctgcataatttcaaacactgacaattaaaaaatggaaaacaatagcatatttttaaggtgtagtaggcgggatttttttttttaaactatggtttcacttaaatcatagaaactcaaagttccctggaaaaaattgcagaaagaataattggtgtctaaatgccatgaggaaattaatgctttagagcacaaactatacaaattagtcaaaaagcctaccccagaaccgtgttgatgcctgaatctttgtgaggtattcaatggtagcattcccaggctttacatttggtatccgggcacccatcttgttcaagtaatcagaaatttccttaggtaagtttgcctgggcaaaaattaacacatcaattatcagagaacttgtaaaatacaaagaaaagctgactacaggcagtacttgagactatgaactgagcattcagaaatgacgatcaactggcaaagcttttttttgaaaaaatgcaggtaaaataagaggcaataagcaaaaaggagactaatttacaagaaaaacttgagaaaaaaaaacatgaagagtagcagcgcacttgcaacactaacattaaaagaattcattaaaatgaaacttacaatgtcaaatatattgaatagaaagacgaagaacgcatatattgagtagtacacccaaggcttagcgccaatagaagattccggattcaatatctccctagcatgctcccaaaaaggtgaactaagaagactgcaaatgaacacttgttagactgctaccatggcaaatatctgccaaagaagtttagtttattagagaggaaaaaagaagaataataaaaaaaatccatggtctgaaaatgagattaatggaaaccaggtgataagcctcaggtcggatttttgtaccgtagaaggtaagcaaagtacgcttgacaaggattgttttgagacattgagtatttcttgtacaattgttattttctttaggactttaggctgtattgggttagtttgactaagtctctgatgtggtagggattattgtaaaccataggctatatatatttggaaggggagatttttaggggctgtggaggaactctagagagtaatctcgattattggagaagccaatcctctcaaatggttggaatagcagagtacaagcctctcaaatgcttgtgaatgtaattttctgtttcttaatcagactaacgggaagggtacaagctgtgaatccagcatggggcgtggaaggttttgatataaagtctttgaggaatttcagcaatttgtctgtgtactaagataagaaaattctcattaagtaaaagcttatcaccacaccaggtaatgtaactaacaaagaaattagtgataagaaaaccactgactaaattaaggcggaaatctgtgaaggcatgaggtccatttgattttagtgaaaaatacatataaacactaaatttaagtttacaaagttaatacaaccttgcaagaatgctgggaacggccaacagataattagtggtaagaacaggctgcattcctgctggattgatattaaaaggaatataaggctccacttcagtgactggagagtcatctctgtcaacaaaatagtgtcagtaagctccaacgcgtggcgcaaacagcttctaaaccctacaaattaattaccaacaaacatgcaaatacacccccaggaaacgcatgtgaagttttctacaactcaagaaaattcaagttatgtttatgtagagaactctaatgtcaaatatatccatacaaaatcaaatcaattaggccaagaactgtttttgcttataattattattctttccctaaaaaaaaaaattattcgtatttgtaatttgaactctcataactcaa

SEQ ID NO: 300505 - DNA, 1566 bp, Cannabis indica
atgttatgcaatgtagaaaaaaaaaatcacttataaaaaaaaagtgtcgctccacctgaacttaaatcctgagtccgccactagcctatattattactaaaaagtattaagtcacataaatcataatttattatgatttactcacaaaacttattatggtaaaaattaaattaatcacaatttgtatctaaataataaatgttatattttagtcactaataatttgtgttgtaactaataaaagtaatattttgtcacgtatgtataactaaaagatcactatatagagtatcttctttagtagtaaatatccataatatagacacataactcacgttgtatgagacttcctaaaatacagaataaacttaacaaaaaggttgctttatctttacttttaagaaactgatctatatataaagcccaaaatcttgagaatccactcgaacctcaaaatggcattaattggatgtgcaagagatgtcattttatatttattgaatattgtaagtaacttagtaacgtgtaattgttattgattttctcaaaggtatatgctaattcctagatattaacacttataatacgaacacatgatctacatgatcacaatggaaagctctcttcactatccaaatatcttcctctatgccatcttttgctgaaaagtcatgtgatcattaaagcttgaatgttgcaaaatgctaaaacaaattcacaaatcacaataggtgtacaagtcgatgttaataagaataatacaaaaagttcagaaaaagcaactaataaatgaccaagaaaacgagattattgcagcattaagtgatgttgcatgtactagcttccccattacctgcggaggcaatatattgccgcagattattcataccaatgccatcgctgtaagtaagtaacctaaataaatatactaaaatctctgtgtgcgtatttattattagggttattggcttttctcgtcactaataactgatgaaatttgctacacatttctacacaatttactctagaaatttctatacacttgtagaaaaattatctaagaacttaagagaattctagattagattaaatctagaatatactagttatgttgtattctagaaacatttagatttgtttggatataattccttctagtaaaagaaggatctagaagaaataattctagccataaagtgtaaggggtgagcaactataaataccccatcaagtttccaaattgtaaccaagcttgagaaagccaaatcaagtcttttactactaacttactaccttgtctcctttcttactacacacataaaaattaaaacaccacataactcttccttgtcccaccaatcatccaacttatcaacttatcaacatcatcatactacactacctaatatccatcccatacaaatctaaaccaatacaaatttattctcaaaccatcagtggtatcagagctccgttcgatcatatatcactgggcgtaatcttttccactcatcaacatgagttcggagtacaatcgttcttcactacctcttccaattttccatg

SEQ ID NO: 300506 - DNA, 2638 bp, Cannabis indica
caaagcaagagataagggaaaccagagtacataaatcagagcttagataaaaatttgacaaaatcagaatataaaagcagagatacatctatatcaatattgtcattattgcagtgacaaaatgatcaatgatacctacaaataacaaacataaatcaaaattcagcaaaagaagaaatcaaaggtgtgatgatactaagagtgagggttagaattggggaagaagataagtaaacattgcataaatgaggttggggaagtacttatccatgtcgtgcagagcttgagattgattgtgatgactaaaaactgaagagtgcaatgaaaatcgatgaaagagagagatgagatgaaaatgtggctttctctccttttgaattagaaattgttttcatattttgtcactttataaatatactgttcaatgagttttgtttctaatttaggtcggtaaatgcttttttcattttaggtggtaacgatttttctagaacgttattatctaatgtaattaaatagagaaattgttgtagtctccgatttcggtgtaaatatatttatttatttatttatatacttttatttattatatatatttattttgttattgtataaatttaatatattttaaaattagttgttattgtaataaaattaattaattgttttattttaactcaagtaaaattataaactaatacaagaaaaaaataggagaaaatacagaaaaaaaaaatggcagaaaaatttgtatttttttctttttgttttttacattctcgatgattttaaactgtcggaaagtctatattagtgacggtttttaaccgtcgcctattttgtctgttttacgacggtcgtataggtgacggttatagaaatcgatgagaatactttaaacgactatttaaaaacgtcgagaaaaactatttttgtagtagtgtttgttaagtgtgttgtgattgccatgtttatcatattcatattatatgtatcaatctctagcattttaattaggattataaaatagtattttttttattaaaggactatgaatattgttgattgatttaagttagtttctctagaagaagcacctagttggtttaaaaaaaaaaaaaggttttttttaatttttttatgtaactctaatgactacttaattggaattgtttgggttattgtgatggctctagtaactaatcaaataaaatttcttattattgttgcttggtgatgctgagtaagtgagttttgaaataataataataatttattaaacaatagtaatgcataatgtatggaagtcttgtagttttattgatttggcatttttcagtgattgttatgtatggagtggttgtttacatattttacctttatgatattatgaataaggttattttaatcaaactaatacaatactttatagggcacattatcaatatagaataatctagtttgtaaacatataaaaataattaaaaaaaaaaaaaggttgagagaattgagaataattatatgggttgtggagaaactagtttgtaaacataaaactaataatatgcggagaaaatagtgaatacatgctttggttatagggttgtgtcttttggtatgtgataagatgtgtcttcaatcaattatactccttcagtctagttaatagaattagtaaggcggttttttcatccccaaattgtaggcatttgtatttgagcatcgagtctatcgttccgcacaactctgcctcgcggatcattagggcgaccttgccctagagcattagcaaccttctttttctacagaggttggttgactgcgttcttgttgttccttggagcattaggaacagtcttgttcacaggttcctccatgacacattttcttttgtcctttgtgggagcagaacgtttaggatctataggttagcctttttttggtgttattatcttctagaatatgctcttcatgggtgtctccccgtacccagctacacccgttttggagtgtgtaatagggggcggatcaacatcatccatggtcgaatccccacacaagtagtaggtttagtgatggtggttctggtggctaccattgttacagtatacaacgtcggtattaaatctttcttcagctctcaatgaaagcaccaaaatatttacaaaacatttcagaaactaatttaaaataaaataaagctaaagaaaataaataaaatatgaagatcaagacgagaagttttacgtggttcgggtattaacgaactccagtccacgagtcaatattatttggttggaaaagccttcgagtattacacaagtgtttttgtttggattttgaaccctagcttctatcttagcttgtaagagtttaatctctcacccttcgcatgaaggggtttcgttatatttataggctaaggtttgcatgtaaacatggcccaatgataaggtaaataaataagtatatattgacattgggcctatttggtaaagcccatctcgtgaggcaatatttatttgtacacgtgaaatctgtgttatgataatcggtagaaacagtggcggacccaggatttaaattgaggaggggcgatactttttttttataagtgagggggtgcatcttttttttt

SEQ ID NO: 300507 - DNA, 1757 bp, Cannabis indica
aatgactctactgttacagtgtctagttgttataggtgtaatacaaatgtacaaaaccattttactttgtggcataataggcttggtcatccctctgaaaaagtggtccaaactgtactcaaatcttgtaacatttccaatgttaataaagattctgaattttcaatttgctcagcttgttgtcttggtaaaattcataaattcccttttcctagagcatctcaaactatcatttctgaaccacttcagcttgtggtctcagacctttggggaccatcatttgttccatcctttaatggctacaagtattatattcactttgtagatgcttattctaggtttacatggctttatcttcttaaaaataagtcagatgccattaaaactttccaacacttcaaagctgaagctgagttacaacttggcaaatccattaaaactctccaaactgattggggaggtgagtacaggtcatttacttcctttcttgctgactgtggtatacatcatagacatccatgtcctacaactcatcaacaaaatggtcttgctgaaagaaagcataggcacattgttgaaaatggccttgctcttcttgcacaagcctctttacctctcaaattttgggatgaagcctttaggacagctgtctatttacataatagacttcccacacccttgttgcaccaatgttctcccttggaaactttgtttcacacaaaacctgattacactacttttagaacctttggatgcaaatgttatcccaatattagaccctacaacaaacacaagatagagttcaggtctgccccgtgcacctttttgggttatagtttgaatcacaaaggctataaatgtcttgactctaagggaaggttatacatctctcgagatgtcatttttgatgaattttctttcccttatgagcaagttcaaaaccagcaagcacctacagatgtgaataccattccctcatctgtgtcagcattaataccagtgtgtactcattcaaaaactccctattctgccactgatctctttgaccaacctgttactgtcccaattcccacaccagcacctaacattgcatctccttctgctgaaccattagaccaaattgcatctgcatctgcattttctaatcctgctgctgctgatgagttaaatattgtccattctactctcaacaatgaccaacttgctttatatgacaatgcttctacttctcatgattctgttgggcaaattaatactgatattacttgtccagatcagtttccattgcttgatacaggtggctcttcaggaacttcaccaggatctgcaacatctccacgacttcagctcacacccgattccaggacaccacctgcttgctcatctcctgcagccttacccttaattgcaggctgtgttaatgctcctggaaaacacaatctgcacagaatgcaaaccaggtcaaagatgggtatttttaaacccaaggtgttcttagcttctcgagaaccgacttcttataaagaagctctcaaacaagaacaatggaacagtgcaatgagtgatgagattcttgccttagccagaaacaaaacttggattcttgttcgacttcctgaaggacgacaagcaataggctgtaaatgggtctataaaatcaaggaaaatcctgatgggagtgtgctgaagaacaaggctaggctggttgctaaaggttttcaccaacaagcaggctttgatttcacagagacttttag

SEQ ID NO: 300508 - DNA, 1945 bp, Cannabis indica
ttttaaaaaatataaaatttattttataattttacaaaataaataattcaaacaataatttttatatatgatctaatattaatcaaatatataacatatttttggatgagtctaattttcagaccaattaaaagtctacgtgtccaatttattttcttttcattagtttctttaatccatcccttaagtctttgttaccattttttctttctttcttttgctgtatagaaagaaattcaaattcatgggagataaggctgaggagacaaacttgctaacgagggaccacatgggccaaatgggcctctgatatattgtttatgtttttgggccaaatgggccttcaatgattgttgaccttttctttataaaaatgtcaatttatcttgtattgggtttttagttttactctttttctttatcatttttcgcacaaatattattttctactccaaatgagatcaaattaaaaataataaagataaatattttgaaaaacgaaattaaaattatatatataaaaagaaaagaaataaacaaactcacttctttgtgtatggtaaatttaatatttttagctgtgagtattaaagtgtcatctacgacaaatatttgattgtgtatagtatatattttagaaatttacacataaccactttatattataaataactacacatttattttgtcattttaatatactcaaattttaatatttaataactggaataacaaatattcagaatttagctaccttattaatataatcaatatttttaatgtactatagtaactatacaaaagatctaaaagtttttgttggcacaaattttaatcaacatgatgcaaaattaagtaatacaataataaaagtttttaaatatgaaattacaataaataaataaacgacactagagatacatagaggttcgatcccaattatatagtgttgacgctgaaaaatagctaatactaactcgctagattgacaagataaataataaatttaagtaaaaaatttagatagacgcacacaatttataatagttatatcgtgatgataatagaattacgtttactttttcaaattataagaattatacttctaataagaatgtacacacacaataaatgatatatatatatatacttctaataatttatacaatttattataatcatactcttttaactacaaattataagaatgtatttatcactatcattatttttttaaaaaaaatatttgaacataatatattttaattaattctctaatcaaactcaaattttgtcaaaatattttctaatataatccttaaatatagagattgtttacccaaattttaacgacgatgacgtgctaagagtagcaacacgtggcacaaaaatacagagactaaattaatggagaatatgcaaagtcatgagcgttgggatgactgtcaaccatgaagggtagtcatgaccgttagagtggaagtcaaacggtcactcttacccctagcttgagtaaggtaggcatccccatgaaagaaaaacgataggctaacaccttcgtaagcggaatgaacaatcaccagacacctacgggagtcaaaccagtttagggggtatatattactacccctacctcaactgcaatgatctatatgggatttagtctaggagtatacccctacccctaccgcctacaccctcgtggtacaagtcatccgttctaccatagacataatggcattctcaagggtatacagggacatccacattacatcataactattgacaacggatggggggtcacccaacgatagcggttatcatccccctcaacgagggtcccgggggtgttgcccccaaggatgggcttcatccccaaaggtggttgacgaccatgtcacctccataagggactctcgtcgtcagtagctccttcaaatgttca

SEQ ID NO: 300509 - DNA, 1516 bp, Cannabis indica
tcaaaaatttgatttatgttgttaaagtgtttaaaaaaaaaaattctaaatataatataattttggctttttgtgtgagaaatagaatgagtattcattaaatttttatagaggactataattgaaacaaatgtatgggaccatgttaagtaaaataattgagttgattagttgggcatagatgatgaccatttactatttttatacaaataatatgagcatttattatcttcatatttggtaccttaaactttccagctaatatttttaaggaaatatataccatacttttttagttttatttggtatttgaggtgtcgctagtcaatgtcacttgaatgtgaaatgaattataattactaacaattatattggcgttttgttagaagtaataaaatagaatgaaacgacaagaaaataatttttatttcatttctttgtttagttgtattttaaagtattagaatagcattcttatgaaatgctattctactattttagtgaaacgactattctattttgaaaaggaatgaaagaacattctagtataataagagaaaaaatttaataattttttttatcaatttttttttatgcattttaaattttattttatttcattcctattcctattctcattctcattcctattcctatattttcattcctcccaactaaacgtcactatatgtgtacagtgttgcaattaattggtatttaacaaaatattaactgaagataactcaaaaactaaacttaagtttggcaaattttgcctccaaactaaactttacaaagctctttactgttggaacttcactctcccaaaatgttttgtttctagtaattccacatatgtaccaaggtcagctttggacatttatgggctatagtaggctcttatttagaaaaaaatatgatactttcgaagtaaaaaatttatgtatttttaaaagagaaatttttttgggccactggatcaggtaggctctagacatatgcctaactcacctacattatttatgtacaagcattagaaactatgcacactactacaaaaatgtttattcccatcggtccttaaataggttttttttcaagaacagttgctaatgaagttacgtgactgtttaaagctgtcatcaatagtggagtattcacaacagttttaaacagtcgtttatagtgcccaactgttaaaaatagtcacgaaaattgaaaaacgagtgtaacgggtatccccgacagtttaaaccgtccaggatactaattaaaattttcatttcagaaccccaaccgcacgaaccttctctctatctcgaaacctgataattttaaatagttagggataccatttcaaatataaaaactaaataacattcattccaaatctcatttcattcacaatctctctcggtcctctgctctctctccttgaccacgagccaccaccatcctcctcctccgcgacgactgtccctctccttcgccaccaccgtcactcgtctctctctct

SEQ ID NO: 300510 - DNA, 1008 bp, Cannabis indica
taattaattaattctaaaaaaagcatgtttacctattagtaacctgctattataagtcaaatgtaactattgaatagccacccatatatatataagaaatttcccgtgttgtttttcttgtgtaagaaaagtaatagttatggtatcaaaaaagaaagaaagaaagaatagttgaattcgtgcgaatataagcggcaacacaatgcagagagcatgaaattgaaaagggtccagttccactatacaaattacaattactagcctacacattcatacagctcaactatttattcataccctaagccgaccttaccctctagtctccaacgcattatattatacatacccatcaactttgacaatatgtaaatattatttaaattgttttatctttgtatgaatgcagaggcaactaaaagaaggaaaagtaaaattgaagagcacacttgtactttttcatcctgaaagtgaatgatgacctgctttggatttgcatttgcattgcaccccaacccttcaataagtggacccatatttgtcgtttctcagaaaaatattaatttggtaaattagattttgtcgttgttgcctcttcttctatctgcactacttttattcttcccctttctatctaaaactagctttttatctatctgtcaccaccagaattaatttgggttgctttgttgtatggtgtgatgaatttattgtcatattaagaaataagattaataatgttcaacgaaataaataataattaatcaacaataaaaggacataattcaatttattttgatgtacacaaattcaattataaaatgactagataatagcgcggcttgcacacaaattcttcttcattttccttttttctaatttcatgtacagtatatttgaaactcatttatatgtcgaaaccccataaaacaaattatgagcgaggatagaaagattagagcatgtttggtattattgtctgttttttgttttaaaaaattgtttttagaa

SEQ ID NO: 300511 - DNA, 5379 bp, Cannabis indica
ttttttttttatttgttgtttctcgactaatatttcagatttcatatcatctttcattttttttcatttcttgtttcttaactaatagcataaacctcaatatttcttctcacattataaagaaatatattaaatctaaacattatatatactagaatataaagatcatatactgattcaatgaccatgtgagacttaaaactaagtatacagtacatccataatagtattttgtctaataataatagtatttccttggcttctctctaaatatttctcatgaggttgctgagaaaatttaaatgaagaaaaaaaaaagaatgtatagttgcaaagtagtgtgattccattaagttgaagaaaccaattcaacatcacaatgcaagtggataatgtttcaacacttcaataacattcaactattaaaactcatttacaattttattccaagttagtgagaactgaaattagaaactacctcaagtcttaaactagagtctctcacttttgtacattctacctgtaaaaaaatatatatacagagttatgtaaggccaaatcaatgaatttaatcaatggggaaatcaagagtttttagaaggaagcgtaccttttgtacagagcctttacattttccgccagggcctgactgttttccaagaattcatcgtcgcagtccttgacatcgacaggctgtactttgaaatcctgatacccacaatattcattccattcgaaccacatcttcgagatcaattcctttttgaaacaagcttcgtggtcttcctcttcgggtgagtcagcagcaaccaatctgtacgtgaacactttctttttctgtcctggacgaaatgcacgcccaattgcttgacgggtgactgatggatttaagtgaacatctagaattataattctgatgctccaaccagagaaattccctctccacaagctttgattgaaccaagaaaaccttggctgatgaggagttgttgaagcgttccatagaccactctcgttgctcgctatttgtatcacctgagatgacaaagatttcccttccagtacaccaacccttcgcttttgtagctaatctctctaaaaacttcaaaggcactaggtactgactgaaaaccagtagcttctcctgattagcgtcgcacaaacttagcatatttaggaaaaatttcgcctttactccatcttctaagtccaagttttctagcaactcatccattttggcatcacttgcagtccaattatcagaaaatgattgtagcttgggatgcagataaacggcacttccaaccgaactagctttgaactttcttgataacttttttatttttccaacttcgcgtttctgtttagtgctgaggtttagtactactgtgaaatctaatagtccaggtagctcatccagaaagtcacctttatagtagtgaaggattttgctggtcatttcacgcagatcttgtataaccgacactttccttctgaaatctgtatctttctgcagagtaccctccactatatcatagaaagccccatcaccaccagtttttttgatgttcttcctaaaactcgatatatcaactttactcatgatgcgcttgacgattggacgagatgtttccattctcaaaaacttcggtcgaacaagattcaagacattgaacacctctttgacgtggttctgataaagtgttcctgaaagcacaacttttctgggtgtctgtatcttggcaagagattgcagcacatctgtattctcgtttcttggggtatgtccttcatcgagaataagaattgatggaaccctaagcaatatctcacgacacgaaactgatgcctcactgttttctagatcacaaataattgatgaaaactgcttgtaacccaagaaaaggatgcttttcttttctacccactgtttcaaaacctccaattgctgggttcggttatctgctttcacagaataacagtcaaataatggaaaatcctctacctgccaaatctggaactctttcttccatgtgctcaggattcctttgggaagaataactaggggtctgccactcggatacttggcaagaaaactttgaataaaactgatgatcatgaatgtctttcctgatccaggtgcatgggccaagatgcaacccccaggattagcacccaccaaattgctcttgagaaaatcgaaaccctcctcttggtgaggtttcatttgcttcatatgcctggggtgggcatgcagttcctcgattatcaaatcatcatcagacaagttaagcccatctattccagctgattctctgtcttttgatcttcgagagtcagtcacgtaagttcgagaacttttcacctcaataagatgttttttaagcgtgatgaaataagaggacatgtagaatattaataaaaacagctctaataaggaatataaggcataaatttactgcagccttaattacacaactactggaaacaaaatcacaaaaataatgtgcaaatgatttaaataactgaagagaaaagcacagaaatgatacgacactaacaaaaagttcaaagtgtacatgaaaacactagaaatagtgtgaactgggaaaaacacagaccaccagaagcaattagatcaaaccagtttacttcaaagttcaaacatagtgaagcataaatttctcaagcagaaatatctgggaaaatctgctctttttttttttggaggaaaagctttagaatagcatgaagagttaaataatttattggaaacaagtaactaaaatattgagttctccttcagatcatcattggtagctatacatacttcacaaatgagccctagggctgaatagctcagtaattacgggcacgttgccagcttagggccagcggcttcttaagttaaactcccattggaaaattgaacaaaataaacctttagtgcgatccgttttctgtgtcgaatgtaactaaactcacagatatataaaataaattgcacatgttattttttacaacttaaggtagtagttaggtcaagaggctcacccacagaaaggcactaagctgaagttagccccaatttacaaaaaatcttgatttttttcttttattttgggaaaggaatagacttgaattagcttaaaaggattttgaatatataaaacatagttttaatattctgtagtttacgtataagatagttcggcatctagtttacacattagttgcgcaagagattagagaagctagtgtgatacacagaaaaatgtgtcatagtttaataaacatcaagtctttagatgcaaaatcttcaggttaatttttcatgcgagaggttgcaaacagaaagaacagtccagttttgagaccctacctgaaaaagatgcatttatttgtaacaaagaacataaaagctcataattaaaggttaccttcaggtactggaattcaaatattttttcgattgctttgtcaataactccacaaacccggcaaacgtacccaagatcatcctttaatataaaagaatgatcacagccttcctcatcttctttcacttgttcacctgatgaaggatctgtagcgacatcctacaagcagcatcatagcagaaaaacatattaactaatttttttttttttcagaaaaagaattatatatgtgaaagtttacaatgcaatgaaacaatttagaataaacaccaaattcaggaaagagagaaccattaaacaaggttttcagtcagttttaaccctttaactctccacgcttttccaaaattaagattttggaagcatgcgcagacactttaaatcatcttaatttgaaagcgcccgttttgtgtacttccccaaaaaaattagaagacatggaccatataaaaacaaagaaaagaagtcatgaaacacactacaagacagaaacaaaaaaaaagtccttttcctgttgcaattcatttctgcaatgataccttggaaacttctaacgccattgacatttcattccaaatatttccaagcccatcatcctcaggaatactgtcatcatcaccatcatcatctacaccaagataaacaccactatccttcttaatttcagcatcagttctcccattacagttaacatcttctacatcttttctatctgtaaggttcctgacctgcataaataaagtcaataaatctaacattaattttgacacaatgggataaagtttcaaatcacctctatttccacaacacatgccaggcaatttacctctatttcccttgtaacaatttcctttgtcacaatttctccagttgtgttattcaaggcaacatttagaaaatgataagaaggtgcctgttcttgtttgtcttcctcgtcagaatcaatatttatgatagccaatgatgttgttggtttaccatttgtttcacagtcatcctccaaatcaatgacattgccacacgttattgccaacggagtcaattgttgatttgccaacttagtagcctcgtcatcatcaacattgttcttcttcgcatcaaagaactgattaataagtgttggatacttttcaaaatatgggtacaaagtttgcatctttggagcaaaaagggcttctatatcttttgtgacacttccaaaacttaccacaatctaaccgatcaatcatcctttgaatagcaaagggatcagaaaaatcaactactttcggagaagtaggtggttttggtttcttcaacacagtgtcatcacccatactggaattgaaagttgttccattttcatattttccatcaatagaaaatctaggtcgtttatgactgacagggtacaattctgacatcaaaatcaaaggtcacaaaagaaaattacaaaatgtacaaccatttaacactaatgccagaaaataaatcacaagtaaatatgactctagctagagaaaaatgctttccagaaactctacattctaattgcaaacccaagaatctaaagggtcaacagattataagtgggaaaaatatactaattgggtatgcctaattatctcaaacttgttttgggcactatcaatttttacaagaaaaaatggcaatcatgagtaaacaacacatcacagtacagatagcaccaaacccataaataacttcaagagagaacaaaaagtaacataacctatcacaaactctctcaaaaacaaattgatgcaaatcacattaatgtgacactaatactaaatttctacgataattcaaattaaaaattaatgcagctcaacaataacttctaccccttttaccaaaaaaaaaaaagaaaaaaaaaactcttactaccccaaaataaaagattgtctagagtgattatcagaagctacttccgcaa

SEQ ID NO: 300512 - DNA, 3392 bp, Cannabis indica
aaaaaaattatgtgtaattaaatatatatctaattaaaaaattaattcaatctaattattagttgaattagattggcttagattttgaggtataattagattgaatcacatgataatttttcaaatttaattactaattagatttgatcatatgagaagaaaaatgttagattagatcagatgcacatgcatacttatcacatgaaaatgacacttacaaaatattaaaatataaacacgttctaatgaaatgatttggttgactagctacaatcccctaactataagtaggatggcatttattttattttattttatttattgtacatacattttttattttttgaaaatccttaaagcttttcattgatagatcaattagtataaagtaaacatgaattataagtaaagaactatttcaaattaactcatcatctaatcctaagttaattttaacaaaaccatgagcaactttatcaaattctcaaagaatataaaaaacactaagcccagaaatgaaggataatgagttattaataaatctcaaaacatcatctaagacattattgttccaacaattggtataaaatttactaacaataaccttacaattagtctcaacaattgcgataggaagcttgatcatttgagcccattgcactgctagatgaacgactttagtctctgcgatttctaaaggaatatcactaggtataagtttgatgataccagctttgacttcattagagctatccaagactactatacccaggcagggcaggccctaagcataggcaggctaggtccgcgcttagggctcactcattttagaggctcaagtaaaaaaatatcttttaaaaaacatacatattttttttaataatttttaaaaataccagttatctttatagtaagggtcaaaaattttttttcctataagccatttcaactcaagaccggtcctgcacccaggctatgctttttccttttagaatccaaagcagcatttacattgatcttcaaacacttactaaggacagatgcattacatggttgagtgtaaagagcctcctctttgcaatgtatactagctcgataagcatcaaaataacaaaacaagaaacagacagtccaatcatacaagttaaaaggcaaaatagtattctatttgtagaaaatattatttcttgattccacaaggcccacaaaaaatagaaaacaaagcaagagtttctttatcaaacaaaccaaacgcattatatatgaaattcataatattataatgcttatgcatattataataaccataaaatcttaaatatttccaagccttcttagctctagagcactccaaaagagcatgcttcacagttttaaaagaaatattacataaaaggcacaaagctgagtcaatgatatgtctataaaataaagagttagaaactaaaatagaattagagatgacatgccaaataaaattttaaccttaacaggagctttagaattataatgtttaacccataattgcttagatttcttaaaagataaagaggaggaaatgtctctagtggaaaaagcaagatgataagtagatttaatactaaacataccagaattctccattccccaaatcaaattatctttgccattagccttagccagaaaacactcaaaatatcatcaatagtgttcatatcaaaataaagtttgagtttcatcaagtcccaggcaccaaaaggactaataaagaaagaaagcttagttgaatttgggggaacaacattacaaaaggacttatatctgttgtattaactaacacttgtctgtttttagttctttagttagttagttatttcagttagttttctcaactaacttttgctttgccttgtaattccttgactataaataaaaggattgtgctcattctcgagctaagcttttcagctaattctctctctgtttctcttttttctctgtgagttttcttttctggtttagcttgttaagcttctacatggtatcactcgccttcaatggagtcgtcgattccaatctcagacagtcaccgcacctacaccagatctgtttgctcaatcttccaactctacttcctttgtgtggaactcgttttccagttctcgatctacttctctcacgatcaagctcgatcatgcaaacttcctttcttggaagtctcaggtggtccctacagtaattggcgatgatctggacgaaattctcttcagtggtatctctcctcctcagttgttgatcaatggtaaaaccaaccctgcttatcagcaatggaagaaacatgatcagtttcttctgtcatggcttcgttcatccatgactgaaggagttcttgcctcagtttccaatatcatcacacttcttttgcagtttggcacgcctaagaacagagatttgacagtcaaactcttgcaagattgctccaattgaaaggtcagttttccaatgttcacaaaggaaatctgtctatatctaattatgatgataaatttcagtctcttgctgatcctttcatcattactagttttaacataaacgatcaagatattgttcttcagatcttgaatggtttaggtgctgagtttgatcctgttctctttgggattacttcaagaagtgattccttgacacttgatgaagttcaagctttactcatgtctcatgagagtcgattagagcatcacaactctatgacagatcgttccatgaaacttcaggccaatcttacaattggcaacaacaaatctaactcagggagatacattccaccacctgctcgaggaaaaaacactgaatcctcttcaagaaattctggcaggggtagttctcgtggttcttttgtgtttcagaccaggctaatatatcaattgtgtctcaaaagtggacacagtgtagttgtgtgtcactatcgctttgacaagaactttgtgcctccaaaatctgcccctcctcgtgcctatcttactaagcttgaagtggatagtgaccatcaagtacataatactaatgtcttaccttattttggagatgacaatctctggtttgttgatacaggggcaaatgttcctgttacaaatgatatcgagtctcttgattcccccactccctatgctggaactgaaacattgactataggtgatggtaagactctactcataactcacataggatcctgttaggttatttttagtattaatttgagattaagtttagtatatttttaattgagttttaatcgtgtttggagcaattttacgctttttatcttttatttcttgcagatttaaaatagaagaagattatgaaatatcaaaggaataagatggaaaaaaagataaaaaaaaatctcacaaaaa

SEQ ID NO: 300513 - DNA, 7295 bp, Cannabis indica
ggtcattgttgcagcaacaacctgtgtatggtcaaatgggaggatctccacaacagcctatgtatggaggctttttcagtgctcagagtcagcaacaacagcaacaaccaattttggttcgcccccaccctcgacaatatgtggagatcttgcctacgccgcagactggacaaccttattaccctgccccgccggctcaatcccgtgagaatattgatggttcaagacttagctcaaatgcagatgaatttttagaatttactgatttgaacaatgatagttaggttttttttaattatgtgttatgttttaaagtttatttaaagacaatttcctaattttatttaagataatataatttttattgtaatggacaaattaattttaatacttaatttcttaattaatgtttaatgcttaatttcttaattttgatattttatttctaattaatatatttatttataaaataattattataattaatttaattatattaaataatcagaataatattttttttaatatttaaaattattattaccggcggatgggtccgccggtatttatcattataatattttttttttaatatttaaaaatattaataccggcggaccccaccgctattaatccgccggtattaatattattaccggcggaatccccctttcgtcggtaataaccatttttagcgaccaattaatgccggcggataattaccggcggattccgccggtattaattattaccggcggtctagttacttattaccggcggatgcttccgccggtaataatgaaatctgttgtagtgcaatgtgcgagtagagtactcgcacccgttcgaattttaaaactattctttcatttattctaggaacgttttctattttaattaagtgtaattaatgttgtaacagttatgtctgattatttggtgtaatctttatttacatattgtttatattctactaatcattgtgttatattttgaatattcgtaattttaggtgaatattagtagttctgtaaataagtattcttatttaatttgaatatactcgtaattttttagtgttgtttaaattcctctgaagatacaaattaatcacagaactttggattgtgacagtaagacaacggtacaacccttgaaattgaaaataaactttggtagaacaattatgtttttaagagggaatttagctagtcgtaatattacttaaatcaattaacggtggactataatgtatatatattacatcttttaaattcagctattttcttctcacgatcgagtctttgattttcttggagttcgaacagaaaaagagaaggatttcgtcaacaaaaagggaaggtttttgtatccaaaacccaaattccattataaactggtactgaatatatcttttattcattaatttttctttattccttgaaatctttatcaatttataatagattttcactcatctaaaataagaatctaataaacttataattaagtagagagatagctacttcttctttgacttctttattaattaacatatttcttggtcaaactatagtaacattaacatatatatatatacacattaatttctttatctttctctttataattattactgtaagtggtaattttctgttaatgatgcctagagacaggacatttatcgtaaatgacaaacccttcggatgaaactagggcagacctagcagaacaactagcaacgtcactgaaaatgacaaagccttcggatgaagctagggcagccaccaagaaaagagcagaagaatttatgtcaggattcaaaattaatgatcccaaattttggagatcgatgattccatcagctgtcaatagtgtcttcttgctggtatatatatatgcattgcatgcatgtttttcatttcaaatttgtaatttttttatgttataatttattaagtcattaattatatattgataattagtgcatgcatgaaaaaaaaaaaaactatttaaacaaactagataagaattatatataaatatagcggtaatttgattctttattgttgttgggggctactatagcgagagaaactgcatccttctctttactccccaatatttttcaaaatgaagtgttagagaatgtaatgataaagttgtttttgcttaatttttgtttaattaattatcttatataacatgcagcgccttccgggtgatttttgtacaaagaacctgcctaataaggaagataagaatgttgttatattaatagataaaaatggagaagagtataaaactgtgtacttggcaaagagagctgcactaagtggtgggtggaaagcatttgcacttgctcataatttgatggatggggatgttctgttgtttaaattaatacgtccttcagtttttgaggtgtgactctagcataaaaactacattcattttatataaatatgtatatatatatatggtgtatgcaacaaatttataatattatcgaatttttcaggttttcatttttcgtgtgaatgatccagaacagtggggttacgactagctttaactcttcatatgctactgaatgatcagttccattaattaggtaactagtttaaattctctactctttgtaacaattgttcatcacagcttttacatttctatatatggctttctatgaagatttgaccgttatgttaaatgacacttttcaaggtaattaatgaaatagaagtatagataggatattttttgcaataaaatctaagtacattgcatagagagctttatttttgtgtatatataacgctatgagattgagataaccccaatggttgtggcactataacatgatatatttgaacaacattgaaagaaaagaaagaaagttgtttataaaacgtaatgaacatgaacatgagatcacaatatgtatcattatatagacaatttggccccttgaagaaacaaaaaagagaaggaaacagtgtctgaccacacacacaagagtgtagcagcgtgtatatataaaggcactatgcatctatatatgtggacttctttgacttattactattaggattagtagtatatatctaacactactaattacaccaataacaatataagacatttaaagctattaaacactactaatattcgagtacattttaacatttctccattttctaatacagtcttttttgcaaattattcatgaaatttgatgtgaatatttaacgttgttaattaattgatcaaaatgatttcttttattaacactatatctataatgacttttctattgctgcaggtaacaaatgaaagattaacattgatcagtacataatactatatgataatggcatatatatatatatatatacgtggacgaccggacgtaaaagctaaagctttatctcaaaatgtgtgttacattcttttgtcgttttgtattttaagtaaatatgtgtgtaaaatttgaaggagatccaatcacctgtatagatatatatatatacacacattatttttaggagtggaacgcacatatattccttttctatttctttccacttatttttcagaattcatggtgttatttggaatgtaataaaacattaaatatgtttagatgagtggtggagagaggtgtttgaccaaaaatgaaagcagtactacttaacctgttaggatagtggaacaactcagagcccatgtgggtttcagatcctcaattcagccataaagaatcctattaaagtttattgttgataaggtttatatatatatatatatatatataaatataaactcttattattaacaaaacaaccgtccccccaccaaaatattatatttcaacttctatagtctcttcaagtaatcttaaaacttagaattgtgagctgtttatatgttacttgtagaagttagtgttgcaaaaatgtcgctttttattttgttagtatatcctaaatatttatttaattaatgcttgaaataaggtttttaatattaattatgtgttagactaaaatgggcaacaagttgtagatagttgacaggacatttccagcttgcaaaggcaaaattaatagaacatgccttctggtcctggcgttaccgtgtaacatggttgcaatcttctaattttatataaatataaatttttccttttgtaagttcaagtgaaaaatagaaaagattgaaataataataataaagagaagatgagaaacagccttttaaaaagtccatcatcgatcggctcctgaaacgagaagccagcttgctaagccaaatgatgagttttttaggagccgagccgagccgtagaactataatattaatcgatgttattaagggcgattttatcatgcaagggagactaattgattgacttaatttcacgcggagttggtcccgtaacaaccattgctcgtggattctactccaacacgcgcgttaatcatacgtgacttacatcagttgacccttccctaaacattagctttcttttcgagaaaaagctttgatttggaaagaatcttcacgcgcctttgatccgcgatgcaatgactttcatgagtttaacagataaatgacgccgaaacatccggggcttccaagtggaagtcaaaggattaggttgcagaacaaagtggtgcccactgcccactgccaaggataagtgggcctaggtccatgggcccaacgcctcaaataaactcgaaagaaagacctctcaattaggacctgcattgacaaagccaaattttacatataaaaaatatgtattattctttcttcttctaccaaaaataccccttccattattttactaaacttaactttccctctctcctttcctctatcagagtctatcttttcctttctcttctctctctttctaccaaccaccaccactatttgccaaaactattactaccataccaccaccaccaccaccaagacagccactaccaccgccaccactgagagcaaccaccagcatttgcaaaaactacagccaagctacaatggtgcttagtggaaaaatatgtgtaactaattttacttaaaaatattgttggagtcagttatttatatgtatgtagtttgtttttaacaaatgtatacatttgtacttgtaatttattgattttgcccaaaaattggatttgtaattttttgtgctcgtttttttttaggagttttttttgcgataattcacgatatttttgcgataaatttttgatattacaccaaatctaaggttaagaattacgttttacgataatttttgatgttttacaatataaggataaaaaaaattaaacccttgtgtaattctcgacgttttgtgatgatttacaatatttgcgatgtgtggccaaaaaaagaaagcttgagtgtaatttgcgacattttttgatgtttcacgattaatttgtaatacatgaagaacaatttatgttacaatttttttgtgatatcttacagtaaaattttcataaaaacccgattattgtgtttaagcctttttcttatattattattatgtatgtcgtataaattttacgttcttcttaatggcaggtttaattatgtttttgcttgtgttgtatgatgatgtttggatgtgtcagggtttcaattagattttaagagatgcacatagtaaaactttcaaggttgagatgtatataaccttacaacaaatgcatgatattttatatgaagagttggaagtggacctattggagtacaaatttaaaatggatgtttcttgcatgtacattaaaggccaattgattctggcgaagccttttttccatgagtgcaacaatgactccatctgaagagggttgtaaatttagggcctactctctcccttcgtagtgtggttggaactttcaatatcccaaaaacaaacgttgttgttggtgtgaatgaggaggttcgtaacaatatagatcaacaccaaatagataatccaattgatcaatgttatgggtacgaccctaattatataaatgatgatcctggtgttgatttgaatagggatgacgatgaagagttggaagtcaatgaagttgtagaggtaccttacctttggatataattccaaccaaccatgatgcagagccacaacgaaagaagactcgtaacgtaaatcgccaaacatcaagcacaaatagcagttataagcgtcataagcgtagaatagaagaacatgtgggacgtagtgccattctcttcattaggagattcgtgacaatatagatcaatatcttggaagaaataagcgaaataaggacaaagtttccaatggagaataattctaaattatttagtaatatttttaatttatgatttcttaagattgttaatctcgcttttggctaaagacactgagtctattaaagagatagtaattgtagaaaaagtaatgatgaaataagaataacgaacgacacaatatttatagaggttcgagcccttataatagtaacaacttattcccctttagttgtattactatgaaaaactatcaagatcacaacgtctactcaggtgagtttctcaatagctcttggaaagtgtacaaatatttttgcagagtgattgttctcttttttatgcgaaagaaggtcccttgaatagtgagatgacttcattatttatagagaaatacaaatacttttgttacaaaataattggagataaattagggaggatttgaatatgcaatcccacgattctctccatttatcagatcaatctcatgaaaataggaattttaattgagctataattgtagaagcagttaaggaaaatatcttaaaatatctttcagtgaagtcccctagtcgaacctgttgggctttgtgccctaaataaaactctatttcaatgtaatcttttctattctattatcaataaagaaacagatttaatttcattacttgtttaatgtgttatttggttcatgcgatcatttatttatttatttgatttataaattcatccaaatccttatcacaccgatattcttgtttattgtgtcgtcaacacagtggaaagtaatcaagattgtctgattaaatgtattcctagatatatcagtacatagggtttagctgatatgataatcaacaacgtagtttacttgcaccttggataagtgctatgtcctttccagggcattggtcaaagtaagcttgggttggatgtatagagtatgcatcggagggaccgatattgaacatagattagat

SEQ ID NO: 300514 - DNA, 1398 bp, Cannabis indica
taaaccagtaaacaacttaaagaaagcactaaatgaacacatagaacttacgtggttgggctacataatcaaggtgatcatgagcttaatccacgggagaaagcagccttaaacatggctgagatgatgattttattactctgaacagaggtacaaaacagggatgaaaaaccctgaagcaacaatggagtcttgctccttacagattcacaatcgagttacaaactctcaaatactctctctgtctctctcaaccctctgatttctgtcttcaactcatcatctaaacatagagaactttcagcctttttatattgatgtcaactaactaacttaactgtaaaaacagttaggttagttggacagttaccaactgtcaaagctgacagtaacaccaaatttaagtggtcaaacctcaacagttataattataatctcttattacaatcttttaattaatttttatgttcaaaattatatgtcgattttttttttaattttccttttataacactattctttataattacataatcatcttgataaatttttgaaaatattttaaataatttacaataccgaaaataaagttactgatatttcagtttaccacacgagttcaaaaaagttcaaacgtatttttgacactgtaaactatttgaaaaattttaaaaatttacaggtatgatattgacaaaaaccgccatgagaaaaaatattccagcatgtgttttcaaatataaaagttaactaaaaggttacaatataagagattgacaataatactcctcatattataaataaatattgatcacgtaatataaattcaaaataaatatacatgttatgctgtgtaaccattatattcacttgagtattgtatagtataatttagggaaatttatacaaattatctaaaattgtatcattttttatttttttatgaatattttttacatttttaaaggaatgttgttttctcattttttttagaaaacaacattattttcatgttgtgaaaatataacatactatagtaacaatgtaaaattaatgtatttttaagaacaaccaaaataaaataatttatatttttgtaaaaaaataattcgtaaaaatataaattagctcttcatcatttttgtatatatttatgaaataatctttgtatgatatagtattatagtcattttttagggtaatgaagccctgaggacaactcttaagtagagcaaagggaatatgtgagagaacaaattttatctccaatccaacacataacttctaattttttaattttttaattttttgatttctaattttttaatcacaaaatgaaagtaaaatttttgtttttaaaatttttgtttttgtaaaaacaaaaatgcattctgtaac

SEQ ID NO: 300515 - DNA, 5603 bp, Cannabis indica
ttttcttttcttttttcttctataaactgttatatagatggttgtcactcggtcttcatcttcaccatctccattgttgaaaaacctgaaaaaatgagtcttaaatctttgtccaacaaagctaaaggaaaacaccccattattgaagatgatgattctaatttcgctccacctgtaacgaaacttgatcgtccccctcttaagaaggaatccaagagtaatgaggctgaaaaaagttctttccctgaaatcaagaaggggaagaagcaagcatatgaaattcttaaggtttcaatttggttttattttcattttgccctaaattagaaatattatattgttttgagttgtgtgtattcattcgattttattttagggtttatattttttagttgttttgatgttttattagtgatattattactgtctagaatatttattagatttaggttgttttttggttttcggaacaagagggtcactattctagatcttggttccgatgttaaagctccactaagagtagtgaagactgaagattgctagtcttcctggccaggacaacgaataagttttgtttgtgttgctgtatttttattgttaatgtgttgtgttatagttattttaactattgtgtttactattttattacacggtggctgtggtacctttatttttgcatttgccgagttcttcatacatggaaaagatgttccactgggttttgatattgaagcttatcgcacgaggcttgtcgtgcttttgtttgcatatggttaaaggaaaaacgatgaaaatattgatagtgaggagagaagcctaagaagtctacgaaagatgttaaagggaagaataagggtctagtgctagggaactgattaatgaagcctattgaacgttattgttcttttttattatttgttgtgtatatattaaatgttaagacttggttattgatgttatggttctattactgttttttttttagtttaagtactggatatttgattgtatctctttttgagacaatgctttattttggatcttaatgcttatgttttcttgcaagtttcttgttcatgtcgatatatgaaatgttttggctcaattgtggaaaaattgttattcaagatgtcttactattatacttaggaaagtagttggataattcaattgaatctttttgaacctgtgtgctatgtgtaaaatcttatatacaactatcattcaaaggttgggcaactgttgaattctcagcttgctagtcagtgtgacactaaaagttttatgaacttctaattaacgtgtcacatatattagatttggcaaacaactttaacacaaaatttatgcaacttttaaaaaatcaatatcgtaagaaatttaataggaatgtattaaagaatttaaatgaatatcctctcactatatacaattttcattcaacggttgtgcaactattgaatattcaacagttgctctttgttcttgttgttttctagttgctctaccatttcttctgccaccagttttgcatagttaatgaagtcaaacattattttcccatcttccaacactattatttccatattttattgctgtgtagttgattttctgttggtggtgcatttccaatcattattgttgttgtatttttttgtgtaactaaagagctgttcattttaaagaatgatggattattggttgttattgtgttattgaccacgttcacacacaataaataccttgtggagtcggattctttcagttttagttgtatgtggaagaataggcttggatcctcatttatcctcaacggttggtatccttctttcacttgatatttcattttcagttgagagtttttggttgcatttcagcacctgttttcacttgtgtactagttcttcatatttgcaatctattgagataaattggccactagctttataacttacataattcattccttgatcaaacatcccattataaaatatgagaaatagaattgtgtcattttcctagcaattgaaaattcaagcatggtaagtcaactatgaacaaactgtctgaaaactgtaatgcgacaattacatttgttgttaggcatctaatataaaaccttaaaataattaataacacccctatgtgatacaaacacacttaccataatcgattggtatgctcagtcaactgggactcatatcatccctctcttttcttggaggaattattctggctctgagacttgttgttccttttttcttgggaattactcactcccatcatgaaacttatgcttgttggctcgcttgcgttactctgggagtgacactgcatccagtttgtgccgcttcaaacctagaaaaatttatctgcgaaggtgcataccctgaggtaggaggtccatatactaaaggcacaacaaattgtgttcccagatgcatgattgctggagcttggaatgaaggagctggaagtttcccttcgtatctgggtgtgctaaccacattggtgggtgcctgagcaacaccaaatgcttagacatatgcctcctccaagttgatgaatccttgagctctgtttagaaattcggaaaaattgtccactctcttcctttacatttcattccataatagggacctcactttgatccctacctgaagagccactaattttttgtcatcattaacttttgtctttgacgctacttctgtctttagcgagccttaagactttcattctgttgttattcgatgttggtcaaggaagtgacctcaatgtcaaaatctctagcgaccacaaactaatttttgaacatggactgcaactcgtgccagctctggacagaccgtaatggcaatctcttccaccattcttctacagatttagctagattaagtgggaagcacagacactttccgtcttcactgacgtgtgccactttcatgagttgatcgtatcaggacaattgaaccctagggtccatctttccctcgtacagatccatctagggcattcggaacctttccaacaaaccaacatctaaaatcctttagacacagggttccggatcttcatcttcgagttagatctaatttttctttgcttctttagtaatttttttgttactttcctttaggttgcaattacatttctagctttttaatgtgatatcctggaaggtttggtccccgcatctgatcgttaatgttgtttctcaaatcacccccgcgaggcctaatcttttctccttggaccttttctctccgcatgttcaagttatccttgaggtcaacttagaagtaaccatcttcgagatctagttcttcaatgtcatctccttggttcacggaggcactagcatgctttttctttccctggacattaagtcctggtgcctgagcacgggtcttgtcacccaagggaccttcctttacatattgtttgggtgaccttgccctgggatttggtcagcccttccattctagagatttggattttcgcgtacaggtcttggtgggcggtttttcttctaggggcttttagctacgactttctctttatttctaggttgtaagagtctgactccaggttggttgaaccttctttcagcagttggaacgtcatcattaatacaaacccccactccaggaccttggtttgtgggaggaaccttcgagttaaggcctctttccactattgaggcttgcatctataagagggtctcctggatttggtgggtggctccttcttgcctttccattttagcttccttgttcaagactatttgccttaactatacaactatacgacctcggggtcttccttatagtctttgccatattctcctctatcatcttcgtcattgtcatcttaaccatcctcttcgagagggttttcatcatggagttcctttggatggtgaacattttgaggatgtctacctcccacaaatgacgcttcatcgtctcccgcagcagtcgcctgaacattctccaaaagaggccaatttaggccatcagccataggggcttctgcgttattatgagcggcttggttgcctagttttccagtattcgttctcgtggttaccatgtttgtagatgacaaatatggtagaaactttcttcaactctcacaatgaaagtaccaaaacgtttatcgagatttttaaaaaccggaaataagattaagttgaagaaaaaaaagattaagcaatgaataagataagattttttacgtggtcggggtattcatgagccttagtccacgagtcaatattattaagctcttggctatggattattttactactttttctcatataagtatttttaccaaagtttgtagccaaaattcgtaaccctttgcatgaaggatttattccttatttataggcattttggctaatgggtcgggcggacccattaggatttttcaagaggaaaaatcccactaatagggtaaatataatttgatattggctattgggccaggcaggtgaggcccaaggtgtagataatcgttgtccgtacacatgcgtactgctgacagtggctggtgtgcgtgtgatgttaggatagtggatgttgcacaaaaaggtgattttctttttttcgtgagcctctttgtggtctgccacaggggacaagttgcctgatttcttgggattgtgtcaagattgcaccacgtgagctggttccacaatcctgagtaatcgcggatgctcttttgcattctgttcctggacatctcctgagagtatcttatcttgttctagatgagtttgccctttgaatgtcaaatgggtgatccgaaattggcatctccgaattcgtattcaagaatcaatatagttggagtcagtcatcacgtctgggttcactcgatttggacggactgtggttatggtattcgtggacctagggaatgagtctcgcctccatattgggcctctgtcacgatccaattgctaactattcgaaaatacaaataacaaccattgatttttaatcaaatggtcataatttctttgattatagtgggtatctcatacatgattattaccttcatttattagatacccttaattataatggatatctcatactaaaataataataataataagtgtacaaatttcaattaccatattatataccaaaaaaatgtttcaactcaatcacatattatatttaaccatttaaaagtttccttatttatttatttttttaaaaaaaaaaaaagaaattacttatttagtttggtttttttttcttcaaatttatttagttcggttttaactagtgttgtaaatacaggctgggctttttgacacgacacgaaatcgacacgagctcgaaaggtacgagcacgactaggcacgaaaaaaatacaagcttgggcatgacacatcacgctgctacgaattggcacgacacagtacgaaaaatatatccttaagcatgacacaacacgagaagcattgaagacacgatatgtaagcatgaatagactaacccgaaaaagtacgatacatgacaaacttgaaaagcacgacacgacatattaaaaaactttataatttattaataataata

SEQ ID NO: 300516 - DNA, 2356 bp, Cannabis indica
aattaagttttagtttttttttttttttgatttttacgaaattgatctacatagaaacccttattgcaacctaaattacaacaaaaaaacgtataaaaacccctatagcaactagcgttgcaactactttaaaaaccaaaaacataaacttaaaaaagaatttaaaaaaatagtatataagttaattctccaaaattaaatttgtagagccattatattatctaatattatctattaataggtaatacacgttaaaaaagtatacccatatatatacctactatcagtcgtaaattattataatcaataatgggaaaactcctgaataattgtcaattcattgatttattttgtacttattaattagttatcaagtcttaatctcataataaggtttttgtaattagataaatagtttggtgtatcaaatcaaaaaaaaaagaaattgtcaattcattgcgttattacattacatgtttgaatttctttcattgatcgttccgtcgaagaacacgcgtgtagtacctacgcattttctagaaattcaacgcgcacggaattgaaaaaggaaccatgtcgacaattaatacaaaatcaacaagttaacaattatttatgtgtgtaaacgcaaagaaatattccaaattatgaaccgtgtatgcgtatatatatatatatatatacaaatatccgtaacatacgtgcataccaattaaccagcacctctcactgaatttactaggctactcccatatgggaattatgataaggcgaaagaaattacgaaacttgatgggtattgtcaaggacaaagcctcaatcatcaaagccattactctatccacaagcctccacgcaacttctatgcgcgtaagcatcatacgcgccaccacacacgatccgtcatctcctccttccgagaatcgtatctccgccgtcatgggcggcggcggccaaggatcccgcaccatctccagtacgtgcataaacacactcatgggtcgactccaagccacgcgcagtgccgccgtggcactcaagtgcctcctcgtcgctcataatattgtttcaacaggctctttcatcctcaaagaccagctctccttctacccttccacagggggtcaaaattttctcaacctctctaaattccgcgacaaatcagacaacgacacgtggcagatgtcttcgtgggttaggtggtacgccgccgttgttgagcaaaatctaatggtttctagggttatgggctattatttgtgtaataatttggatcgaaacaacaacaacaataaggtttcggcactttcaagctgggaagttttatctgaagtcgacgcccttttggactacgtggaatgcacgcgcgacgcgcctgattcttttaagaatgtgacgaacggtttgatacatgacgttttggagctggtgggtaaggattacaggcttgttcaacgtgaactgtcgatccgggtcaaggaacttggagataggatacatggtttgagttctggcgagttgactcggtttctagaaggtttgaacagggttgaagatggtaaggagagcttgtcgtcgttgttcaagaagaggagaagtgatgatgagttctgggatttgattagtcaggttaagatgaggattttggaaataataatggtgaagaaaagagagaaggagaccaggttgatgatcacgtgggttggtggagaagatcacgtgcagaaaaagtcaactaggttgagtgagccccctcaggcgttgttccggttgccttctggtggtggttggtcgagtagtcttggtcttacgcatgtaattgtttgaatatataataatgtaatgtggccacttttagccatgttggccttgctctcgtcatgcatgtatataattattgctggttagagttatttcattatcgagttaactacttgtattatataatatacatatgcatcatatcttatcaaaccttttgatacatataagacattgtgttgagtacttgcttttaattatgtttaaatattgtacattttattaagaattaattgcatcaaaacacgttgaccgtattttatttacaaaaactagcatactaatccatataacattttgacgtgcattattataaataaagtaatagtattaaaattaaaaacataatttgttatttttaaaatatattgaaaagtggtgattttgtgacaaatatattaaagattgtgaaattaataaaaaaatagttaatttcacaaatgcataaaaataacaaaaatacggtttcacggaattttaaacatttttacgatttttttattttatttgcataaaatacggtctttttatgttg

SEQ ID NO: 300517 - DNA, 1127 bp, Cannabis indica
cttatactaactaactcttaacactcattccacattttcaagatttttttattcccttacaaaaatgaagaaaaaaaaaggttgttttggtggaagaaataagacgttaaaaactatcattagatttaaaacacctgatgtttgttctttttgtttgaaatctaatgaactactcaacatgtcctttggctttgcccatctcttaaagaaactcagaagtggagtttaaaaggtctggacaagataggggttgcttcttcttactatgaccttctcgtacgttgggtgtatgttttttctttccaagaaagaagtggaggagttccttgttcttggttggaggatttggcatagaagaaacacttatgtccatgaacacaaacttttgaaagatgatttagtggggcagtgggctttaaactatttgtagagataccaagatgcacagtcgggtgagttgaaaacttggacagagaatgggccttcggtgtcggttcatcctccggcagctgagctgcagctgggcgagttcaacctctttgttgatgccgggacacgatcagttgatggcttggtggggctgggagcattggttatggatgagttgggtgctatttgctactcttcctcgattctgttgactgcctccctcgccccctcacgtgtctgaagcttcagccttgcttcaagggcttttactctatattaggttgggctatactcaagtcaaagtcttctccgattgtcatcggctagttcaaagtgttagcaaaaaagaacattttttctgagtatggaattgttattcaattcatgatatctttcgtgtggaagttgttttcttttatttcattgtcttattgtaatgaaattaataatgtcactgctcatgttgatgctcaactagctctctcactcaagtaatctcgtatttggtggccggatttgcctaattatcgtgagtagtgactattttgtatgattgtgatttttttaactttgtgccttataattttgaagaacattcatttaaagaaaaaaggactaattagaaaatctcaaaataaaaaactggaattttttttttttttgaggaaaaaactgctattataaattaaaccaaagag

SEQ ID NO: 300518 - DNA, 710 bp, Cannabis indica
tcttcttctttcttctcatctactttatattattttatattattttataacatatacaagtttattggtgagtacaatttcatgtttacatcttatacatacactttaaattttcaatgtttatttatattcaaaaaaaaaaaagtcttaataaagtatatcgaatctccatacttgttcgatccacattactatgaaaattctaattaataaaactttaacttaatattacaatagattcaatgcctcacctaaatttgaggttttttaaggataaaattactatagtccattttgtcttatcatgtacatggtaataactaataatggtacaaacaaaaaattagtctaaattagtatttttttttatctaaatggaaattaaatttggctattttgaaagtattatggtaattgaatacttcagttgaaatgaatttttgggaggaaaaaaaatttatggatgtcacataaaccatgtgttattttggttgaatcatatgagagagtctagtagaggtggtaaatgtttgatagagtcaaaatgaaatgtcaagagggccaactatttacattagtatatttgctatacaattataggacatgtctatgtaggcaggggcggatccacatatagtcgaagcaggatagtagtcttaatgtatacgctgttaggctaaaattagtctaagtttcgagtcgtattttcg

SEQ ID NO: 300519 - DNA, 1320 bp, Cannabis indica
ttttagaaagaaaagaaaaacacaaaacagaaatatgttatttccaaccacaagaacactaaaatgaattctagcataattctacttgcacctcaataaataaactccttcaaattatgaattcaaattacccaaaaccatcatggatgctacaaaaattcgaaaacttccaaatcctaaaatttcaccaagacccaataatgattaaagaacaaccaaaacccatacagaattttcgtgatacaatactcaaaagcctcgaattctccattaaaataaaggcaaagaataatatacctgggaggccgaatgataaagttgacgagttgctccatagattcaaaatgatgaaggtgatctcctactttgctacctctctcttttcttaagatggcttttttttagttttttaaagcgcataaaatattacacagtattaaaaaattatacatatatatatttatataatataatcaaaacagccaggaaaaaatttagtgggcaaataagaatttatcagaccaataatagaaaataaaaaagagaaatcgaaaagaaacaagaagaagacgaacctaagaagctttagcttattggttgattattaatggtggaactcttaatttatgcatcttttttaattattttcttgcaattattaatatcaataactatgtattattagttatataaatatatatttataatattatatattcttccatatctgaacccgtatccggttctgttccggatccgacccgttcacacgtgtatgactcgtcccgttatagaattgacctcccacacgtgttatcactttctctctgtttacagtctgttctgatctgagttctgaatttgttggactttgaaccaatgggctttttctctggactgggtccaggcccaagtcatgatcggctcttagaaattataatattttgtctaacaattttttattaaataattttttcagtattaccatataaaattgtttttttttcttcctaattaatgttatgtaaattagtcatccaattccacattaagtgttcgagtaaactttattcactattaaaggtatctggcaatacgtgaaaattaatactttataaaagtaaccaaccaacaaatgaaacaaaggaaaacttaaaaaatattagaatttagaataatttttacaaaaatactgtcacatggaaattattttaaaaatattatattttaataaaacaacagtaaaacacaaaacataacaactaaaaaaacagtggaacaacaaaaaaataactgtagaacaacagtaaacacttaaca

SEQ ID NO: 300520 - DNA, 3923 bp, Cannabis indica
atacatttatttatttattatatatatttattttgttattgtataaatttaatgtgttttaagttaattgttattgtaataaaattaattatttgttttattttaatttaggtaaaattataaaactaatgcaggagaaaaaatgggggtttaatatcatcgtctatagtataaggcacagtttaaactgtcgcctataccttgttataggcaacagttttaaaccgtcgggaagtccacattagcaccagtttttaaccgttgcctattttacccattttgcaatggtcgtataggcgacgcttataaaaatcaacgggaatactttaaataactgtttaaaaacgtcgagaaaaaccatttttgtagtagtgaacacttaggggttcttcatgatcaagttgctagagactctgacttaagaggatcttagctttaaatattctagctttttcatgtgttatcattggatgagaggtaatagcaggttgcacttgatgtgctgaggtttgaggactagcatcaaacatttatggagagtcagcagcagaatgtgagcttccacttgaactagaactagagtcatgaggttcaggattttgaacaaatggatcaccaaaaagattaccaccatcagtatcagtaggtatttccccctcaaaacctgagccataactagaaatagaagagtaaggtgcatgagctggggaaccatggtgtgcttctggtgcaacttgtgaaggatgatctgcaagattatgtggaatggtgtcatgagtcaaagacagaggcaatgtggaccaagttgagctttgtatgaaaactggtgatggagtttgataattgttgaggaacctagacttacatgggaattcaagttcattaaacacaatattttcagtgatatagattttcctagttattgtaagacacatataccctttatgagcatcactatagcttaagttcacacatttaagtgaacaaaattgaaatttatgggactgatatggcctgatgcagggaaaacaggcacaaccaaaggttttcaaaaacttatacttgggtttagtgttgaatagaatttcaaaggatgagacatggttcaaggcaggtgtgggaagcctgtttatgaggtacacaactatagcaaaagtatcaaactagtatttcaggggcatactagcttgagcaagtagtgtcaatcccatttcaacaatgtgtcgatgctttctttcagctcgaccattttgtgatgaggtgtgagggcatgagtgttgaaattctattccttgttccttaactaaggttgtgaaaggttgatactcacctccccaatcaattctaagacacttaattttcctttcaaacttgttctcaacaagagccttaaattaaaggaaagcattaagtgcatcagatttgaattttaagggatacagccaggtcaatctactaaagtcatcaatgaaatgcacataatatctatgattggtgttagactggattggggcagggccccacaagtcagtgtgtatgagatctaaaggagcagtggcatgagattgagacaatttaaagggaagagcatgagccttgccaaattgacaggcatcatagaaagattgcccttcattcttagaaacttttacattacttgactctaacacttgactcaaaatacgagaagatgggtggcctaatctcctatgccacacatcaatttttgaagataaaacttattagttcttgattgatttacatgattcttagacttaaccatagaactagatagaaaacaagacttagactgagatgacactatttttattgggttggaaactggaaaactgagttgagactgaggtgactcgagttgatacagaccatccttaagcacttctcgaagtagcaccctctttgttactttgttcttcaccaaatagtaatcatgatagaattcaatcagaatgttgttatccgatgtgagcttagatacactaattaaattcttagcgatttcagacacatgtagcatatcctttaacactaaacaactaccagcttcagtatacaaataaccattacttaacagtatgaacggttttgagcctgttaccgttgcccacaataatagactctttacctgtgtaatcccacttctagctcatgttggaagcattacttgctccagagtcagcaaaccatcactgtcaaatatttcaggggttgcaacgaaggcaatatggttgctttggcctttttgctactggttttgagtgatgttaggattagaccccttgaaactttcatcgaacctgttgtaacacactgctgctgagtggccatacttgccacaaacttggcaagttggcctttgtccatttggcgaccccttccacaagatctgcctgcaccaccacgattaccagagaatcgccatccattgttgaattgttgattttgatgtgcatatccacgacctggaccagctgatccagatccagttttggttgcaacattttcttgaggtgtggaaccagtttttcctcctgagttgagagtttgcagcctttcaatcgttctgtcaaagcttaggaggatatcttaaagttcttgccatgtggttttagctctagcttccatttgaaccattattgaaagatactctgcatcaagtcctgataacacattggcaacgagatgtgcttcaggatagggatctccaacaagggccaacatatctgcccaatttttcttttgtctgagatactctgccattgttgttgagccttttcttactgtttgaatcaaggtgcgggtatcatccatcttggatttggaataagcactatacaagctttctaaagcatgccacagttcaatagatgaggcagatcccaaaaccttagtggtgatgctctctgtcatagagttgtaaagccatcccagagcagttggtcatttattatccagtgctcaaactcaggatttcacaacaacttcaacacatccagattcatctggttcacctgaaggaagaaactccaatggacactctttagtgcttgtgagatatccatgtaacctatgtccacaaacaataggagacaccatagtcttccataaggtgtagttgtttcgatcgagtttaagagagaatggttgattgagagtggtgagttgattctcgtataggttagtgttttgggaagaggaagcaccatttataatggtttaagttccctagaatgcagaagaaccatctatgcttgtagtaggagcattgttttcatcaccaggagtttccatggcagagacctagggttaactctgataccaagttgaaaatggagagaaataatttttcgtaatgttcagctcaattcaattgtgagctagagtattctatttatagtaaaaggaggcattacacatacataagaaaaaaaggagccaacagctcttttaaatttgtccaataaacaaatccctagagaatatttttatcctaacaatttttacgattattgcgcacagtacaatttcataaccgaattatcagggaatcaaatctttctatgcttcagtgttgctgcagtgtattacagtgcaatgcaccttcagggatgacacctcatcaccattccaagtttgcttatttctcaatacgaaatgcttgattttggttggtccatagatgacaaaccaaaggctgctacaacagttatgtaaacttgcttcctcgtttattgttgtcgagtgaatttcgcaacaccaattttatatgatattattaataacaaaaagaaatctatatgaagaacaagtgcgagtattcaacctagagtggcgagtactcaaactgggaatgagaaatgattaacagaaagctgaaaataacaatgagacaaagaattata

SEQ ID NO: 300521 - DNA, 750 bp, Cannabis indica
gttacgattgcgtacacttgcgtatacaattttcacaacagttgaaatgatacgtcgatagtggcttggtaagaatgccaattgtctgatcacatgaaggcacataacaaacttcgattttctcgaacatgatttaaatgcaaatcaatctcgatatgctttgattaagcatggaagacatggtttgcagctaaggaagctactcctaaattatcaacccaaataattggaggaatatgtagagtaactttcaattcggcaagaacagagcatagccacttttatctcgacagctatgttagcaagagcacgaaactcactttcagtacttgatcgaacaactacttattgttttttttggcagatcaagatactaaatttcctctgaaaagatggcatagccacttggtgagcgtttgtcatctagatagcttgtccaatttccatctgagtaagcctgtaaacagagtcttgtcgttggtctaatgagaagtccttcattgattgtgtctttaagatatctaaaaagtcttttgcatccttcccaatgtgttgttgttggagaatggatgaagagtaaatactcatttagaaccctatgttttgtgaaatacaaacttggtataccttatgttttcaataataatcatgttagtaccttttatttacaaatcctacacatgtgttttcacaaaacatagagttattttctacacatgtattttctaccctatgtttgtagaatttgta

SEQ ID NO: 300522 - DNA, 1362 bp, Cannabis indica
aagccaaaatacaatcataagaggatgccgttacttgcttgggctatcttccaaacaaaaaacggatgccctaataattatatcaattcaaggtgggacccatctattgtgacctgacgtcaccacttgtccctcattcctcttcctcctctttcttcaacttcatcctcttttgtaaaaatagttatcaaaaaacatttactacaaagcaacaaaatttatgattaaatgtaaaaaagtataattaattataaattaacattcttacgttgtgactaaaagtttgtgactaaaagtattagtcacaaaattaaaatttattgtgactaaatgtgtttttaatcacaatatatacttgttataactaaaactaaattaatgataacttgtgtctaaatactaagttttagttataagtaattttttgttgtgattaaaaattacatttagtcacaaaaaatttatgttatgattactaaaaataaattctcattaaaaatagctatttttaatagtgattgttattgagcaataataatacctaacacttttaaatatatcgccttaacattgactagtgttactctctaaaaattttcatatgacataccatttctcattataaaacttttttttataataacttgtatggtcacagaaataattataaattacactgtgtgattataaacgagtattatgtgcaaccatcaattaagtgggattattttgtaaattttaatattttacattgttagtttagcaaatttcactcttcacatatttacctttatacccttgttgtgaatggaacgctaccccatattctcccatcgccaatctatgctgctaatatcatataccaattgaaagaagataattaaaggttcataattaattaagtttaattttctcaattgtgtatgctatgtacgtataaccctaattgaaaataaagcaaatgccgcgttgtttaaccttatctgctcgttaatttcaatgtaatgatcaaacttgtttgtaacttgccctttacaaaattatatgtatacgttctgttatatttatatatataaattaatatctttcaaaatacacactagttacgttacatttatatgtaatgattaagtgtcagagaatagtactgtatttgttataactaatatatatgtatattttgttgattagtgttactttttattcaacttcatacgtacagttatcttctatatatgctttttttccttttatgttttaaaggataagtaattaaataaataaattccttgtctgagaatatatatctaccccaaataactgcctttttaatatgtaataaatgaaagttttatttttatt

SEQ ID NO: 300523 - DNA, 2821 bp, Cannabis indica
ggcatattgacttcccaccaaagtattgaccctctaatagtgaaggatccactcagagatcttcatcatggtgattcgattgaagtgaaataagccatttgctgctatctttagctgaagaggccttgagcattattaaggctgatcaggcatggttggcatattggagccaaaagttcccaaaagctctgagtgaggaggaagaaccctaaattttgtttagagacgctatctggaaagaaggtactgttggagcaagtacattcgtaagtggtaagatgcccttccatctagttaatgctttgtccttggcttacctaaatcatttcatccaaggcaaatttgaccctaatatctttgtatagacgatcattaggtatgaagtgattaaatatatagatagagcaaaagtaatcattcttccaatatggaagctctttagaccgggaagacatcttccaatttgctagaaggaacgcccagtttgccagagtaaatggtttaaattgtatttgtgtgtcatttcctactctatcgtgtaatgcttctatgggattaacatttatctgctttgttttgcaaagaaaccactaacattcctgatgggtctggtagacaaattcttgggcatcattgcccaaagattagatgaggttagggagatcgccaaggacagttgaggtaaagggaaggttgggaagccttctagttcttgaactgtgaagtcatcacttctgactaaaggctaggaagttgttcctaaggctctggccttagaatttgttgcccatccctaaacctcttttgctgtagtggattcttcttcttaggacgtagtaaatgaaaatatgttggcaatagttcctctctagcaaagaccaatggtcgtggatgatgaagaggaggatgatggtgaggcactcgtgttccttctaagaaaaaattctggctctgaacttggtggagacaacaaaagaactagagttgaggctaaagaaaagcttcagcaattagctgccaccatgaagcaagatttggaatcttctggaagaagaggagaaaaatttcatggaaatgagaggccaaataggtagagcactcattccaacaaggagactactagctctcaaccattgtcagctcaaccaattcatgctccttctgcccagttgccaaggaatgagcttctttggtatcaactaggagaggtgttgaatttgttaattctgctaagtggaatgaaccactttttcccatttttagccgttagaaggttactgagaggctaaggcccatagtaggtttggatcttgctccttttacggtagacttattggaccaaaatgctacaatctgcaacagattaggttctgataaattctttataatggcgagtggagatccaaccttcatggcaaaaagtcttaagagccaagtagttgtggtaagttcatcaacctttgttttaatcatagcttccattattttttacttgcattacacttcatgtaattttctttaggcaagcctgatggcggagaggtgctcttctcacgtgactaagttggcttatgaaatcaaaatcttaaaggtcaaacatactaattaagagcaaacgagagaagaggtcgaaaggatttaaatgaggccaaagctcatattgatgctttttttcaagcaaaaggttgaggcttcgctcagtgatgttgttttcatctacaaggcttcttacaagattgagctaaatcgtgctaagaagtataaagaactatacaactagacaaactctcgggttcaaactctggaagaaaaggttacgaatactgagaataaggtaagaaaacttgagcttaaactaaacatgacttcccttgactatgaccgtcagggtgaggctctcaacgacaaacgttgctattgccaatttgtagaagaagctgaagcaccatcaatatctccaacaacaagcgaagacggatgttgaagaggctaaggttgctattgtaaaggctgagtcttacattgaggaactcgaggagaaaaatgctcttatgtagaagaatcactcggaatatttgaagaaatcaattgttgtcactttgtttcatctttagaagatgaacaagggcgtgttggacatactagaagaggaagattaggaaaatattctcccacagaccgtagaacttgacgttgctcaaaaaactaccaatggggtcgttgaagatcctgggacccttcttccagatgatgtgaatccaaaaaaaaaatatgcccttccgtcttcaaagactgttctagccaatgaggttccacctaatctctagcctgactgaactaagaaaattcttgatccagctcaaacgtgaacttatctcttctagcttcataactctttttcttaacttttgttttgggggaaaagggtccccctttttatcttagtagagacgatatttgcaccatttccgcggggtattaaatattatgataattctgctttacatttttggtacttaaattcactaaatcttttatgcacatcgaatgaatttaattttgctaagttagtcttgctttcagattccctcttattctagttccaacaacttgaaccttaggattttgactttatgcttagacattgtttttctttaacaaattattttttctaaattccttggaactttcttagacattgttttaaacaatctgttttagagaaatttagtaaatattacttactaaattctatcccaaaatgatataaatcctcaatcttagaatctcctacttgtatgggcaaatcagacttagagtt

SEQ ID NO: 300524 - DNA, 2327 bp, Cannabis indica
ctgctaatattttatattctgcctgttctgttttgttgtagcaaaattactttctgattctgcaaacgcttacatttttatattttcttatatataactgacattttgcaaaaacacggtttttcacttttcactaccacaaagacaaactatatgaatctataaatctatccaaactttttttatgatcggcatgagcaatttaaccatcaaaatatgtctacgcaagtatctaatcaaaatctaataataacctttaaaaagaaaaaaattaaaaataataacatcatctttaaacacattccaccatgacctttcagatttcaagtttataatgaaactgactttctaaatttttctgtattaactgttagatggcagcataatatgagcttctgccaacttgaaccgccggttaccttctgcatatatatacacagaaaaattatgtcatatttacatgtatagctataaataaagatacaaaaatcattatacagaatcactggacttactgtgtctgatatagctttactcttctttttacccttttgtcctatatatgcctcctcctttgcaagtgtgtcgtttctaaccaaaaatgcttgtttgagcctctcatctcgtccaaaattaaaggagtgaatatgatttgatgacccaataccataattgagtcgtttctcttgtttaataatgatattatttttgtcttcaactttagggtcaatatctccacttttagcttgaatgtttatactattactagcttcaattctcgcttgccttgcatgattataacctgaataagacttggctaaatctatggagaaacatgcatcactgaattgggtacttggagttgtgctcaaatcctctgaaactagagttaatggactttggtaaagatgttgtttccctggattggcagaagaaaaacccaactttgaatctgtttgaccaaatccaaccgtacttgttatggtaagattttctttaggactatctgaattgaaatttgagcaagagctaactgaactttgttcaattactccttgtattaccaactgtattacttcttccacttcactattgtaatttgctgatgaagacttgatattgatttgcctatttgaagagttgggcaatggcagaattcgatttttgatgagaaatgttgttcttctattcgagatagcgcatagcagatgtgcgtcgaactcgcatagctgacacctatagagccagcctttgtaactcggtttggtacatatatcacagctaaaattatagggtgatgaaaatgtgagcttgagttcgtgaaggtgagaagaaactgaaattgtgagaggcagagctgagcagaggatgtgataataaaggccacactcggcacaactgtagtagaagacaccaccattgatgtgatctccacaagccttgcattcaaaggttcctctttagatgataaaagaaggacaagtagtttggagagtcaaaatggtgtattgggatgagatgggtgttgtgttttttttgggcatgttgtagtcaaacttggtgaagggaaaatgagcaagttttgcaggtgtaatattctgcagtaactgatgatataatcttgagattgcatgctgagcaagaacaattttcagtttggaggggaattggtttgtgttaatggatgatcatggctaaagtggctaattctaagcttgtttatctctagtaatctttcttccattgatagtgatgtggttttcattttgtttgggttattgctgtcaattaggagcatatataattttttagtttgaggtttccaaagggctgaaattgaaaatatcagagtttgaattttgatagatggatggtagcgtaaattgtcacattgagcggcacaaaatccaccaattagattgataactgacagatttttttactgaaaacatgtcagattgttgacattcattcaaagagtgttttcatatttatatcgattgagtaatgcagtgctttatattaacattgttacagttggggacggagctttcattggatgtattattgaacttggaaaatacccattgtgatatccgccacaccacgttagatagtagtgattagcatttagccacacatagatagactaattatttcatattaaactctataattcttgtttgcagcaacgagaattttttttttaatattattgaactagtaaatagctcttgcttcgcggtagatatttaaattttttcaaatgatatatataaaataaaagctaattaggatttttgtccactgaactttgacatgtacca

SEQ ID NO: 300525 - DNA, 2253 bp, Cannabis indica
tgataaaaaaataataataattacgtaccttaaataatccaaatacctaactacagcatgttaatcttatcattttaatactaattaattactttttgtcttttaaacattaattacccaatgcctaatattaattaccatttagtgttattatagcatttttttttcattaccaaactagcacactattaaaaattaattaaattatattaaacaaaatagaaataaagaatatacctaattatatatatattttttatttttgataagaaatttaaagaaattatggtaaaaaaaagtttcattaattttgatttatggaatggaagaactaattaacaacctttttataattaaactatgcttaatgaaaaagattaatgaagctaaactgctataccaataattttttaggctatgaaatagagttgtgaaccacgtgccttaattaataataataataataataataataaaattacttttagttgttaataattatttaactttagatatggttagttatccaagaacaataaatttgtgagaaaacagcttccaataattaattactacatttatttttggtcacaaaattcgtagagaagtagggctattatagattaaagcacgtgtatataaacaattatgtacaatattcaattcaatagtcttgctactatcaaataacattacaaataattgttactttgttactatcaaccaaagtcacatgtggtaagaaaaagagttgcctagaatataaaaagttatttatattttcaatttttagaattgtatttttaaaactgagaatataaaataattttttgttattttaaaaatttaatagtatttgactcaatttttaaaattatttttacttaaaaaaaaattaatattctataccataccaggacataaacttattctatcttagagtagaccctttacccagatctggactcagacctcggaccccaaaccttggaccctagcccggatccaaacccaaagcccagacttgaactcagatcctagaccctagaccctagaccccgacccagactagaactttgacacggacccgaaccatgacccgaaaccggactcagacccagatccaaacatcggactaggactcaaaccctagaccaggacccgaacctctgacttggaccccgaccccgactgtacctagactcagaaccagacaccagacccccgaccccaaacctctatctagatctagacctcagaccacaatctgaaactggacctggaccaaccacaaacccaaacccgaactcaaccccgaacccgaacctcagaccctgaacctcagacttggacctcgaccccgaccccatacctcggacctcaaaccctgacctggactccaaccccgaccccaagccgcactcagaaaccagccccagaccccaacccaaacccgaatcctggcctggatctagacccaaactcgaatcaagaccattttttgaacatgtttgatttaaactgatatacaatatatgttaaaatataaaatctaaatagtagaaactatttttgtaaaaatttatatttatattaatattatgtctctcttttataataatgtatatttagttagaataaatctttcctttttttttttttaacgtaaaatagttcaagtagctaaacaagcgaaacatgcatatgtgcaaaatgttgtttaattaaactatattttaaacacagcaaattatttttaaaatctttaaaattagggaaaaataatttagttataactacagtgtgtacattcattcttaaaacatttttcaaaaaaaaaaattttgataacaacaatatattattttttatcttaagaaacaattattaatttatttccactactttatcttatatccattttttcattatatttcctcatattattttctctttaatcactttttctctctttattttttctctctaaaaggtcaagatttggggactggagtctgacttcaaggtttggggtccaagtcgagtgtcgtggtttggaggtcgggtttgggttttgttgctcctaaaatcgcccaatatacgtggaccagtcaggaagggacacgtggatcaaattacttgagagagaactgctaagtccttgtatgacaccaggaagcgttaatcaaatgggtcccggaagatgcacccggagtacaaggtactcccggaagcgaacatagctcaaaggca

SEQ ID NO: 300526 - DNA, 6289 bp, Cannabis indica
cgccccatccacattaatttttaagtgaacttaatatttttaattaatcaattaattaatttaatatttttatcaagttttttaatattttctcagaattaataaaatattataatttttaaaattaaatgttttttaatgaaaggggacaaagtattagtcaagtttagagaataaaaatgctaacttttaacggtaaaagaaacagaacttaacagtaggagcataattataaaattgttatattttaagaggaattttaagcagctatatattttaaggagtaaaatcagatagtattgaaagtttgaggaataaaaatactaatcattcaaaatagaattttaaataattttatctgatttcttaaaacttaaaagatggacctaatatggatattaattatcctatccaccaacatgctcctcaaaaaatggaatagggtctaactagtattgtagaaagattgtatagataacattccgcagaggcagaaaagaccaattttgaaagcagcaggtttcattgaatgagataaggtaaaaaaaaatagttaatagatagatgagtgtcaagtccattttagttgaaagagactccatttcaattttacatttaatgatgatgatgatgccctaattaatataatgctttacgacgagagaagcttagctgcttgcttggttgcttcccaccaatccattatggcatgcgccagatattgtgttgctttctaagtggtagttgcacgtaatttttcttagacctgtcaccagatcacatggatggaaagaactttgctttctctcactcaaaattgcttcttctttacaaccttaaaataaaaagaaaaggaaaagttgaataatccttaggttaggtaaatattatgatacactagatggaggatggaagaatctcattcaaaatctgacacttaataatggggttgcagagaaagggttttggtataagaaatgagcttttttatcatttaaactgatgtacagcatagttgttaccaacgttgatcgccttccatttacaataatcaataagacactgtaacaggatcaagaaaaatccctcttttctcagcaaaatatataacacttgtgtcttctctcttctctcccctctccacattcccatacataaagaatcccaatggctctcacagaaggggtaatcgtgttgacataaccttccacaatccaacgtcaacttcagggagagttgttccagcccactaaggcattctcggtagtgaaaacttgtggtttgatgatggtatatttacaatctcagatgtatcttgctcttggggacccaccaggagtatgagccttacgctgaggtactatttcacgaaagggatcgcgagtgtaagatacggttgatgaccttgttggatatgaagagtactcattcatgttatatgaagagtactcatttatgttatatgcactttgtcccatcatagcaaaagttgggtgaggtggagaaagaaggaagctcctctgtgctcctcctgcatactgtcgtaatggactcgaacaaggtgacacgggcaatgatgtaattgttcttgcattatccctgcacatatgttcatcgatgttatgttaccatatcagaatcataaagcattgagacaacggtattaaataagcttagtacctggggctccttgtgcctctgggaggtgtaaccacaggctctagaattggctgatacaaaaaaacaaaataaaagaagagcaatgagaaatggcttaaccatgaatgtaaatattgaaagtttgacattaaaggaaaaacaaaaacaaagcaagcctagcattaaaagtggtcttaaaactcttccttaatacccctttgtatgaaatgggatccaaatgggatccaaatataaaaaaaaaaaaaaaacaatgtcaaaaggcagagcagaaaaggaaacttgacctagttgacctacaaaaatataataaaagaacacagtgtacttgagaaatgatgttgaaatccaaaagaagaaacttgagtgatattgtgttttgaaaggaaatgcagcaattcacaccattttacccgactaatgcacaaaaacctgtaatgcagaattttacccagatatttatgacagcactgcagacctaacttcaatattatcaacaaaaacttattgtatgcatatttatcctctacttaatcagtaggcatgaaaaatacgacagcaatacacggtttattatctccaatactttagaaatatagtattcttgaaggcataccggcgttctgctaccatcaaaagcaaagggaaatgcatctcttgttatggtggtgttagcagctcttgacgttgtctgctcccgaatgaaagggtgttctagtagtttagctgctgaaggacgtgctaaagggtctcgctgcaagcataatttcacaaagctctttgcatcatgggaaagataatcaggaatttctggcatatctttgctgtttcctattttaaatattgctgctacctaatcaatagaaaatggaacaaacattagtcctacaaacactttgtaaagggtggaaacccacacagctatataaaaatgtgtttgaacattgtatcgcaccccttcatattggctccaaggaggtttcgatgttgccatttcaagaactgtacaccccaagctccatatatcaactgcaagactgtagccactggtattcattacaacctgaaacaagaggagaaacaattttagcatacttccatctagaagaggggagaggtgagcaatgaaaagaatggaaaaatggtaggtcaatggtcctgtctgtggtttttccttttttgagatgttgaattaaataaagtacctcaggagccatccagtaaggacttcccttgaaagagagcattgaattgcaattcgctatctgattcacaataaagagagatcataagaatcctcacaattcattgaagtgcagtaaggaaaagccttttaaactacattaatgattatatcacaaaaaatacttgaaccaaactactacatatttatttattcaaaaaaactaatatatatttatgcatcatatgggaaagctcaagataggaagaaagattagattcttgctaattttgacttgaaacttcccaaaccagaattctcactcttgacagccttactttattgaaagcgactgacaaggttttacaaacaataaccttgatctgatcccttcattgttctaaaaaaaatctcatatgcagaatctaagatggaccattacatgtttagccatgccgaagtctgccaacttgatttcaccgttaggatctactaaaatgtttgcccctttgatgtccctgccagtggaaagacattaacttaaatgttcagcaaaaaatcatgtaacagatatttaaaatacaatgatcagttacaagttacaaccaacctgtgcactgtatttcttccatgtaagtaggcaagccctgaaaggatctgcctggtgtagttttgtatgacaggttccttgaaggcaccataatcttgaagtaatttgtggatagagccgccagatacatattccaaataaactgatagtgcatcatcaacctaataccatgataacaaaaatttgttactaaatgccaacatcctcgtttatccaataaattacagcagaatgactccttgtcactcctctttgtgtcaatttaagtatatacaaaactccaaatcattgaatttttaagcacaatgtaagctcttaccaattcacttccatagtatcgaacaatgttttgatgtgatagctgactaagcaaatttatttcctgatgacagaaaaattgagtaagaagatccattagttgccaggatactaaatgaacaatgctaagagtcagctgttaaaatagaaattaagaactaaaacaggatgaagaaatgtaatgcatgatatagcctaagccaattgaacaaaagaaatacctggtgcaattgttttagactttctttagaagtatgatcatcggaaacaagtctgacttcttttattgcacacatttgtccaccttcactgctcattttaagaacacatcatttagaaataaagaaaactacaaaacaactagtagaaagtctgcagttccgtttttctttacattgtttgtgagaacagacaaccatactaagaaaaacattgcggttgtaagtacattaaatgtccagaaccatagttacctgttaaatccaatataaacatggccaaaacttccccttcctaaaagttttcccttcttccattttgagagtgtgcaagttgtaacttctgtgactccacaagatctagcgctgggcaagttagaaggactagtaggcgacccaggaggaagaggcagtgggtgacattgggttttcccttcttcaggcttcccagttggggactccagactcatggcagacaacataggatgaagaggtgatgtggggctggtgggacctctagacccaggaccggggcttcttggccttacgttttgcttggcatcagggtgtcctctgagatcaaaagatataacattgatcacactcagagctaatcatttaagcaatcattaatcacttaatcaaaacattaaaccccttaatggcctaaatcttttttttaagactaagataattgataacagacttgcttcgttgtacgatatgaatttagctaagacaaacacccgaacatccgaatgattaacttacctaaaaaagaacaaacatgtgtcccaaactccgaattttcaggaaccatatcgtaaacattacatatgtaaatattaaagtcccttattaaacttgatttagctagtgccggctaatcctcataaccattacctgatccgataagatcaaacgtctatcaacaataagacagaaggtaagaaacttaaagtttcagagtgattcattcactggaaatgaattaactgtttaaagaatatcagagaaaaacagacagtgtgtgaagcaacatactgaagatttattgaaaagaaaaatctccattataaagcaatcaaccctgattagaaaataaaactgattagaaagagagagaaagagcaaataaagctgagaaacagaacagatagcagacccacgtgtggaattttcgaaatgaagatcaggaaatccccatagataagggcagcaaactctgacaccatagcctagagtagagagagaaagagggataacttttttattttccaagaaaagaataaaagttcccaaattccaaacaaattaaagagtagttcatcctacactcatcattaaaaaaaaaaccaatatttctataacaaattaagccctcagaaaacctaatttttctgaagacaaaatcaaccaacagccacaaatttaaactccaatccgaaaatcaggagatccccccaaaaccaacctgtaaaaattcaattgaccattctcaagcccaatcggatgatcctccgaagagctattcgagctcacgctagaaacggagaccgacccagatcccaatccatttgcctggtcgttccccaagctgggtgtcgacgaaatcgaaggccgaggcaaagggtgacaccgagaaccatccgaatcgaatccagaaaacccagaagatgttccaccagggggaggaggagaaacgggtccggaagcggcggctgggaattccttactgaccctgggagagccacgagtcaagacctcgtcaaagctcttggacttgtctttgtttctcttgggatcgtttctggctggagatttaaggaatcccaagtgattagttccctgaggactgtgttgagtgggttgattttgagtttcgtccttgtgcttagtagatttttttccccaccaagcaggcatttttttttctttctttccttttttaattttctagttaaccaaacaaaattaaaaaaaaaatatccagagcaaaagatgaagaatctatctagtttctcttggtgtttggagatagaaaagatagaagagacgactgagttttgatttgagagaaagaaaggagagagaaggttcgggtgagcgtttggatttttatacaaatcgaacgaacaaccaaggaaggaagcaaactcgaggagggattgtgtacaaaagagacttttagagagagaaagtagaagtgggtcccacactcaaacagtgtgaaacagctcagctttaagctaagatacatacatatatataaagagagagaga

SEQ ID NO: 300527 - DNA, 2414 bp, Cannabis indica
actcgaggacgagtaaaagcttagtttgggggaggagggtgtattaagagttagtcccacattgctaatgtgtggaaataaattgtcatatataagatgaaagggctactcctcccattgccaattggttttgggatggaacctcattcatcttattcctcaaattctaacattgtgattaacacaatcaaaggaggagaagatccaagttcagatctcggtcattctctacgacaaaaagaatcaatggttagagatctgaacggaataagacaatttattctgatgcaaccactataagaatttctacatccctttatatgtttcgttattattttaagattttccatattaggatgttagattaatcataatccaacatacatgagtagtaaattaagatcctgataaaataaatttccaataggcccttactgctaaaatctcttacgtagtggctccattaagttaccagcaacaggctgttctgttggcaacactagagagggagcaactagtacttgttgaggaggcgtaacatgaagacccttctgcctcagtcttctaatctcttcatattgttgttggattctggcttgcatttctactctttagtgtcagttttttaaattaactgacttctgaaccgacactaaaagtgtattttatagtagtggcctccacttttctacagaaatctcataaaacttaatttaatttaagctcaattttacaccaaatcacatgtaactctccagaatatttaattacaacatatagaacatcatccaagcatacccaatataactaaaactcaaaaattttaaaaacatcatcgttgagtcaagtttgagttctgaaactttctcaactcctcaaacatctatcaaaaaccattcaaacaagctataaataattttaatcaagcttagaaagcaaacccaaaacaccctaggttcgcacagaacctaattcaacaaattacaaactcaaaccaacaccatttcttccaaaattaaagagaaagaaggtctaaggcttacctcttgttttgctatccaatctctccttcaaatcttactaaaaaaccttgagaaaagattgagtttcaagtctggttcttggtggttctagatagagagtctttagaagagagagtcaaatttatatttagtaaaaaaaatgagatagttctatttctcttttgttttattctaaagtataaaatcataaataacttaaaataatttaggattttctacttaaaagaattaagagtaatttgcggtataaatacccaagtttagctcctagttacaaataaataactaagtttaatttttagcggtaataatacctaagttatatttttagaactatgtaggtacttgaccattaaatattaagttattatccacgtgtcatttttttattggtatatttaaattaattttttaaaaatttaatgacttggaccagtcaggaattgccacgtggcaatttacttaacacttaacagccaagtacctacaaaagtttcaaaattataacttaggtattattactgccaaaaattaaacttgggtagttatttgcatctgggagttaaacttaggtatttatgccgcaaattactcaagaattaataatgacttaggaaaaaaaataccattttctcttacttcacacttaattgtaaaacttaggggtaaaatagtcaaaaactataatcctgcctaaacccgatattctaaatatcaataatacttgcctcactatataaaaggttctaaaccaaacctatgtgactttagtggccaaactatcgtattttcaccgccgagcataaatcacaaaaataccaaaatgcatgtttgtcatatataatacatcttatgtttaataaatctctgtaactgagaaattataactcaaatacctatttcttaaaaatagggcccacatcacataataaacatatataatcacttaatacaattaattaatgataattgtctactactttcatattttatgtatgcagtcattacattgtcaactcacattctctctctgccttctcccgtgcgataccgacttagtcagggactaacatttttggcggtggtggtccaagaagagcataaatttagaatctccaggtctgataactctatggtatagagttatttttatatttttaaactaaaagtattgtgagaagagtagtgaaaatgtgtttgtttgcttaattttagttagttttaatttcattttttatttagtaaaacttttaagtcttgtaagaattgatattgttaggtgtgtttttctaattaattgtgcttgtttgttgctgaaaaaagaagaattaaattgataggaaaaagaaaggaagcaaggaagaagtggga

SEQ ID NO: 300528 - DNA, 2400 bp, Cannabis indica
aggagaaaaagaggcttacctcgaaggattaataagctaaatttaaagatatgcaaattagtaaaatattgtttacaagtgttagtactttaaggagtacaaaagttacaatttgaatgcatgaacttttgataaaatatttccaaaaaaaaaaaaagtaagaagaagaagaagaatttccttgataaaaatcaccatattaatgactagtcaaactagaaactttttaattaattaacaacttaagaatatgttaatggagttgacatttctaaaggcctaagttagattatttagatgacctgacttggctagctgctgcactagtctagaataatgccacaccatattattttcaattaaaacatgactcattaatattatgtgttaggttcatgagcacattgtgaaatattttgaggtaaatagatcaataccattcatcttatttccaaaacataaaacaataactactaaatactaatatatcacaaggatcataatttgatggtgaatatatttggtacttttaacctagggtgtggaaaaacaaagtaaaagtgaaagtaatgcacatgacatatccaatgtatatcccatatgttttacatagttataaattggcataattataaaataaaatataattcactttccaaaagagtggactaagtggggaataattatgtattattctaagctagttgacttgaatagagaaaataacgcctataagtagatagagtgatatatagatatataaatacttccaatatagttgagttgaggattaaaaaatttctaagaaagccctctttgattatataatgtgtggattttatgattcaaaccgatatttcaattcaagctactagttagtactatatatgtgtgtgataattacaccataataataattaaatgattccatttttacactgtggagttcctccgacgatatattaaatggtaatgataacttttttcaatacacctaaaggggctttttcctttctctctcgcgtgcaacttctagctggtgctatggcgaaaactcgagcgagacaggggaagcagaaatcagagatcaagaaaccgaaaaagagaggccctatttcaactgcagatgtgcgtaaaactaaaacgatggatgcagttcttggtattgagccaatcgatttttctgatggtgaagatggaggcgaagatgagaggatgagatcgcaggatgagaaccaactggttttatccccgaagtcgtctctgcaagcgattcagaggcaggaagatgttagcagagatttcgcattctttctgaatgcaaataggcaatgctcgaccaacgttcgacaaggtaactctataactcctcctatattacgttctagtactgtggtgagaaacctagattcctcttttaagagctctgagattgctagtaaggttaagatcacccttgaagatattgaggatgaggttcagttttagaaatcttctattgtctgctatgtcctaggggctaatcccccattatcagtcattgaaggtttcattaggaggatatggaaggataaggttgataaagtaggatccctctcttatggtgtttttctggtgcgatttgaatctgtggaaattagggatgaaattttgaatggtggatatgtgttctttaataatagacctctagtgatgaaagcttgggatccggatgtcaacttcaagaaggaagacattagatcagtcccgatttggattcaattaccagaacttgaacttaaatattggggtgagagatctttattcaaaattgtagggcaattgggcacccctctgcaggtggataatatgacaaagaaaaggaataaactgagctacccgagagttctcatagaagtgtcaatacagtaagattttcccaatcgagtgtcttttgaagatgaacatggattcaatgtgtttacggagattaaatatgagtggaagcctcttcaatgcaactattgcaaaggattgggccatactactgaagattgcaaaaagaaggaagggaaacaacaacaatgggtagtcaaagatagcagcaagactgctatttctggtgttgaaaaaagaaatgaaactgacagtgatggctttagacaagtaggtaaaggtctcaaagtgaagactaaggtggatgttgggacaacacaacttactaacacctatcaggtgctaactgaaaggaatgaggctgaccaaaatgaggcagaaggacaagtttctgttggttttgcagatagacagggttcagctggtgcttataatgatgggagaattatgattggcaccaacaatgttgtaacagtggggaacacaagaggagggggagatcctcctcttggaaatggatagaat

SEQ ID NO: 300529 - DNA, 1857 bp, Cannabis indica
ccttggtgcagaatgacaggaagactactctacgagccccctcaccagaagcattggaaccggcctcctactggacacatagtagtgaattgtgacgctgctatgcatctgggagctgctggggtaggtacgggattcatctggcgcaactgggaaggtagaattttgcttgctggtatgatctattgtcataggtgctgttcgattgatatggcagaggcttgggccatattggaagctctcaaaaatcgaccggacacagcagccagccccattgagatacagtcagattgcaagcaaattgttgatgctattaagaaccaggacaaccatttaactgctgtcaacactatacttcaccaaatcaagctgcaaatggagagtttaaattgtaattccattgttcaggttcataggaataacaatgagtgtgctaatatgttagcaaggaaatgccttgcaactaagactactcagatttttactcattctttttctaggtggttagctaatttttgtacaactgatctccctaacttagtgtagttcctgatcttttgttaataagattttactttaaaaaaaaaaaacaaaaaaaataatctatatataaaaatatcctttaatataatgcatgtaatacatttttttcatttaagaaaatagagactatctgtcatgtaataccaacgccaccacttaccattcttaaaaggttgtcatctaaagttttaaacacttgccctaacatttaagtagctatatgtaatgtgatgttacatatattctgacaaattcatttatatatttatataaatgatcctaaaaatctttttgggaagaaaaaacaaatatgaacacacttttccaaataaaagaatcaaattcttatacacatcactttttgtacttttctaacaattgaaagagacaataatagtcttatcactttgttttcatcgctctttaaatctttataagtacttgttgttttgaattttttcttataacaattaataatactagtcttatactatggcttctctcttacatggagaaggaagtagtactaatgagagtagtattgatgagttatctgaagctcaatctcatttgtacaaacatatgttatgttacacaaattgcatggctttaaaatgtgcaattgagttgggtataccaaacataatcaacaacaacaaaaatggccaacccatcactctttcccaattggtccatgcccttcaaattccttcttccaaaactagctcccttcgccgtctaatgcgagtattagtacatttcggtttcttcacatcaaagaaacaagaagaagaagaagaagaagatgcatatggtctcacaacttcaactaaattacttgtgagtaataataataataatgatgatgtctcaagcttatccccttatgatggtttgagaataaatttgtattggtttagatttgtatgggatggatattaggtagtgtagtatgatgatgttgataagttgataagttggatgattggtggggcaaggaagagttatgtagtgttttaatttttatgtgtgtagtaagagaggagacaaggtagtaggctagtagtaaaagacttactttggctactcaagcttggttacaatttggaagcttgatggggtatttatagttgtttacccctacatttaatttcatctagattattctagttctacatgatttacaatttttctagacttttctaattacattcttctacaatcttcttgattggttacttctagttttctaaatattctaggtttctctagttttctctaattttcttagttttgtgtagtaaatactagaat

SEQ ID NO: 300530 - DNA, 3553 bp, Cannabis indica
agatactaatttcttgtacaaaaaaatatgattccatagtttctatgatagaagaaataaaagatttagaaactctatcaccaattgaactaatggactcccttgaagcatatgaaagtagacgagaaaggcataaagacagtgaaactaaaaatgcctaactgatgggaaaaagatacaagaagaaaaaaaaacgacaagcattctccatgtggcatttccaaaaacaaaaagccacttggagaaagactgtcaatttaaaagaaaaccacaatgccaaaattgaaaagaaacatgggcacactgaaaagacttgtcgtttaaaaaaaattcatcaagctaattttttcgaacagaaaaatgatgaaagtaatattttctatgtctgtcaagctacaacggaagaaatcaaagataattggtatcttgacagtggttgaagtgaccacatgacgaaaaatgaaagtatttttgtagtcttgataaattcaagactaaattcaaaattggtaataatgacttcatggaagcactggttaaatgcactattgccattgtcactaaaaaaggcaagagatacattaattatgtactcttggtacccaatatcgatcaaaacctacttagtgtaggtcaaatgattgaaaaggagcaccttttgcattttgaaggagcttcttgcacaatctttgataagtaagataaattctttcaaattaaaaaggtgaaaataagagaaaacagatgcttttctatataatggagatatgcaagcagtgtggcgatgcaagcacaaacagatgaatcatagctttggcatagaaagttctgtcacttcaacttccacgggctaaagatcctcaagtagaagaatatgatgcgagacctctcagcaattaaggagatcaacacagtctatgaaggatgcatgctcgggaaacaacattgacaaattttcccatccagcaaaacatggagagcgtaaaagccactggagatggtccatacacgtctgcgggacaatgcacacttcatcaaatgaccaaaacatgtacttcattcttttcattgacgactttatgagaatgacatagatttattttatctaacaaaaatcgcatcttcgatattttcaaaaaaatttaaaccccatgtcgaaaaacaaacgatcactagatcaagaaaattagaagtgatagaggcaaggaatacacttctaatgaattcaacaggttctgtgcagatgaagggatggagcaccaactcagttggatacgcaccagaacaaaatagcatatctgagaggaagaacatgactgatatggaggcaaaataaggccatgctcctagagaagagactcccaaaaagattttgggcagaggcagcaagcacttacttgctcagcagatgtccaaccaaaattgtgcagaataagactcttattgaagcttggagttgacataagctatcatcaaatcatctcaaagtctctagttgcgtatgctacagctacattctaaaagaaaaaagatgcaagcttgatgagaaaattgaaaagggaattttcttaggctataatactcaatcaaaaggttatgattctatagcttagaaacaaacaaacaaacttataattagtcgagacataaatttgatgaagatgctacatacaattaggggacactagaagttgaaagaaagagactcaatattcctctactgtcaagtgaaaaaattgatcaaaatgaagtctaactcagccaaccgtaggtatggcaattatactcgcgggctcgcgtacccgcgggtaccctcccctaataggggtacgggggtcaagttttgggggcgggtttaagtattcatacccgaatcggggtcggggtgggggtattgatacccaccccaaaactgcctcgatatgactctaatatataacataaatttaaataataactgttgttattaatttacttcacgctggacaatttttattaattacatagaagttgactttttatgttttaagaaaatacatgtgtttactacttatttgaattaattttttttactactacccattaatgtacacattatttaattaaatatcttcactcatcatcattaccacctctcttacatgtctttttatattcactattcatccatccacatcataaatcacattcactcacaatttactattacacatacatgactcttcatattcactctccatcataaattacattcacatattacactaacataagtaatatatacataagagagactcacgaagagttattcactgatataaaaaaaataaaagcaaactgcaaaagtaaaaaaagaaaaaactcttcacttttatagtctttcttctttttgaggttttttttccaaaattatatttatgggtacccaatgaatagcctcctcccactgggtaatccttgctttgtctcccacttttgtttaaacgggtataaggtgaatttaggatacgggtatgggggtggtgaacaattcccagcctcgccatgtctcgtttacgtccctatgggtatccgatgggaatctttcccccgtcgggtaatccccacctcgtcatcgctttaatttaaacgggtattagagtgtgtatgggggtgaatttagaaagcggttatgggggtggggagcaatgcccgccctcgccctgtcccgtttacatcccttgccaaccgcagtggaaccgacataagccttagaatccccatctgactcactagttaggcaaacaagacctctagtagaaatttacgagacttgcaacttagtacttatggagccaaaaaactttaaagcaactcaacaacaagaaatatggatgaattaagagataaagatgattgagaaaaataaaacttgggattgtagatcgtccactagacaaagacactataggagtcaagtagatctccaagacaaagctgaacgtagatggctcaatacaaaagtacaaagcaagattaattgtcaaaggatactcgcagcaatacggagtcgactacaacaaaaaatttgctccaatttcccgcctcgacacaataagggctttaatttctctaaccagaagaaattgaagatttttcaactcgatatgaagtcaacaaattttaatggttatcttgaagacaaaatctatgtggaacaacctcaagggttcatggtcttctcaaattgaaaatattttatatgacctaaagcaagctccgcgagcctggtacattagaattgactgctacttcactaaacaaaggttcaggaagagcaagaatgagtcgacacttttacatcaagactcaaggtacggaggaaacacttattgtctccttatatgttgatgatctcatctacataggcaatagtgagaagatgataaggaagtttaaagaagacatgatgaaaaatttcgagatcactgatctgggattaatgcactacttcctcggaatcaaaatgacaaaaaaaaattgggatcttcatctcacaaaagaagtatacaga

SEQ ID NO: 300531 - DNA, 3132 bp, Cannabis indica
gttatgataataattttttatgtacaacaaactcgttaaaagtaaataaaattattaaaaaataaacaattattgtaaaaaaaaattaaaagtacaacatacaaaccataattttgaaccaaattaatccatgaattaatttaatttgttttgatatttaatttgataatttagttggtactgttatactggtttggtttgaaaaccaatacgtgaagaccacttttcgttccattttcaaatatgacccagcaactttaatatatcgaaggaaaataaaagaaagggattttttttatttttacacttcaaaacagtttctttcgtatttttacgaaattctgtatagaaacctctattgcaactagcgctgtaacttaaattgcaacaaaaaatcgtacagaaacccctattgcaactagggctggaaccactttaaaaactcaaaccataaatttgaaaaaaaaaaaattaaaaaaatagtatatgggataatttccctaattaatgcaattaattacttaattattaaataaatcataagcataactttctcaacacaaaatactcaggcataaaacatgtaaaggaatctataaatatgaaaagaaaaagcaaaagataatacacgaccatgcctgttaagtcttacaagagcaaaatttccatcaatacaaattctactacttgtcaaacacaatcccgcaaaattgaacaaactggcttaaatgttcctaatttaatcgaaaagagaaattttgaatttcattatgctccaacgacctcggtgacctcaccctcgaccactgcttcatcagctggtctgtcaaccttcactccaacatcctctgagtaatcaccatgaacctacaccagaaatttaacaaatcaaaatcctaaaccccccaaaaaatgagcatgtcctgtatggtagcaatgaggattaaattagaaggggttaagaatggaatccaatgtatacctccatcagcttgccaagatcgaatttgggagctttaaggatcttcactttgcgaatgaaaacattctggagtgggtagatgctagatgttgccttctcaatctctctaccaatcatttcaggaataaacttgttgaccaaatccttaagatcacagtggcctggttgatcataatttccctcatctttctcctaatctgacaaagaggaatttcaaacagcaaacaaagattgttcatacccatttctaaatgtcatcatagcctactagatgaaagaatggagcttttaaaggttcaatcaattgaatcaaacctgacggatttggctggactgggcatagcaggtcctcttgacctggttggcacgtctctttgtgaaagcaatgcagaacatcctgaggaggtgtcagtggtcttgacatccacatgagcctcaattagtgtttgccacttgcgcacaagcgacctcagcttatccgtggtgaagtccattccctgtaagttttgcatgattatagttaaatacataaaacaatgatgaaaaatttatattgtaaacataattttgaaagaaaactaatgagtttcatgaagaactttacccagaagtttgtgagaacattcttcccttgaacatcttcagctctcaaacggattttcctgtaagcatgatcttcatccttttggagatcagccaaggaaacctcaaacactctatgtttaagaccttcagaggcaatctgtgagaacataaaaacacaaattaaatataaatgaagctatacagcatgcactcagtcaattatacaatacaaagaaagattacgcaaatcagcccaattagatatatgaaataacataaatgttgagcttataaaattataacaaaagaaacaaccactaactgatgtaaaataggtttttgttcaaaattttcgtcctaatgcccttaaacaccgaagttatcatcataataatacagatagctctcaccattggtagcgtgcataaatgaaaagatgaaaaaatgacttctttagtctagttaggaatcacattctccaccaaagcatccaataatgtaaaatagagccaaaaaaacagtaaaagaaaaaccctttttctattagtctaaaaactgcaaatccatgagcaactaaattaacccttgaagcgactatcccgaaaataataatatgagcaataataataaaaatcataaaagcttgaaatttcaggagataaaccttggttccctgagttctggtgacaagagttttgccaacttgtctttggttgaagagagaaggagctttgatgtcataccaatccttcttggcaaacggatcggctctgcattatattattgatataaaaacttgttagcacaataatttcttcagacactctcattatcaaaaatctaagtaacagtaccaatcttgtttctcaaacataacttctatgaatttttttagaaaaataaatagattaaaatcaaacagaaaagtgcgaattccacttacgccttcttcttccctcccttcttacccttggaaatcctcttgttcttcctgaaaatcaaatcacatgttaaaaaaagaaagagagagataaacagaaccccaatttcagaagaagattaatctccacaataacatccataaagaatatgttagagagaaagagatgagatgtacccgacggccatggttggagagaatagaagagtggagtagaggtgctagggttttttgagtttgagaagcggaggaagtgactgagtaatatgcatccaattacacaagtagactaatctacacatttacatgcataaacccctagggcaccttcctcgtgtttcttaaatctcttcctgggctttgtatacgggccactactttgtgggctcattctccaaagcccgttaaatttttcttttttccgtttcttttctttctcctacttaaaatcgtattattttttgagataattacatcaaatttttaattttttacttttatattgtggggtggaatttttttaaaatattatatttttgttcaaaaatactgcgtattatattaagttttcactgttgttctactattatttttagttgttttgttttgtgttccactgttgttt

SEQ ID NO: 300532 - DNA, 2381 bp, Cannabis indica
tcgaagtcaaacagcgacaaggaaaacctctgaaagactatattcagagatttatggtcgaggctaccaaagccacggaccttttagtcacaacataagaatggtaatttataattagttacaatttttttacttttagtcacaaatcgttagatgcatcgtgttattatgagtatttaaattgtctaagaagtttgtataatgtttgttcaaatttaaagtttttgtttttggttatgtataattgaggccattgtaagttgagtaatttctactagaaatccttgggttttaaaatagtgaatggtagtatgataagttttatgtgcttaaagaattattacattagatcttattattatattatacaatatcaggtttataacagtacaacaatcaaacctggagtagttttacaaaaatgatagaattataaccctgccttgcaaaatttacaggcagcattgcaatcaagggaggaaaaacaattaggaaaaaattaagaaaaaaaaatcacagcaaattttaagccttccgagacaagagtggctccaattgagggttactatcttcagaaactggcgatctgaagaaaccagactccaattgagcaatggaggagtcatcatctgctctttgttttagcaccctctgtagaaaactcggtttctcattcaatactggatcatctgtactcctaggtgtcccttttaagctctggacgtgctgaaggcaaacttggaccgcgtcatgaactctcacaaaataccactccttaccaatcatttctactacacccgatcttgatagagtgagcagaacatctcggttcggattggaaatagcaatctgcacagaaaacagactaatcatcttctgacaaatacaaagcagtttccacaaacattgcttagggaaaggagttttgacctgaatgtctcgcatcttgtattcctgatgcaagtctttcagagcttgaacagcactagaatctatatacgtaacagctgcattgaaacaaaacttagaacgctagtacatgaccattattggaaagtaagaagaatcagacaggttgttagcaaccaaaagtaagaatttgaaagaatgccaaagtttctgttagtgcctaaacgcctcttcttatacctcgcagagcttttttctaattctcccataagaattataattaaagcataggattagaaagacttacgtgacaactctaaaatcacaaagtaaattctttcaacttctggtccacgtctactacatttatcaacatcagtttcgtattcacgtagcctgacaaaattttgatgattcggatcaattttactgaaaaacaatcattgaaagaaaaccaacagagtggaggtcaacccagctgacgaaatatattacctgtcctttatgtaacttatgtttgcaaaataaataggtgaatcaatccgtacaattacaattccattgtaagtatacgcctcaggatattgttgggtgtttctataaacagtagtacctggaagacgccccaacacagctgcagcacacaccaaaaataagaaagtttgcaattatagtatgagggctcttttgaaaggaaaggaaactcgggacaagggcatttaacaccaaaaattagaaagttagcaattatagtatgagggctcttttgtagggaaaagaaactcgggacaagggcatttattaaatttacaaattattgaataacaaacagtatcagatggcaagtttctggaaaataaaaagagtatttactaaaaagaaggtaatttagaccagacaaatgataaggaacactggagtgatcgtgaagaaacaaaatgtataattatgaaattcaatccatcggattatctgcaaatgtacagcaataggatcaattgattcgctaaccaatatgggggtttgctgattcatggatgacaaaagcaagtgaaacaccaacctacaatgccagtacactaaaattagctttcaggagtcagaataaaaaacaaattacaataaacaattttatcagatgtcgccgaagagaaaaattacaataaacaaaacatcaggggaaaagacttcctgataggaatttcctatcatttcggtacacacaatagcaaagtagagaaaatagagctgatatattgatattggaatgaaaagaaaacaagttgctgggtattcgagagacccagctctctcccaagagctaatgctcactttagcaaaataattctctaccctattactctccttactcactcatatatatagcatcaatccctcccattacaattacccaattaccctctttatttataccctaaggcctaacaataccggccgcccgaaattcacct

SEQ ID NO: 300533 - DNA, 1801 bp, Cannabis indica
tgatctattaagttttgtaatatgattgaattatatgtattaaacttttaattttttttttataaatatgtagggattggattggatcagttacttttacgtgtcaattaacatccaatcgacacaagtgcggattttaaattttccaatctaatccgatccaatctgcactttgtggattggatcgactattttatgaacacccctagtcttgatggttcttggaccgttcttggttgttcttgaatttgaactgcttttgtcttcaagtttctttggcattgtatcttcagctcgtcgcaccaaattggtagacttttctaatatatccgacaataatatatgtatacatataaatacacaataaatataaaatatttttgtcaattaaatatagcaaaaattaaattaacaattattaaatgttagatttttatgttgtatgtcctgaaacaattttgaagtttaaaactaaagcctaaattttgaaatttaatgccccatgagattttgtttagcaagttggtgagcttgagggttattatgttgattgtcccatgattgtttaacattgctgtgacatgttgggctctttggaaaactagagatgaattggtttggtctgataagcaatcaacaacagtgagtgtctcttttctagttcaaacaaccctcgcaaattggtctcaagctcaggatatgatattggttcccaccccaacttttttaacagaggttgatggcctagataggtggcaaaagccgctgctaccaaggtaaaaataaacatagatgctgcaatttttgacaacaaaggaacttttagtgtgcgtggcaagagatgcaacaggggagttggtggaggcaattacctgctgtcgagctgggattgtgcaacccgaattggctgaagctatgggagttagagaggctcttagctaggtaaaaaagaaagcatggcgtggaacaattattgaaactgattgtctttccgttgttcaagcaattcagagtagtcttcctttattatcttattttgggagcattatttctgattgtaaaatgttattagaacaaatgtgtgatgtttttctattaattttattagacggtcagctaatagtgttgctcactcgttcactcgagcttcttatttttttgttgatcgtactcttaggagcaatgatgtttctactgagttgcttcatgtaattataaatgattgcaatcaataaagttgatgactttcctttaaaaaaaataaataatattttgatggttagattttttagatttagctgaaaataataaaaatataaaaataaaaatgagaatgtaaatattttgaatcgaatttaaaatgaataaacaaaattaattaattaaattataaagttttttcttattaaaaatagtttcattgtatattatgtcacacacaaccaaactaataatctattgatatttattatttataatccattttattttatttaaataaaaatctaataatacatttattttttattttgaatcccaaaataatataggcctaaatacaccgatacgtaaagcgactctgacaaccaaataaaataatagaataaaaattaaatctattcaactatgttttattttattacctctaagcaaaccataccttaaattattagttgttaattttgtacggccaatgtggttagttttggttttgtaaggccaatatggctattttagttttgtaagactagtatggctagtttttggttttgtaaggccagtatggctagttttaattttg

SEQ ID NO: 300534 - DNA, 1339 bp, Cannabis indica
ggtctagaagaatctcatattcactataccatttgttatagttggaagatcactgcttctgctagtcaatataatgaatcaatcttttaaagagatagttgaacatatatatacgttgtctactctcacatgataagtatgatagaaactaagataatgtttcataaaagtatgcaattaatccatattaatagcatgtttatctattaaaatttatacttaatttaaatcgaggatatccttaaaaattaatgataattctgcaacatcagttcacttaattgatattttgcctttgaatatgtaattgtatgaacacttctcaatattaatgttcaatgtgagaaccattttagagcaatatgaaggtttggtgtgcaataaataaacatcttttcctaatttgattaatgaatacttagttaattagtatacttgcaatgattattttcaagcacatagcaaaccatatttatagaagcagagcttaattgatcagtacaaagatagaaaaagcttcaactagagcaccaatttttttaggtaaattaagtcattacaactaaaaaaagaaaaggagagcgtacattattaattaacaaagcatttgggtttaattttctcattttccagggacaaagtttgtggcataggcccaagcattgttggttactggatcagcaagatgatcaaagaggttctcaactggacctttgccagtaacaatggcctgaacaaagaacccaaacattgaaaacatagccaaccttccattcttgagttccttaaccttcaactcagcaaaagcatctgggtcatcagcaaggcccaatgggtcaaaagctccaccagggtagattgggtctaagccctcaccaagtgggcctccaccaactctgtaaccctcaacaaagcccattagaacaacttgggtagcccaaatggctaagatgctctgagcatggacaaggttggggttgccaaggtaatcgagcccaccttctgagaagatctgtgaaccggccttgaaccacactgcctcaccaaacttgacaccgttcttggatagaatctctgggaaaacacagccaagtgccccaagcatagcccatctactgtggatgacctcaagttcacggtttctagcgaatgtttctgggtcagctgataatccagctgtgtcccatccatagtcacctggaaattcaccattcaggtatgatggaatttgtctgagaatgggcccaagtactttggacgatctgggccatacctgttcaaagtgtatgatgtagtaattagagttgaaaaaagatgtaacgataattctatttatttt

SEQ ID NO: 300535 - DNA, 2748 bp, Cannabis indica
  modified_base (39)..(39): a, c, t, g, unknown or other
catgcacactcaccgtgcaggaattcagaaaggagctanatgaccatcactcttcaatgatggcccttgcatggatgccgacgtaggggtaaggaaaaaaactaggtttttaaaaagaatactttatgttgtaagcttttatacaaaaaaaaaaaaaatgtacgttgcaaagcaacaacgcatatgtaaggcatattaatgaataaaaaatgttttttccgttcaaattgtgtcaaataatttgctaaaaaattagctttttaaagttaatttttattttagttcaacatgcgtgtaaaatgatcctcttaaaaaaatacataggcaaaggatccatatacttggttaattgcaagtgaccaagagagcataagtctactcgatcacttggggagcacccatgcacaacattgaacaaggacaaatatacttaaaacaaaaatcaaaagctttgaaagcaagaaatagatagctaaaaaatttaaagctttgaaagtaagaaatcgatagctaagtatgtgcgaatggcattcttcaaggtgaacataaaatgcataagtctaggattaaaggctacccagccagctacatgttagaaaaattgaaagaagataaagccacgattaaagactacctggtcagtcactagtttgaaagtgaaaggccttaagtccatacaagaacaaagccaaaaaagtgcaaaataaaagcacgaaaaaaatactaaaactaaagccattaaatgttgtcaaatgcagatgagtctagagtagataggtcctaggcggcagccttaatgtcaaaagtctccaagataggatcagtctggccaatggcctgcactgcagatacctcactgaaccctggccagcatgtgcctccacagaaagttggccagcctgcccaacatggttggcatgtacctcagcagaagcctagctaggctagctggtagacacttttggagcactcttcttggctacactggctgtatacagctctttgccccgagcaatcatgcccacacgatcaagagactccacataagagaagttgccctcagtattatggatgtaaaactcataaaatgtctacatggccaagtcacgacactcgaccatgaagtcaacctgaccctgtaaggcagaatccaatgtcttctgcttttccttggaagtagcttctgttgcattcacctcgttcctcagcttggaaacctctgcggtcataacagtcacctcctgattgcaaacaccaagcagctaacccacactgtcatgctggtcctgtagctccctcaccttcttatccgcctcctctaaatttgtatccacctcgtcaagctctttgtccttcgtagcaagttaggcatccttgtcttcaagtcttttacctgaaggctacagttgtgcctctaactcaggcacagacatggccaagttttatgaatctccgagacaaagaaagaactaaggttagtaaaacctgcacaaagtagctgtacaaagtagttgcacaacacatgggtaatattatgcaccgggcaagtctaaaagatcttaccaaggcaaaatctctcaaaacattggatgtcaggcagtccaaggaatcaccctccgattcgggaagatggtcaccggcaacaagattacacctgtcaatgtagttgtgggtaacttctttttctttgttcattgtaccagaagaagtttccagaccttgcctttggtagcctttgttgggcgcctttcgaggagaatttgatctcagaaacggataggctgattggccagaggtgagcctgaaagaggtggaggcagaggggtccgagtcacgtttagggtagcctctatcctagcaaccttattttgagcacgcctgccagagcggctgctccatgttcgcttcatcaagtccttgatcctggaagtcatgtctgcaaaagaaaaatagcaaggtcaaaatgcaagtaataaatacaaaatgcaagtgaaggtaaaagaattactaccatcagtatcctcaagataatctaaccaaggagtatcacccgaaggcccttcgtcctcaaacgaagactcactgtccgagccacctcggccaaggaggcctcttcatcatactttctcctctccttctcagctgtaggcctttttcctctactcttctcatttccaacaggagtattacctaggtcctcagggggattggctagaatagcaacaccatcacccaaagggtacatgccatatttcctaaagttctcctcacaggccaatgtgtagatgttgcgccaataagttaggagagataagatattattggccttataccttagtttcaatgtagggattggcggactataggttgagacccaatggaagaattggtgaacactatttacgtgatatgtcataaagtaactattggtgtagcctccattcttcaacatgggtgtgtcattagttccgcccaaccactgatagccctgctggctaaagtaaaagtatccagtcatgttctggcctagattggatttcagctcaaagtaatacttcacctcgaaaggtaaagattgcggccaacctagctcagcatataggatgaagagcactggaaggtactttatccctttcagtgtaatatgagtcaggcacaacttcaagaagtttgttatgtccctaaagtatgggtgcaagggaagtaccgctccttgctcaatgtaacgtgcgtgctaagatggcacgt

SEQ ID NO: 300536 - DNA, 2776 bp, Cannabis indica
ctgggcctatactcaagcatatagtatttcttcgaatcagcagcttggccttccctttcactttctttcgttagatagtttttcatttttcaaaccatttaattattttatattaaaataaagctttttcggatactatttaccttaccttaccttacccaaagaaacgaacaaagatattcttggacttgacacttcatctttttttttttttttggaataaaattccaaatcatacatacaaaaaacaggtacgaaaaaacgtttagattatacctggcttcacaaattagatagaaccataacttatagatcactttagacaaattatatttttcaaaatgcttggtaccatggtaatctagctataaatattttctcctactcttctgtcagctttccatatatctagtcagtgcaagattgactattttgatgtagtactctttagataaagccattttatcttatcagtgtcaaacacgctaaagacggccttaaataaatgtgacatcatacacgatcaagacagaacacaaggttatgactttacctataggcttcagcaagtactttctctatgtgagttacattccttatcccaaatgcaatagtgtaaccatccattgaagcattttcaaagctcaaggcctctgcatttccctccacccatataagtgattggtgttctccaagacctatatttacgcacacaatttcatttataaacaaaataaatttctgtttacagacatattggaatttactcattcaaattctttagcttacctttctccaaggctcgttttttaccaacatcaagcatgttagggttgatatcacaaacataaatttgcgtttcttctcctaaaccatcttcgtgaacatcttgcaaagctctacgtctagtgctgtttattgtttctagaattctgaaagcaacatcccctggaaatgaaaacaaaaagcgcaaaactataagaaaatagggttcagtccaaccaataaattttaaaataaagatgatcgttaaaaccaaagcaaataatttcaacttctccatcaggatgagcagctatgttcaacttctccaaattcaaaatgaacaattttaagataataactattatggcttaagattaagagcattgcagcgtaccaaacagatgaggttctcatttctctttgtatttttcttatttccatttatcaatgacagttctcatttcttataattaaaaacaatattgttaaaacagcaagttctttctgttaacatcaaaattgaacacttatttatttagcagttgatcagttgattccactatctacaataacctattcgtttgcttcaagtaatcttaataaattgaccattttacgcatctaagtcttttccctaaaaaattaaagaccacaaagatcatcatcagatttgtcttcaaagattctcttaaacctccggttgtttctactctttacatatcaaacggacaatgcatatagttacattatatgctgacctgttccaccagcaacgtcaagatgtttcataccaggaaatgggttcaattcagaaaccaatctgaaaatcaggcacatcataggcaacaatctaaatgagacataagattcaacgtaatctatatatatatatacataattttgtatgtatgtaattaacagaaacttaactatctaactaacctgtccttccataatctatgtaatccagcagtcatcacatcattcattagatcatagctggaagcaacattgctgaagacattacccaccaattgactcttttcatcttcccttacttctttaaaccctgcaacacaatttgttcaaacagtttcatgagtagaccagaaaaagaaaaactaatcactcatccaatcctacttgatccaccggactctgcattgtcctcatttcatattatgtatgaaaataagggaactagagagttgacacaacagccttaaccaaccccaacaccaccacacccgtaaaaaacaacaaaaaaatagagagacccaccaaagcttgtggcatgggaatggagaggtgaagcagaagaaagcaagggcaatagtctaggagcgacctttcttgttaatgttctcaaggccattactgtcaagaaaagggttcaactttttatgagaaagtgataataatctcaattttcgttgtttttttttttttttttttttctcaaagacaagtgataattcttgcgtaacaaaacggagagaaaggggcgagcggcggtgctagctcgacggcgattggaaatgggcagcctgcgctgagtttgtgcggtgcgagactgtttaggttttggggaaaagaggaaacgatgtgtcgttttttttttttcaatattattatgtactgtgtttctttctacaatgcacgtgaaagaaaagtgcgccgatgcatcgccaatgtttaggcatttaaaaaaaaatttagtctaactttttgaatggtagtataaattatagttatttaaaatatgttgtaaaattttaataaattttaaataatttataagcagtgtttaaatactttttttacatacggataataagacatggatcaaggccctaacattaaaattcgcacttacagtagaaagaacactatttttaccaaaaactacacgaatttagtgaaagttgtcttcataaaaaatataagaaattaaattatctttccatgatataaagattgtaaaaaataaattaaaactgagagagttatg

SEQ ID NO: 300537 - DNA, 2023 bp, Cannabis indica
gtatgtttcaaataaatataaaattagaggtaaatttgattaattagttaataaaaaaggcatttttcaactaacccccataaaaaatgaagtcggtcaaataaatatgtatattttataaagaataaaaagaaattgacggctaaagtacttgttcttttgatattaaagtatttgccttttaattttatttttgtgataatattttctttcgttagtatatttgtgcattttagtccctcgtcgttaaatactaacaaaaaatagttaaaagtattttattttttaaaaattattcactagtgtttagcgaattttaaaatatatttttcttcatatatatatatgctctcatcttaatgtttaatataaaattttaatatctgagtagtaacaaaatataaacaaaatgtattgttactgctaagtttacttacaaaagtacagtagttgaaaaaatttgagtattatcgctgcaaatttggttactttagacatatcattacaggtcggttttgtgtaagccaatctacaaatatgtgttaggtcagttaagcagaactgacctttcataatcgacttctcatgtcaaaattatagtatagtaaaatctacatttttatatattataatatggtcgaagaatattattattagctcatttttcttacgattgtttcactactccttatactcgtaataatattccttataataattatactaacaataatgtatttttctcttctctatttcgtagccacaaccacaaccacaagtaccaaaaccaaaaccagactatgtccccttctttattagtttttttcctagtaataatactactgatgttgctcctgctcctgctcctactcttgctcatggtgttagcattggcaatgttggtgccaatgctagtattcctattactagcggtgttggctctggctctagctttggctctggcattgactttgtttttggtattggtgacggtgatggtaaaggtagtgctactattgttagtgctaattctgcttctattggtgtcgtcgatgctgatagtggtgctgctaacgctactagtcctggagtagtcgtacaagagttgaacaacgatactattactcgaaggaactatagaaaacgcggtcttgatatagaggagcaggttgatgaggaagatcgtgatgctaatcgcacgaggtgctccaaccgtaactgcggtactcactctactcccatgtggcgcagaggtcctcttggccccaaggtttattttttattttagttattttattaatttatttagtatgttggatattaattaatgttcatatttacgttatgaagttgtgaatttgtccatcattaattattattattggattgttattcaattaatttgattaattatgtgctcttttcacgtgcatagcttaccaattatttattgtgtattaatatttcttctaagatatatatacatatataattactaattaatttttgtttattttttatttattttagactctgtgtaatgcttgtggaatcaagtttcggaagctagaagagagaaaagcagaaggtggtgacagtgattaattaagtatcagagcttcgataattttaattatggaataagaagagattagagcttaattatgaattcattataattgtgctcaaactatctttaattttaatttgttatggttaaagtacttttcttatttttattttatattttccaaactacaaataatttgacattgttgttgttgagtttgtcttaattgttaatgcaatgttgaaaatttttatttttatgattatgttttatcaaatttttagagaggggttaattttatttattaataaaatttcaatgttctataaatatttatttttgaaaaataaataaaaataagagggacttcaaccttttgctagggcccgtttggcaaaacttttggaaaagctaaaagctgctttttaaaaaaactgtgataaaaatgtgttt

SEQ ID NO: 300538 - DNA, 2702 bp, Cannabis indica
taaaataaggaaaaatattggggtgttacaagtccaggtcttgttcttcacaagggcaaaaaatttgatatccacggcacgtctccaatgaggaatttttaatgcaataagagcacaatcaggtgcaaaatcagcagccaagttgagaggtgatggagagaaggcatggaacacgcaaggtttgcaaatgccggctttagcctgagtaatcattgggtgggaggggcctgggggaagataggttgtagtaggggaagtggggggtgaagtttgtggtcgaggatgagatgagtgagaaggcagaggagataagggtaatggaatatgtaagggcatggtggattcggatgaagtggatttggaagaggaggttgtgatggttggggtgcgaggagaataaagggatgctgtatgtcgtgagtttggaacaggagaagatgaagcaggttcttcttgaagggagggtgagtaaccaaccacgacatctgtcacagcaccagtagcagaatcggacgttacactaggaagatatgggagccattgaggatattgagtggaggtggctggttgatctgtatgggcagatggataagtgaaaccactggcaaaaggaaactcatcttcattgaaagagacactacttacgacatagacacgacccagagagtggagacacagatagcctttgtgacttggactatatccaagaaagacgcatttggctgaccaaaactgcaatttgttagagttgtatggacagagatagggataacacgcacacccgaaggtcttgaggaacttatagttagtggagagactaaaaagtttctgcatatgacatttatattgtagaaccggtgtgggtaggtgattgattaggaaggtggctgtttggaaggcttcccaccagaagtgttgaggcatactagagtgtgctagaagtgttagaccagtctcgacaatgtgtcgatgtttacgctcagcttttccattttgttgatgagtgtgagggcaagggtttctgaatttaattcctatggacttgagctaaggctcaaactttcgatattctccaccccaatctgtttggacaattttgatagtggtgtttagttgtttttcaacttgagtttgaaagattttgaacgctggtaaggcctcatcttttgttttgagtggaaatatccatgtataacggctaaaatcatctatgaagtgtatgtagtagcgatagccatgtctagatatattgggggatggtctccatatatctgaatgaatgagttctagaggctgttttgattccctaaaggaatagggatatgctttgtgatgagctttaccaagttggcaactagagaaaaattgtaaagtagaaggtaaagattttttttcattaattagaacatgtttgagtacattaagggaaggatggcctagcctagaatgccacaatcttgactcattgacagacacttgaaaacaggactggacttactcaaaactagaacagacattggtattgttattggttgacgagacactggttggagtgtgacttgacgagcgtgctactggtgttgtgacttgatagagtctgttgctaaccttcccttgaagaagaaccttcttcgaatccatgtcctttaaaacacaagaatcagcataaaatttggcgtaagcattgttatctttggtgagctgggaaacacttaaaagattattagcaatatcaggcacacacagaatattgttaagtttgacagataactcttccttgatttcctctacctcggccgcgaccacgaccgcgaaagttggtggatctgccagaactggagggaacaaatggttttttgttgcgagcagtaaagtttgcagtgggattgggcaagatctgtgtttggagcagtgttggctctgaagaagatattgaacctctgatagagtaagttgatcagctcttgatgtaagattaatgaatacagagtcatactcagctctaagaccaccgagaatatagagtatgagatcgtcatcactgaaagtttgtccagcagagttgagactagctgctgtggccttcattttgaggatgtagtcgtgaatagacatggatcctttcttgagagactgaagttgatatctcaactggaggagacgtgctcgagattgagtggtaaacaggttctctaagagagaccaaagctcataggaaaaatgacaacgcaggacatgacctaacatagcctcagagatagagttgagcagccaacttaatattgcttggtcagttctaatccaaatagtgcataagggatttacctgcctctgtatttcttgattaggaacaggatgcatctcgacgaactgaggagggcatggtcttgtgccaaataggaaatcgtcgagatcgtgagcacacacaacaagaaccacctgtgaccgccagggtagttatctctgtcaaggcgaatggctataggagcaaggggctgatgcagaggcgccggtaacgctggtacagctgctggaatgggcgttgcgtggaccggagctggaggtggagcatcgacggccactggtctgtcgttgttgttgactgaagagtcaccttttgaagctgtagaagccattggctctgataccaagagaaaaagagtatagcagcaaaaacaaataaaagagagagaaattctttt

SEQ ID NO: 300539 - DNA, 1984 bp, Cannabis indica
atccatggaaatgtcctactcattgctccttcacactcttctgcagaaagacccttctaccctcaagaatcttgaggaggatgaggaagaatacacctaaagggtgctcgtaattgacaatgatacttatcttaaaaagtatatcccccatgacgatggtgaggaggctggtgataaattaactaaagacttggaaactaaacattctcctgaagtggtggtttctttagggaatgttatttagaacctccaagaccctactaaggagatgatctttcagtttcaacccaagatgcacctcaagtttagctccaggaccaatctaatgatcaaatttaggaaatccctttagagcaagctcaagatcaatcccaagaccagaccaaagagtaactttcatcttataggttttcttcttctttattactttaaacgagtatctgtggagacaatttaactatgccttaactgcgagactttgtgtaatagattagtagactgctgctttgatttatgtatgtttactttattttccatatgcttgttttttctttactttttctgctattgtttatttgctaggccacttgatatattgccttagattttctcaactctttaagttccaacagccaaaacttaatgcttttagactttcaaactttgaaatcacttgttgaatctttgaagtatgcatactataaattcttttatatttcaattttttcaaagtccttgtatatggcactttgcaaactttgatgagttaatcttacacggaggtattgtaagcttattcatggattgttataaaagtcgcagagcttgaatcccgtctatgtgtttcccatttaactgccctaagcagaatactgtagaaaatttgtgtcatttagatttagtgaggtaaggggaacaaggtttgaatagaatccaggcaaagttcctcatggggagacaaggctggtcatacattaacacttaggccatgcttcttgatctaaagtaacaaagctagcttaacactttagtaggtttcttccaaacttgtgataagagagcagctggaaatttgaaggacttccaggcatgcttgtttttctcaatccatagaacaaagtgactacaataggatttatgaaatgtttccttttcaggagaaaggctaaaaatgtatcggttgtgctttattgtgagaaccaagttggatgcaatagacttcaagcggttcctccttccaggaaggaaggtttaagacgtattgaaatccaagagatattctcacttcaagactaaaggtgaaaattaagttgaatatgcaacagactttaagcaattcccccttccaagaaggagggttgaagacatattgaaatttaagcaatatgtttgacaaatagtttgaaattttttaaattttataaataaatacaagtaagaaattgaatgcatataaagattgaatacaagaaataagtaaggcacttgtatgtttttgagggcacatagctaagtatactaccccacaagtaagccaagaagtttggacgtctctgaattcttggtcaattatttaaaacatagcttatgcaagagacaaaaatgtgaactcttgtgtaagtttattctattttcatttcattatacccaaaggtttacattaagagagataatttacaaagatttacataccacttagaggaatagttatatccaaatattccaaacttattggtaataacgatgcaattagtcagcattctaggcatgagggatctgtgacccataaattctctggagttacaattttccatttcccacattatgttgtatctcatagggtccttttcaactaggtcctaagaaccccactcccaattcttgcgaagctgggaagactctcctcaagatgagatctcaaatgctaaatgtacgactcttgactttagaattaaagtgcctgacaatcttgccttggtacatc

SEQ ID NO: 300540 - DNA, 5114 bp, Cannabis indica
ctttattctccagccatcatttccatctctgctttccattcattaagagagttggggctccaaccacattagccacaatcctgaccccgtgaataggagggttcgagtacataggtcgagcaatccttttcagttgacttttcactctgaataacataaacataaacttgttagcaagttcttgacataatgctaccactaaataaccaacaggttggctaaaaaagtatttggttcgactatagaaaggcaatggaaaatatgagaaattcactactgctaacaaaggaacaagcatacaggatgaatctatgacgacatgaatgatttctgatattgtgcgttttaacgttataactttgtactttagcgtttcgtagtttattttacttaatttaaatgtgttttgtagtttgaaaagacatcggaacaaagaaaaggaatggataattgagctaaaaaaatcaagtgcgaagtcagcgctccgtgttatgacaactttcttctgagttgcgacgctggctggtgttagcgtcgacgcaagccaaaattcagaaatggaaaacttgccttatttgtgtatttttcttgcaatttttttttttactaatttgggacatcttgtagatgagaaacagcccctaagcattatagagataacaaaagtgatcaaggattgaagagctaaagattcacagatatttcaagagtttttcttaatctcgtttgttcttccattgtaaacatgatagctttgtttatgatattttgctgggtttatactagtgtgataatgaactaatttccttttgtaggatttgcaattgaaactcgatatgtagattgaattaataatttgatcttaattctgaaactatattaagttgttcaacgtgaaggtttttgacgtcaacgatcgaagcagctttggttgaaagaaaggaacaaaaatagcaggttttttcatgctcaaggaagcatggaaaaataacttatttataaattgaaaaatggggacagagagtgggtggattgagatcctgggttagctagcgaaggagatgatatgttattttcataatttgtttgttgctttaggggcagattggcgagcgactattgatgttttccaacaacgattatagatgaaaacgttgagatgcttcggccggttatagatgaagaagcgaagaaagcagttatgcatctggataaatcactaggactagatggttttgagtccaaccttttatcaaaatttttggatgatcgtggggaatgatgtggcagctggtgtaggaggataacatgaaggttactaatatagtgccgattccgaaaaagaaacaattttctatggggaatctgagacctatttctttgtgcaatatactgtacaaaattgcttctaaggtactggctaatataatgaagtctattttgttacatcatgtttttcagaaatgcaggttatttttattctgggaaggttgataacaaataatgtgatgttatctattgaagggcttcattacttaaaaagaaagcagaaaggcaaggaaggatacataactcttaagctagatatgagcaaggcttatgactgtctagagtgggattacttgagagtgatgctttaaagatgggatttcatgaacgagattcaactagttcctcagtgtatttccaaggttgagtataaagttgttcatgggggaagagagatagggccgattagtccaataagagggataagacaaagagatcctttctccttacctttttattgtttgggtgaaaggtttttcgtctgtcatcaagacgtatgaggcgagagagtggattcatgggtgtaaggtggctcatgaagctccatcagtgccgcatatgtttttcggggatgataagttatctctattgcaaaactatcaatcaaagaggcttgagggttaaggagcttttacagaaatttgggctggcttcagggtaaaaaatatgagtacttcaatgagttatttttggtgataaattctccatgggatagcgtgcttagtttaaagctcaacatcaattttctcaatcatttactagacaaggttaatggatcgctctgcaataacgggtgctgataccacattcaatattatcatacttctatttacttaagtgataatacttcttactagttactactaattacacataacttgacagatgcgcttactagggagaaggcacacatatagctaggttgtcatatctagattttctgtgggtttttggatgaaattataattgaaggtatactacaaaagaaataacctttagggtagtataaaaatgttgtagtctacctttggttgaaaaagacactggggagatggaacaatcacacatgaagatttaggatcattattatcagagcatgagaaaattaaaataaaagttcaagaacttgccttgctgctgcatctgctgaactgcagacaacattcattgctccaatcctttctgaataaagacccaaatttttactgtaagactgagcgatcaaaacttccatgccacgtgcagcaaacagtctcaccgatgatgcatcagcatcaaggcttccactagcaaatccctttaaagaaaaataaaataataataaatatacagttaaataacgactcaacagaatgttctaaatgttacatccaaaataagaaaatggatactgcatgcattgcattgcaacacaaaatcttaaaagtagtagtgtaaatagagaatgaatctaaagcaaaatttcaaacattggtacctggtatgcaacatcgaaaaatggaataaggttcttttcttgaatgacatcagcaattttctcccactgttcgggtgttggatctatgccagttgggttgtgagcacagccatgaagcaatacaaaagacccttcaggtgctgcctgaagaaaattacacacatatcactaattagaaaagagtgaaacacactcggaaatacataaaaatacaaaggaacacataatcttatagatagcatctgcccaatttgacactacaaaataaaggaaggcattacgtgaactttacctctcctttttcaaaaacaaaagagaaagttatcaggggatgaaaagaaacacatctgcatagcatagatactacaatttacaaaattgaaacacataataaaacacaagtgagaatttacaagattaagccacagtgcactagattgaactacattggtataatagtactatgaaatgttgatcaagcagtccgtaaatgatcatcatgtttacctcaatgtcagcaatcatcccctcaaaatccaaaccaaactgtttttaggatcgtagtatctgtattcagaccagggtactctagcatcattaaaaatattcttgtgattgcctgcaatgaaaagtttgttagacataaaaatcaattttaaaggttctagatcaaaaacaaattcaagaaatttattttggcattacacaccccaggttggagctgatatcagaactttaagccccaggaaaatatctttcaataagagcagcggcgagacggagagaacctgttcctgaaagtccttgaacggttgcaacctgatataaagcagagaaaatatgacaaaaataatcaaggtaccatgaaaagaattaatttttcttgactcaaattcgaaattcaagcttactctttgttctttgattactgggttatctgctccaaacaataattctgccgttgccttattgaatgcggccaaaccttcaattggaaggtactatatacgtaaacaaatcacatttagtaactatcatcaagagggatagaattcaagtcaacaaacatttcgactacttggattttacctctttgttttctcccctctcaagcataagattctccgcctaaaaaacaacaacaaaaagaaaatgtgttttgtgtcaaaattattgtgagaactaaaactatcatcatcagatttgttaaaatggaaaaacaaaatcaaccttcttaacaacttcaagcacgtaaggatgaagctcctcagtcctataggccccaactccaaggttaagcttcaaatcattggtgtctgctttgaatgcttctgaaactccaaggattggatcagcaggggccatgggaactccctcaaaccgagatgtgttgacagcaacaaccatagatacacggccagaagactacccaaaaccaattcaaatgatttaattgaaagatctcaaaactctatttcgataattaagcatatatagttgtattagatatatacatgtatatgtatatgtacctttccatttgaaaaaatgttgattttctccttggtgaagctcaaacttgaactgtgtagcttcaaccttccctgtttgaaaagaaaaacacaaaagtttggatcggcaaattgcaattaaaaaaaaatactcaagagtgtttgtattgaatccaatttcataaattatctcagcaaacaaaacaaaaattagaaatcagtaagaaaattaatagaagaagctaaccctaaaagaatcctcagtagagaccgaagctgatggtgaagaagagagtgaagttatagagagcagtgaagaagccattctgaaatcgaaatggataataaatatgagttaatcaaaacagtttgtttgtgacattaattataaattgattaaaatttagatgaagagaaagaaaaccttttctttagatcaaatcagataaaaattaagctccttgtgttgtggtagcttagcagagtgagattgaggacgatgactacgatgtaataatgtaagtgaagagcatgtgaatgtgttttcgattcacggattgtaccaaaaatcgacatttgtccaacatttactggctaatggtgtttgtggacttctagcccactagattatatgatgggcttgaatattgggcccaattaaaagataaagcctttctaataggtaaacttacaaaaatactggaatttgggataagttttacaaaaataccgtcacacggaaatattttcaaaaataccgtgtttttataaaagaccagtagaacacaaaacagaac

SEQ ID NO: 300541 - DNA, 2858 bp, Cannabis indica
aatgaatcaaaaaccagaaatcaatcaaagaacaacacaagaattttatcctggttccagtcctagagatcaacatgatccctggccatactccagctgagaaacatcaccaattcttcattaatatgtggaataagagagtatcaatacaattacaagattcagagcaatcacagccctgtggtactcgaaacacaccagagaaaacagtcacagttttctctctaccaacccgagtacacctccttgttcttgaccctcttcaagaacagaactctcagcttagaaatcctaagcaactctcaaatcctctctcttattctcctacttttaaagtgaaaagactagacatatatataggcctaactcatacaaggaaataataccaactaactaactaacataacagaaagttagttaagttagttggtttaagtgagttggataataaattagtttagaggatcaacttccacagtaaaagtttataatttcttcattgttttttattaataatcagaaaattttaattgttaccaaagcactaaattagctataatcttttaaaagatgtcctacataattagtaacattatatgctatgcataataaaaattagaactatttatgtgctgaaaacaaaaagtggtgcatctctttctacggccggtcttgatatgagatgaacctaatacatacaatacaattgtttaaaacttttatatgtaaaaaaaatggcatttttaaaaattgtggactcgttaaatgggggcctaggcacaagtctcatgggtctactttggaattggcgtttttacaaatatatagattttgagcaaatgtttataattttactatcacacggaaattttaaaaaaaatgttgtctttttataaataactgtaaaacaacaaaattgaaaaattaaaaacgagaaggtaataactaaaaaataaccatggaacaacattgaaaacttaacacagtacacagtataaaaatacataatatttttttaaagaaaaattctaccttacagtaaaaaagaaaaaaaattacactgtgtggtgtaaataaaaacccctttagaatttgccatttttattgaagacatgagtgaataaatgataactaatttatttttaatgaataaattataacaaattgattgtttccattccaataaattaaaaaataattgggtttgacatctctttctcatagataaattgagttttgtattaaaagaaagagtattgttatttagtattattgatgcgtaacaccttttagacgtgttgttttgcgattagatagtaatactctctaaaaattattacattaaactatatgagactcaatacttaattgaattaatagtgatattaacatgtaagatagggcgaagcactaaagatgccttttatcatttctctaaactatgatatggattcttaattagacatgctctgtaactaattgtgtatatttttctcattatacctaaaaatttaatgttaattttgtagatgagagctctttcacaaatgggtatatggatacattgatagattggataccagcaatgaatgatatcagactaaaagatcttccaagcttcatacgcacaacaaatccaaatgaatttatggtaaaatacattataagattgattaaagcaacttccacaggaactgctcttatcttaaacacttttgactcattagagcacaatgtcttggaagctctttcttccatcttcacatgtccaatttacacaattggccctctccatcttcttgtcaaaaagactcaaccaaaaactttatcttccattgcctctaatctatggatagaagagtttgaatgcctccaatggttggattcaaaagactccaaatcagtggtttatgtcaactttggtagcattactgccatgtcctctgaacaacttattgagtttgcttggggtttggccaatagtaaaaaaccctttgtttggataataaggccggacctagtcgaaggcgactcggccgttttgccttccgagttcgtggaagaaacaagagagagaagtttgatttctaattggtgtccacaagaggaggttatgaaccaccccgcgattggtggtttcttaacacattgtggttggaactcgacgctggaaagcttgagcgcgggagttccaacaatttgttggccttttttcgccgagcaacaaactaattgtaagtttttgtgtgatgtttgggggagtggaatggaaattaatgccaatgttcaaagagatgatgtggaaaagcttgtgagagagttgatggatggggaaaaaggacatgaaatgagaaacaaagccatggagtggaagaaaaaggcacatgaagcaactgagcttggtgggtcttctttggtgaatttggataatatcatcaaagaggttttggtgccatcattgaaaccataataaaatttggtgtgtgtaagattctcttgtttggactaaagttgctatcttctttcataatttattttgatgaattaaaaataatctctccaaactatgattattgttttgttttgttggatgagctctaaactataaaaactattatcaatgtgtcctttcagttacattcggttaatttcttttaaaagtaatttacttatttggcattaagatacaagtataattatagtatgaatgtctactatttaactaacttaaaactagttcaaattgagtttattggagctaaacatactgaaaaaataggaattaaagctttatgattctcatatataaaaaaacaattgatacacttgtagctttatatcatttacagagtgtaatg

SEQ ID NO: 300542 - DNA, 921 bp, Cannabis indica
atatcatttcatattgcactccagataaaaaatatacaattcgtaattaatatacagattaaaggaaaatctatcacctgtgtgtttcatataaagaatatataaattaatcttttagtaaagaactatatattaattttttattcgtttatgtttctattttttattttctagtaataattgtgattataatttttttttgttgtgagtaatttgttgacctaaggactcatcaattagataggctggaaaaccaaagactcaatatcaaaaatgaaagcaaagcttaaagaacttgaagtaagagaaaaaagaatgttgtattacttgaatatgtttgggattactatgattttccaatctgttttcaaacttgaaaagagggtatttataggggctttattggccctagtttacaagataatactctcgtggtcccaaagggacaagtaagacatcgtacatctacggatgataggatgcagtaggtggtcttgcaccaagtagtgactgtcgggtgtcaggtggtctggtcatgcatgagtaatggttgcagcgtaccctttgtcagaatattaaggtatgtaggcgaggtgcctccactacttgtactggacatacattctcgcacaacaagttttaggtctcgtgggtgacatggtcgtacactgacatgtacttggtcgcgttctctccatgtccttttaattctacctccaatgatttcctttctaacacttagaaaaattcactaagtgttggttgcattatttagaggcgcaagtgttgagattttatgccctaaataaaactcatttttatacaatcttatttactacttaataaagatcagatttattttgtgtttcttgttggcagtattctatgttatttcgtggagcagttaaagctagtcttttt

SEQ ID NO: 300543 - DNA, 1936 bp, Cannabis indica
gaattataaaattactaaattatgtttatgaccacaaaaatataacattattgttcagagatgtactataatttatttataaaataatatttattaaaataaattaaaatactaaaatgccttgcaatgacacgtataatattcttcatcttctttagcgttgttcctataactttgttaggattaattatgattgaatatgcatgatatataattaagatttttattttagacattaatttctaaatttagaaaatttgaagtaatgttgccacgtgttaatagcctagtttgtattctacgatgttgttgtcgtttatttctagggtctagtcatagcttagtctgtaggtctttggtttggtcaatgattttctttaccagaaaaagaaaaagaaagattacatacacattattacttccacgtgtacttaacttaattgccacttttaatattcaattgaaggacaacaaaaaattagggatagggttaggggtgtaatatgaaaattagggcaaattaagtgcaccaagaattcattattattattcatacaaaaaaaaaacaattcattattattaattattttgagttggttaaaaatttacaagtctataactaaaaagggcatcaataaaaaaaaaagtaaaacaatatccctattttgatatatgtatcttccaaaataaaattaacatataaattgttataaaaacttataattaatactcctcgatctaattattaataatacaaaatcaaattaaagtgtatcgtttgtttattttcttaaaaaatatcttgtctatatggtcacatatatcctaattattctcaaggttcgaagattactatgaaaattgaccttttagtgataatttaaaatcttaataaatttatgttcaaagctacaatagtgagcaactatggtcttgtaccattgttgtcattggttttgacattaccgataatattattatttctaaaaattgtgagaattttcaaaaaataaaagaatttcgtgaggagaataatattggtatgtagatttgaagaaatattgatacttttaatattagggataggtttaggggtgtaatgaaaaccaagcatgaattaagctcaccaagaattgattaatacacaattaattattggatttttacaaaaaatattaaattatggacaaaagtttacaattttactacaacacagttttttgtaacacagaattttttacaaaattactgtgtctttttattaaacaacttaaaacaacagtaaaataacaaaacaaaacaattaacaacaatagtaaaacaactaaaaaataatcgtagaacaacaataaaaacttaatacagtacacctcactgtaaaagaaaaaaaaaattaaaaatttcattatatggtgcaaaaactccattaattatttaacttttcgattattttctttaattacaaatatcatgcctagctagatgtcatatgtgttcattcacgtttcaattatagcactcatgatttgttagttgaaaaatagagagaataggttttgacataaaaagcagctcaaagcttggacatgacaatatatagttgtaaggcttgattacaaagtttctacaacaaggacaccttaccaattggatattctttgacatcactaaccgaaaggaaagagaaagaaaaactaacaatattcactaatgactacaataaaatggcatgaaaagaaaaattggtataaatcaatacaatttagtggtagcgactaattagtaaccagtaaccaaaagcaatatcattttctaacacctcttctcaaactaactggtacgttaaaatttattacttttaattaaaacaaaacttgtgactaaaagtgaaaaagttgttactaattataaattattatttctatgttgtgattaa

SEQ ID NO: 300544 - DNA, 1256 bp, Cannabis indica
ttttcagttttcgatttcgtcggtttcggttccaacagtgttcggtgggtcggtttaaacgatttttgtcgattttctggattttatgctcacccctaaaatcaatagctgaatgtatacaatctcattcctatttatgtaacaatctgttttattctgtattaaaattgttatgcatttaaaatattttaatctaacatcttaattgaagtaggttacaataaaagttgtaaataatttttgagctgcttagaaaggttcttctatcttgtataattgtatagtactatttattgtaaagaaatcattattcttatatatttattattttttttctcatctttatgctgtaagggcaaatacggattttagttatttatctaagattggtaactgttaagtctgtaagtttagaagaagaatgggattgacctaagaacagtccacaaaattggtcccatttgggcttaaaatagaccacactgacttggattccaattttcccaagactccaaagtcttattgtaaattgtctacacaacaattttaatatatatttaaaattaatatttagatccaagtaggctacaaattgtgggcccaactcaataaattatattgattaaacatgagtgaatgaattaccaaataggagaaaattagaaagaagatattttagttttaattaatcagtatcaagtactctatataatttaaaaattagtataaaaactagttcaaatctaatcaacaaattacaagtacaaagtatattccaataaataataatggtactaagtatattctataaataataatgtaccattatatgcaaatttttagattatatgtatattatctaattacttttatcgaaaatataaggtatcattaattttatacaaatttgaaaataaatataaattttagaaaatttacatagcagacctttaaagggttattttggtattttctatatgttttggtatctaaaaaatttttttgatctaattattttttcatgatcgcataccttgtagctatttaagatcacttgtaaatttttaaaaaattctaaatagttacaatgccacaaaataatgtttaaacaattaattaccatgcgtataagaaaaaataatcaatcgtgcaataaaatatgtaacttttgttttatgcattgttaattacttaaaattttttaaaaattgatagttttaaatataatcataaaaaaaattagactaaaaagttct

SEQ ID NO: 300545 - DNA, 3392 bp, Cannabis indica
aaatatgaaaaaaaaaagtttcaagtttcaacaatacaataattagtgggcttaggttgggccttcacatattgaacctaaataaatataaaaattggtatttttataatatgcggtgcggtgcggtgcggtttgaaccatatattaacaatttaaaactacaaactatactgcaccgcgcggtttaggaaaaattcaaaccgcgaccacaaaaaatttcaaactgcattttttttatttttgcaatgtggtgcggtgcgggcaatttgagcagtttgatgaacacccccacttctaacaccttagaaacgctttagcattggtcgtggggtagtgcataacgagagagtatggtggtctaacttgcgttgtttaaaaggcatggttctctcgttaacgttagaaaagattggcaccctaatatccatgcaatcaacctttctctttttattactattagatgtgtttccaataacaacatccttgggctgaccatcctttctaaaagaatttttattaaaattaaaatttggcctatttcacttttttagctcatccacatataactcttgggcatggaaaaaatgagacaaggatctattttcattactaccaaaggaggcctcttgccacacaattaactagaaagcatcataattggacttacatggttatgagagcagcccagcccaaaagccttcttattaaacacagagtccaacaaaatagggctatcacttctaccgacgttacttccctcttcattacaaagttgaaggtgtctcttgtctaaagcgggaaaaggttcaggctcctttcccttatatagtttctggttaacaaaaccaacaccaaaaaaagcaaagctatctctcctctgatcagtagtcgacttcaccaccttgggaacctagattttccttgaaatcgcagccacattttgaattgtctgagcagtctttttcaaattgtctcaatcctgaggccacaacttgttgtgtagtcgattttgaaggtcgaaccatggccgccatagctatagtcgccggagctagagtaacctcaccaggataagtttcaactccatcaagcacctacctccttggcgtcgacgcgaacctcaccccaaaaacaagattgaaaatgggagaacgtatcgagccatggaccaaacaatgggaatggggataccctgtttgttagagatagtgtcggggtccctttgtgagcaatctcgttgttggtgaccaagtctcccacaacaatagcaaaattttcctaatttctcatatttaaattgaagccaaagcttgccaccatttggttttttaaggaaacaccctgagaacaagagattcaaagttaagaacacaaccttgactcgtagccacttggcccacgacactagtttttcctcatcaaaatctacttttagcacattattagtgagagatctgtggattaaagcattgttatgagaaaaaaaaaactctagagggagttgatggatttggattcagaatgtagtatcatcagcaacaagattctcatggttcaactcaagcttccaatgttgaaggatgagatgatctccattaatacaccaaggtttattctccaagacccattctctttcaacaactttttcgaaaccaaatttgaagcacaataaacaattagaatcatgggagaaacttgacacaaccacaagtctcttctaggctttagcagtaaaaaccttcacatctctcacaaaaataggcttttgggacaacacaatgccaaccagacaatatttagaaagtttagacactgtagttgcacaggggtccaattaaacaaaagtatcattaaaactcgcatacttactgctaagattcccttgaccaacattaactaaggccatgacaccccaaccaccaaccaacgacaccaagagaaacaataactaaactgaaccaaccacgtgcttccaccaccaaccacctaggactaactaccaattccctacagcaacaaataaagaaataaaaggccaagaaaagaaaaataagaggaaaaggatggaaaaaaaccaatgagaaaagttaactgagatggaaaaaagaacaccaaaaactagaaacaaaacatctaaagaaagacataagaaactagactcaaactatctcagtcacttaaccaaactacaagacacttatccagactagagagagagaatggtaaatgatcattctcaaaccattcttattattattattaatgtgagtaattaagtattctttataatttaatttaataattatatattattagacaccatagcaatatatctcgcgtctctataaagtttccgactaggcgggattaattggaatttgtgatatgaagtgtagtcaatattacaatagttggatctgatgttagttaattgaatcgagataatgaccaaagaataaaagtaaaaaccagagattcccttgtcaaatcccaagtcgactgaagagtgagacaaaattaggaaaaaactaaaaaagtgaaaaagaatacattactagaaagattctcgatcgaggaggttcatgggaatgagtggcatatctatctatttccttttttttcttataaaaattctatctgtttttcatattagccattgttcttcttcttttgaggggatagttattaattatagatgtgtaggtaagtcaaactaagaccaaataatgagggatacttttcaaagagtattctcaactctcgtacatatatatacagatatacagattttgtatgagattaaaaaaaaagttaactaattattcaatttatgtcaaaataaacatgtcccaaattatatatctttcatcttcccctgtatctccacaaaagagatgtatctttatagagatattggcggctaaaccacgtgaactttacagtttataacggataaccataaaaaccgaaattttggcggcataactacctaaaccctagtttcgttttgctttgtacacctccatctaaaaatcacagttaagtgtcacgatagactgtccacgtgtacacccttgtacacgtggtaaatttttagtggtccacgtaatattagttttaaaaaataagtataaatatttaaaaaaaattaaaaaattagaattttttttaaaaataatttatatatgagatattggcggctaaaccacctgaactttatagtttgtaacacttaaccacaaaaatcaaaattttggcggctaaactacctgaaccctggttgcgttttgctctgcacacttccgtccaaaaattatagttaagtgccactttggattgtccacatacacacttgtacacgtggcaattttttagtggtccacgtaatatta

SEQ ID NO: 300546 - DNA, 1823 bp, Cannabis indica
ttaatcaaataagttggacttttcttactagtttataccatgcaaactacgaagctatccgagaaactcacatccaaaattgatggtatggctagagattattggtggggttgtgaacaaggcaaccggggtatatatttaaaggcatgggatcatctgcatcttcccaaatcccagggtgggcttagcttttggaagtttatggaaatgaaccagacattattggctaaatgggggttggtccctccttaatgagaatcagtcattgtgttgtaaggtctaaagtgcaaagtacttgagaggcagttccttcttgaattgctcctttaaaaactcaaattcttgtttctggaagaacgtggtgaaatttaaagaaatccttaagaagggtgcttgcaagctgatttctgatgggaaagagacaaacatctgggttgatcgttaggtaattcatggcaaagatttctactcttataacttctcaacctgtggggttggagagggttgcagaccttctcttggacaatggggattgggatatccctatgcttcattctcttttcgaccaagatacaattcgtaacattttaaaaggagataaaccctatggtcagggtagggatagatgggtctggactaaagagtcgaatggattattctcaattaagtttgactacttgttcaagctttagatcgtgctcctttgtaatctgtttcccccgccttatggaatagactttggaactataaagtgttggagcgacacaagattcttttgtgaagtattctttctaatgctcttcctgtccatgctctcctagcgaacagaattctcattaaagaggtctcttgccctctttgtggggagggtgaggaaataatggaacacctttttctttattgtaacttgtgttccacttgtggcgatcctccccttgggggttatgccatttatggactccaatgcgcgaatttgagattgggtcaaatttcttggcagtctgaagtcgagaggggttgaagtagaaaaattatttctttatgcttcggttgtggtggatatgaataggaaggcccgtaatgataaggtacacaacaatactctgagtaacattaaacataatattgactctatcactttttgttacgcagattatgggtcttgtttgttctcctcgctaaaagctgctataactcatggttggtcccctcctccggaagactggatcaaaatcaattgtgatatgaaagttggttgcaaatccatgtacggagtgactttaaggatgacatgggttctattttgtgggtggcaactaacaagctaaacttctctgattcccttattggagaagttgtggcttgtcagttagccatggagaaggtcgtgcttttgaaacacccttttgtgttaattgagagtgactcggggacagttatcaaggcgctaaatggaacatgttccaattagagtattggtaactatgtgcaccattgtaataagctctctagattatttttaagttgtaattttagttcattcccaaagtttgtaactttacagcccataatgtggctaagtgggctttcaccaaaaatgtaactgacacgattgacctatcaattattccagagaacatattttgtaacgaccataaggtctaattttattttgggatattggcggctaaaccaccttaactttacggtttgtaacaactaaccacaaaaattgaaattttggcggctaaacaacctaaaccctggttccgttttgctttgcacacctccgtccaaaaatcacagttaagtgccacggtgga

SEQ ID NO: 300547 - DNA, 4105 bp, Cannabis indica
taccccctaacaacgcccgccgaccaacaccaccacaaaccctaacaaccgactactaagatcgggcacccgaaaattgagtttgaccaaaaactattcgacaaggtgttattagctgcttcaccaacacctgtggtggtaaagccaggagaagggtattggtggaatgagcctattgagggtatgaatttgtatgagcttaagaaaagagagaaatctcttctacaaatatatgatactcttactatagaaatcatgaagaggaggttgctcaaaacattactagctttatatattgttaagaatagtatgtttaaataatactattatataattataatgagctcattttcatatattatagtataataaaatggggattatgtgtatacatttaatccttttattatgaatatagagctcttaagttatgttatctatgtttgtagtgtgctacaactttaccatataataaaaagtttaatttatctacattcgttatgaaatactttttaataaataaataactataaatattaattttaaaaatattaatacttgtaagccttgttttgattattggatgattaattgctcgttaataatcatacacacgtgtaataaattatttgaattttaattttagaatcttaaataaaaaaatttgtaatgaaaattctaaaagtatacttaagtatacttaaaaataatattcacttaaaaaaatcaatgacaaagtgatgcccataataaatattagaaatattattttaacataaaatatcctaaatcttttttcaaaatttttactaattgttgacatatataattcttcatacttcaaacctaaaacttaaaattaaatagaaattaaacctaataaaatgatgactatattagttcaaaaagtgttttcacaacacaacaaaagatgtaggaattgagaaataatatatttgataaattcaagaatatttataaggggaatttttactgacttttttttttctttcttgctttttacaaattactttaaacttttatgaacaaaattgatactttgactcccaaattgatatgctaagtacatgcatatagttttggcaaacacattgaagaaggttttctcttaagtggtaagggatacacgaagtgtttttataccaaggagatttttttgaataattataccaaggagattaagtgctaacaatgtactatttgaagaggaagcataaaaagtaagtggtgttttatggctcttaaatttgacatgtgcaaatgttaaatgtgtgcataaatcgatccaattaattacaactgactacaaaatgttagatattcaattattagattagatattatttttgaatatctaattggattggatcagatgttgaatgtagtgtccaaaaatctattacatcaaatatctaatcaaattaatatgcattttcatttaatttgaatcactaattaaattttctagtgtggtacttaacatatatacactaagattttctattgttatgaaaactaagattataattttgcattttttttattgaatggatcatgttgaccttacttttagtcaacaacgttgagtcaattaaagtgataagaataatagataataatgaataataattatacgtcattaagaaaataagaacacggagatttatagaagttcgatctcgcgattatgataatagcctactacccttttacttgtattacatatgagaaaacaagcaagagaaatcttgatctctctcgaaagatcacaaataatttgatagcataagaactctcttagaataataatgtgtaaaacccactgaaataaaacaattaagaaataaaagaacttgattactatactcttttacaataatagtgtgtgaaaatcccactgaaataggtatttaattgataaatggaaaagaaaaatatctccaaagatttgcttcagcttcatttatcctggtcagtgcatgcgggctcgttgtaagatcgaagctggtcattctattcaccctatctagatgtttcataataatcttcaaatagattatttctaaataataagccattctagacgacataccgaggactgtactaaccgtctaggtattagaatattctccacgtgtcactcaaaagaatgttgtttcaccttgtgcagaaatttgaataacatttgctcctaagtccgcgtggaaactgcttcctcacacttgaacttattcagccactaggttggtcagatgtgtgacacatgttcagctctcaacttccattttgacttaaagtgacctacctgtaggatatgaagatactgttgtctcttcaattcttagacatttactactcttggcaactgaacctcgattgacgcactgacagttattgggtatcgcatgcctaacgattgcactctttaatgagtactaattctccttttgggggcgaaatccaaattttgaagttgtaattaccaagttaccccttcaaaatcctataaaagaaggatttaagcctcctttgtactcttttacatattttcaaattcaaaagctagagcagggaatctttttttctctctaaaactttcaagaatttctgttgaagccttgaagaacactaaagagatttttggaatctaggtcgaatcatcacctagaatcctaccaatagtaagtaagttttctaacttttatgcagtttcctacattttgttttactttatgaaatttggtttacgttgaattgttcttcaaaattagagattaggtatctaatttagggtccgaatgcatgtgtgtggcttgagattcttgattcttgataagtctgaactgttttactgaaaaatatttaaaaatagttgctcagggtttttggaaattcccgagttcttcccgtgttcttgaacctttgattctgggatttttgaattaggataaaatttccttccttggatatttagatctgtttgatcatagtatctgtgatgtttttctttgaaaaatgcattccttttgtccagtccttacgtctctctcgttccgtttatagatgaactcgggtgatttctggagagctaagcactggttagacgaagatatgcttcaactacttcacgaagaccagcccaggctccgtgcaatctcattaacattatgtgagagttcatcaacctcaagttttaatgagtgggaggttatttttggtcccttctttattttttaattcaaattacatcttgttgctcttttaactcaactattatgttttagattaaccttaagctcgggtatttgtactcctgtactaagtccttagctatccagtctcttacgaataaatctgaattagagaaggtcctaggccaagtaaaaggtgaagagaccgcccaaggtgaattcaataagaagttgcacgaggtaaataaaaaaggttgaagagttacagaagcaagtggttgacatgcctcaagttgacaaacttgaggccgatctggacgttgagttcaagcatgctaatagactgctcgaagagaggaacacacttcagatgcttcttcaaaacttcaatcagcaagttaaatacttaactgatgaggtggacgaagggaaaaacaccatagttgccaaggaggaagctttgaacaaggagattgaggctcgtgctaaagactttgcaacttactcagcggtcagcatggagatcttttatgagttttggaaggctaatcccaaagataactatgattacatgaagccagaggttcgtgatatcttgttcgaaggatgccagtagatgaaatctaaagaagaagctaaagcagctgaaacagaaaagcaatttggtcaatccgttgatggagtttctagtggaaacactgaacaacctataacaattggatcttgatttctccattgccgatcaagatggctcttcagcctcataagatctaaacctggccactccaatagattgacctcttttccatatcaagatcccctttttatcttcttttttttttatttatttatgttcaacctttaggccacaaccttaagacatagccatccaa

SEQ ID NO: 300548 - DNA, 3667 bp, Cannabis indica
accatatagctccaataaaccaaaggtagattagatttgaaagcaagagctcgagcagtgttgagaatatgctggtgttttcgttcaacgacaacattttgctgttgtgtgccaacacatgaattgtagtgaaggactccttttgtggcataaaatgcagacatatttaattcttttgcattgtcacttcttacggcttttatgttgattttgaattgattaagaatgaaagagaaaaaattttgtatagtcgagggagcatcagcttttgattttaaagatataacccagtgtgccttgaatggtcatcaactatggttagaaagtatttgtatccttcaatagaaggtattgaatatggaccccaaatgtccatatgaataagatcaaatattgcatcagtcatattgttattagatggaaatagaagttttttattttgcaatatgacaagtaggacaactaaatggtgttgatagttcagaaaaatgtaaacttttattgattatattagtaacaattacagatggatgtccaaggcgtgtatgccattgaagtttatctagatgaatgttacaagtaataattggtgagactttattggggatagtctgctgctgtagatagtaaagattcccaatgcgtttagctgtcccaatcttcgatgtttgagaatggtcctgaatgtaataatagttagctgtgaaatgtatagaatattgattgctatgttgtagtaatgcatgaacagataacaagttgtaatgaaattgtggcacaaacaagacattgtataaagtaatgcagctgttaatattgacagtgccaatatgttcaatttgaacttttgtgccattagggagagtgacatatttgtttatggtgttatgagtaatggcataaaaacaagatttgttacaacaaacatgatgtgttgtcccactatctatcatccaagaaaagggggaagtaatacctgaaaaatggttcatgacagcattatcattcgatgttgaagcatttgttgaaggttgaagttgttgtgtcaacatggagatgagttgttgacattgtgctgaggcgagttgagagggattgatatcaagtatgttggtagaaacttgagatgtttgggggaaagttttgcttgtggagccaggatcgggtttgcgagtggtagtgttatcattggattttcgatttccataaccaggtggaaatcctatgagaaagtagcatttatctttgtaatgacctggtttttgacaattagtgcaatggggacgaggccttttatttttagaggctgcattagcagtaggtgtggaatcgggtaaggtagattgggtgttggttgcagcagcaacaggtagaagggttctttggcgttcttgatgaatgaccatggaaaaaactttgttaagagagggacaagggtcaagaagaagaatctgatcacagatttcatgataaaattcattgagaccctttaaaaattgaagaacctgatcatgattcaggtggtcttgggtctgaattgcagcagcataagtacaaggtattcttggccttaattgattaatttcatcccacatagcagtaagtttagtgaagtaggcactgactaaatcatctccttgatgaagataggtcaaggtttcattcaattcaaaaattcttggaccatttccttgattgaaccgattgttcaatacaatccacatttcggatgcagtctcaaggtacataatgctacttaacccaagaattgaacaaattatcattggggggaggttgagggatagtaccttcaagaaatggagtcttgtttcgtgctccaattgagagtttaaagtcacgtttccaaggttggaaattacgatttgtgaggacaagggttaccaaagccatgccaggatgatcaaagttacttaagtagtatggagatcgaatgtcttcatacggaggtctgtccaccgaagttgatcgaggaacaggggcagagtgctctattcttggtggattgtcagcagaatttgttgaaggtggtggtggaggagccattggagcatcaaccactagaggaacagcagtggtagtagcagaacttgtggtcttgttctaaccattgttgaagaagaagaaaggactgaagaacagtcgagaagaagaagaaatcttgaagcttcaatttgaattcttcgagctttgatcgttttctactgataccatgttagtttggtaaaaacagagagaaaatcttattaaatggaataatctgaattggtacaaagagttgagtctatttatagtacaaagccattataactaatcctaactaactgttaactgaaataacggaaaaaactaacttaacacatgtagagttaaaataatatttgctactactagaggccaaactagatatcctctttaatttattataacttattacaaaaagaagataggcaaacaggggtgtcctatttgatcgattatagcaagtgggatagtactgctttgacgactttcttggatgcttgatgtatatagctttaagggttgaaaatgtcacttgagtgtaataaattctaaatgttggggagtgcttcttaaaaaatcttatattggtttgaaaagcttcccgaccagttctcatttttacctgtctttaagctctttttgtcttcttccacacagatatacttctctgtcctttcatagaagacactgagatcatccaactctctctttagcatgtttaccaaagcttgctttcggggcgtactcctataattatggtgatcttaagttcgtctttagataaattccctacttcggtaacttcaatgttgaagcactgaatgtaactttacaaattctcttgttctccttgcttcacattggtgatacttgtgatgggcaggatttggatctccgcatctagctctttcattcttttgtctattctttcggaggtaagtgggaggaaccttggtcttttttatggtttgcacgggggctacatgaggtatggtgcttcactcgtccctttgctcaccaacgttgaaggatgaggccttatactttcgtctaccttggaagggagtcgtaggtaggtaaggtgcctcctagcatggcatatttcagatgaagtttctccttaagattcgggggtgttccctttggtttggatttacaagagagtgccatcatgggctctcccacgtaactcgttgggcattttagtgactggtagtggtaccaatcttgaggggttccatttgtcgagagtacggaattttcctcatcaacacttagtttttcccaacacataaatatggaaagaaaataataatagtgataaattttttttgtaagcaataatggtaatttttgttaattcatcatgataattgtaatttgattactcacaatattcttaaatgggatttataaagaaataaaaggacttaagagaagagataccactaggttgacattttgcgtttgctggttcaagttcaacatttaacaaaaaaaaatagaaaagaaaaataataaatagtgttatgaatgtgtatatattaccttaataagattttatcattctcaaaaaaaaataaaataaataaataagatttcatcattgttcaaacaaaaaaaa

SEQ ID NO: 300549 - DNA, 1380 bp, Cannabis indica
aattgcagacattaatatttttggtgtcgaacctataaaaataataaatgagttgttggtgggtttaaattagtgtcaacttaaactcctctttaaatttataagagtgatttaggccaaatttagagattggtgagatgtaattgcataaagggaaagggtttgacattatttatattttgttagtattttaaattaagtggtactagtagtggctacatttaaacaaaatttaaattattaaaaaataaaatttaaaagcttgtaaccataaattttacataaaaagaaaaaaagagaggaaattggttggagagttggtttttattattaactaaaatttgctcaactagttgtccaagacctattctggttgctgaattgaattggtccaattatatcttcaaccaacaaaacctttgaaaaatctcactctaatactgtctttacattgttaaataataacaccattaagaaatgaaaatgaaacatcagtacgtaatccatatttttgtgaggggattttgaattgaggaaagttaaaaaaaaaaggtgtcatctttaatggtgcatcatcttactaaattagtgtacaatttttaaattattctactttaaaaatacactaaattaaattggcgcctaaagtattttactgtattaataatattaaattttgaatctataacataattttttatttttattttaacccttctttctttttttttaaaaaaaaataaaaaataaaaatttctttaaaccaattgttactggagtattattaaaatgtgaataagtattcgtccaaactgaaattcctaaaaaagacgtaatagacttggctagtgcatagactacatcattcgtaaaacgcaaaatgacacaacaaaaactaccatcgaccgcagctaataaataagaaacatcatcaataataaaattaaacacaacatttttgtctaaagcattagtccaagaaatagcaaccgatgaattacactccaccttatgcactatacttcagcctaaccgcccattccagccccaacctctcaccatcagctcaaccccatcaacagagaaaattccccaacacacccattgcccacgacgcacaaaccaccccaaaaccatcccgaattacttcacctaggccaacgaaactcatttcaggtagggatgtcaattatacctgtgggttcgggtacccacggatacctgctcctaatggggcggggcgggggtcgacttttgggggcggaagcaggtatgggtttaaatgttcatacccgaatcggaaacggggctagggcgggggaatagattcctgccccgaactcgtcccaatatgatatatgtatatatttaagttttaaa

SEQ ID NO: 300550 - DNA, 5487 bp, Cannabis indica
ttagtgtcacgctttgataccaaatgaaaaaccgattttttgcaaataccaataataattacaaaaatatactaaatataaaactgtatacgtctgcaacagtctagtaattctgttacggcagaaaccaattttacagagacaaaccagaacaggcagaatataaaaataattgcaaaaaatttaatcacttgacacaaaagatttgtatgctacttgttagtgcagcgtgatcgtcaactggtgcagctgattccaattcaaccacgctcggacagggatactttgtattggtccaatgatttatcgggcttgtacacggttaagagcgcttacaacctcctacaagagttaaatggtgaagttgttattgatgattcggttgtggatcgtttttgggggagattatggcaattaaaaatccctctgaagatgaagaacctgttatggagagctgccaaatgttgtctcccaactatgtctcagctgcaattgaagcgtgtggaggttgactttttatgtcttgtgtgtttgttagaagctaaaaccatttcccatgcgcttctcacttgctctgctgctatcctttgttggaaccgggtgggtattgggacaataatgcagcaagatatgtcctttttggattggtgtattaggcagtttctggtgctggatgtggagcgaaccagcttgcttgtggctctatgctgggccattggaatgcaagaaatgacaaggtatggcaaaacaagtcagtcggagcggatagtatcgtctcatcagcaaagaactatcttaattaatggcatattgctaaaaaatcaggtaacgatttattgttcattgggtatattccgggggacggggctgagcaatgggtcgctccaagtgcaaatagtattgagattaatgtcaatgcaactgtatttaatgagacccacaactatggtgttggtgttgtagcccgggactcaaatagtttattggtggaaggttgtaccaaattatttcaaggttcgatggactctatggtggctgaagcaattgggttcggaaagccttgagttggattaaagatcaccggtggccacatgtgatcttggaaactgactgtctctcggtgattcaagccattcgtagtactattgttatgattttcatgtttggtaaagtggttaatgattgtaaggctttattatgtatttagaaaaatgtttctatttattttgtaaagcgatcaactaatatggtggctcattcatttattaaagcctctatattacatcctgattgtcattttagtttggacaatatttctactgggttgttaccttgtttggtaactgagatcattgctaataaaatgatgaattttctctagaagaaaaaaacaagataatgaatttcattcaatattctcattcactaatcccataaataaacacattagtagggattataaggatatttaaaagtaattatttttgagtaactttcttatgaagtaatacaatcaaaggagtggtagtttctttataaagataatgattttgccttaaaaagtaatgtttcgactaatgattcctacaaagagaatagaaagtattgctaaaatggatcttcttcttcaaacatattcgagttacacaaaacagttttatgcggcaagtagttttgaagtaaataataaaataactttgtagtaacaaagcaaggtggttcaaacatcaacatctgtaattaattttgtaacgtgcttttcggcgtacaatcaagctaatgtgtttttatacgaatgaatcatcaataggcaagtggggtttgtacattttgtgctttcatgccaatatttatgataaaaaatgtggtcttcaacgtatttcgtaagcaaaaattatgaaccagcatattgtctttgcctagttatacttcaacttaaattaatctaaaataaatttacagttgattaattatgttatattttaagtagaatatattaggaggatatacaacatagtgcatacatatatgagtcaaaaagaaagttattattattgatttagttatgcttaagataaagcatagaaggactaaatccattaattttaactcatagtttcaatcacaaactcgttcatgatctcttctacaatggcgtctccaatttcccaacagatttctttattttccgagtcaaaaccattccactcttgagctgtgtcaaccaaatccaaacacaataagtaagtaatattgtttgtatcatctacactactttgtttactccaaaccttcattttctcccacagaagctcccctaactcctctggccccaacactacccctttagtaccataatccactttctccttttcctttgcgtgagtttctacaatctctctcacacagtcaaacaaaagctgctttgtcttgcttaaaactctcttggatttgagaaactgcgtcgatggtttcgtcttcagattgagaagccccttatttggatcagagattttagtactgaactttcttggcttctctgttatttcactttccataaggaggctgcttatttttgttttagtctctagcgattgtcttgttattatgaggttgattctctctgcttatttgaaacaacaaaacccaattacataacaagttcctttctttttcttttcatagaaacaaaatcaaaggaaaataaggcatatttttaccttgcgatagaggagtttcttcttttactattgaaactgaactgcgtttattgcttccaatgagttgtcgaaacgcaaaagttccacctgaaatagcctgtgctggctttgttaacagctttattcgtaaaatcaacaataccatacatattcatgactcgaaatattatatcttgtgcgttttttttgttcttttatttttaatatatacatatatatatatatatatatatatatgcagtacagataaatttaaggttttggagcaaattaagagatgaaaaaaggtgctaatgaaattgatcatgtaagagtagctagtttttctacctccttctctgctttgtagccgagtctagtggcttcaaatgactcatgttcatttttatccaatgaagttgaggattcatcttgagaataatcactgtcggagcatgaattatacaccgttctacagctagcagaagaaaatctatctggctcggaaacattttgaagaaaaagattcttcttcaatttctcattgaattttccttgtatttgatcatcagaagcagtagtattctggcttccatcacttttattgaaaccaaacttgccaagtatagctctcaatactctggaacagcttggaataccatttcttctttttcttgtcttatttgagtcactagtattcctatttccataacttctttcattcaagaaaacatcaagaacaaaagggtcttgctctttcagaagaagctctcccagttgttttcctggtttggttattgaggaagccatttggaaagaaaaaaaaagaaaagaaaaaagtctaaaagctgagtgattcctgaatgaggaaatggggtattttaggaagtgtaaatgaattagatagatgggaatatatcatatatgattatgaatatgaggtatgggtgaataaaatgaagatcaaatatgatctgtcattttgggactaaacaaggaaaaggtaaagccaggaagaaagatcagagcatttaataaggcctcgaagtaactattactaataggctccagagtattgcatggacacaaaaaaaataaatcctactgtcgttgtgtatgttcttttgtataattgattctgtgtatatactctatttatttttcttacatactatatctctctgtcacacttatatatatatatatatattatatatatataagaacagtttttgaagttgattacaatggtcccaaaaaagtttgtcttgtctaggagaggtaccaaggcatattaaatgaaaggtttggttcagcctcataactaaacccgtagttattttattgagtttttttttctttttttttttttcaattaagtcatcttagttattattccacttgtatttaattttctaaactaaaattttattggtaaaactctctaaattattaactcttaaaaaatttaaggtgttatcaatttttcataaataacaacggtttatttgtatacttacacgtgacacgtttatattagtatatcttatattattatttaaaaattataaaaaattattttaaattttataatatttttattttttatatattttatattttatttctattattttatttaattttaaattaaaatttgaaaaaaaaattaaaataataatattaagtgtaccaatataaatgtgtcacatgtacaagaatatacacataagcagtccatagcgacagttaaccagatatcatcttaaatttgctaacagttcaataatttggaaagttttactaccaaaatttaaatttaaagaattaaatataagtaaaacgatagttagcaagatttaacacccacaaactctatcttatttatgttattcatatggttacattttctaaataaaaattcaaaaatattacttcaaaattgtgatgtaagcacttttaataacttctttattttattctttaaatatattattaaaattttattttttttattttaccttatacatacattaatttgtctatattttctttcacattatttaaatgtaaaagttaagaaaaaaaattaaagaataataaacaaatactaatggaagaaatgaagacaattaagtacaaaagaaaaaattaaaaaaataaatagaaaaagctttaaaggttagctacatttagctaaaaaagatttaggaggagatgaattttaaccaattagctgtttttttagctcttagctattaaaatgaaaaagcatccattgagatgcaaaatattttttcatacggatattctggctcctgcacctcccaccaaaggtacaactttcatcttttcctttttgtttctttacattcgaataaacaagaaactaaataaacaaaaagagataaagatctattatgttatgcgctaaaagtgaagtctaagagcatctccaaagagacaccaaatttggtgttacactatcaccaaatttggtgtcaaaaattatttctactccaaccacaacaccaaaaattacactaaaaaaatattccttattattatattaattttttaataaattaaaaaaataatatcatattaattaacaaaaattaccacaattgttatatttaaataaacttactaatgtgattaaagacaataatactgtaaaatcggcgaaattcgataaattaaaatatcatattgcaataacataaatattacattactagagaacaaacattacattcatgacaaaaaaattacattaaattaaatt

SEQ ID NO: 300551 - DNA, 2903 bp, Cannabis indica
aaataatttccaacaaatatttactgagatttttgggaattgattaataagagcttgaggaaatgaaaaatattaaataatagacaaatatatttcttacgtggttcaggcattaatgatccttagtccacgagtcagtagtattacccttccttggaaattttttgagtattacaagtgtttacaatgataatctctgtattccttttgtctctctctaagaagaaagctctctagaaatttcagcagagtttttgtaagtaaggattgttcaccctctttacataaaaaaatggtggtatttatagacccacgtgtgggtaaaggcataccttttacccaactagggtttcttactcagcacgcaagtgaggctgtgaaacactataagatcatctgatcgttaatttggtacgtagctcttccatcgatgcaggttgtcacgtaaggatatggacacatgtcgttcaaaggtttctcatttaaaagcaatatcccaaacaagtcgttggacaattagcactacagaggcacgtacgcgcacagccacggtctgatttatgggactagatctgacttggtgtcagatgaggtgtagcccaccgagtgtatctccaggctagtttgcaggggccttccaggaagtgtccctcaggacctcctggaatagccaattcctaagtacccccagaaggcctgtgcttcgcgtatgcctttaaataccggaagcactaggttacaacttcagggatcgattcctcctttgcaacagatgtgctctcctagatactttgatgcctcccttgatcctatcttaaaaggaaattgaatctgtgatattctcatatgatttgatatggcacccttttgctatctctatgtagaacctatccaagaatagggataacaacagggaattcaaaatggagagcactctagagctaatgtccttatggagagatcaatatgattcctactctagccctcttttcattcgatgctccatcaacatagactttccaggttggtaactttgggattggctcgtgtaagaggtcactcaatctgaaatattccactatgaagtctactagggcttgaccattgattgacaccctccgctaatattagatgtcaaatttgctaagttccatagcccattttagcagcctatcagatgactctggcttttgaagcacttagctgagaagatgatttgttagtaccatgatagtgtgggcttggaagtagggcttgagctttcttgaggcaaccaataagcaaaaggtcaacttcttaatcatgggatacctagattcttcacccagtaatcttttcctaatgtagtacactgatagctagacctttcctttattttgcattaacacgacacttatggcatgatcagacactgccaaataaaggtacaaatcatcaccttccatcgactttgatagaattggatccttgctcaagtgctccttcaatttctggaaagcctcctcacattcttcagtccattcaaatttcttgtttcctcgcaacacattaaataacgagatgcattagtctgtagacttcaaaatgaatatgttgagggctacaatccttccaataacactttgcacaaccttgtgcttttaggagatggtatatcaatgaaggctttgatcttttatgggttagcttcaatttcttgggagctatcaataaagcgaaaaactttctagaggagacaccaaatgtacattttttaggattgagcttcatcctatacctctgaagaatttagaatgcttccttgaggtctgtattgtgctttccagatgtcttagacttcactagcatgtcattgacatataagctttcatatttctccccaatcggttctcaaacatcttattgaccagttgctgatatgtttctccggcattctttaatccaaatggcataaccttgtagctacacacacctttatctattttgaagatggtgtgttcttcatcagctatgtgcattttaatttgattgtatccagagtaagcatccatgaagcttaataattggtacccagaggtggcatccaccatctagcctatttgcgaaagagggaaacagactttgggactggccttgttaaggtccgtgaagtcaatgcacatcctccctgtgtcattaggcttagggaccaaaactaaattagccaaccaaacgggacataatgctttctagaggaagtcattctaggtcagcttgtccacttccacttttactgcttctgcccttatcagatctaagggtctctgcttctggtaaataggtgtattgtctttgttgatgttcaaggcatggaagatggtattccgattaatccctagaatgtcagaatgactccatgctattacatcctaatttcttttaactgtacttacaatgctttcttttaccattggaggctggggtcggaatttgtggcctggggcctggggccaggttctgggagtccggatccaggttcgggtccaagttcgagtttggagccagggtccaggtctggggccggaatcctggtcagggtccaaattcgagttctagctagtttggtctaatcgcaatcctaaatattgattaagaaaaagaaaaaattatttacaaatattttaaaagtgatttttttttgttttcataattttgattctctaagtatttttttttcataattttttttgattcccaagtagaaaattgaattctttaaaactgttttcatttttgtaaataaaaaaatagaaaatttactaaaaaaagtattaccaaacgctacctataacttttagtattaatattattttggctaattagcaatttttctccccgaactccctctgaacttttttggccgt

SEQ ID NO: 300552 - DNA, 2289 bp, Cannabis indica
tattactgttaaaaattaaattttgatgtcacaaattatcctaaaaatatattaaaaaatatataatatccctagttgttatttagtttactcttgcagaaattgtacttgtactttaatttaaccttatacatatgattttagtgtcttgtaattaattatataagaaataacaataaccaggttacacaccatgcttataataaatatagcctaatttgataaattactttcagaattggtactgttacgggaaggcagtggctgagcaagcggcttgggaaatggcttctgagaaaggaattgacctagttgtgatcaaccctgttttagtgcttggacccttgttacagccaactgttaatgctagcattgttcacatcctcaagtacttaactggttcggctaagacttatgccaactcaatccaggcttacgtccatgttaaggacgttgcgcttgcccacatcttggttttcgagaccccttctgcctccggccgctacctctgcgccgagagcgttcttcaccgtggcgaggtcgttgaaattcttgccaagttcttcccggaatatcctattcctttgaagtaagtaattcataactaaatattaattaacgcgagttttacattttgggtatatttatagattaagtctgcatttagagctcacctaacttagaagtgtcaaaaatacgttaagactaagtgtgatgctagataacacccctgattaatcaatcagggttgtttcgagttgatgtgatatttttatttggtcggtagcttgaaattagccgaccaattaaaaataattgttaagtagaatttaatatatagaaagaatcttttaaattataataataagaagaatagaatcaggcacacacaatcatttaatagaaggtcaactaataagtctactgctttgtgtcattcatggttaaattgttttttatttatatttgtttttttgggttagttactctatttatattgtttttgtttgaccaataatttcacaatagtactttttatttgagcttctcatatatattggattacttgagttttaaatattttgaatggttaaatattgtatgttgtgggactctctctccatatatttatatataattatttggtgttgtgaaatgatttggactgtttaacataatatgatgtgtaatgcttgaataagatgatgagaatgaatctcttcactttccataaaataatattacgtatatatataaatttacgaataatgtttaattagtgttatcttattgacactatcttttaaaagggtttaaaaacagtttttgtttaataagaaaattacaagtattattcttttattatgttgttgatttgacacctaattatgatttgaaaaaaaaaatcaataaataaagggagggtctcccttctcatttttatagtttaatatataaaaattcatcataccttgttactcctaataattatataataatcaatctaataatccccttcattatattattattttatatattttctcttttttaaaataaagtatataaatgatcatatttgatgccatattagctcatatacatatattttatatttggttatcatattacgcatttgcattaaaaataaattagaagaaaacttgagtaaactgctgactatagtatggtttggccaatgggacgaaacttaagaataaattacatgttaaattttgattggacgaaagatgaggctaatattagttaatgaaagccaaccacatgtaagtatatgggttgcacgtaatcgtgatgtgttctatttttatgtaattatttaaataattaatatataatggtcttgcctccaggggtttacatttggtgaacccacttttgactcgtctacctaaaatgatgatgtttatatatatagtatactacacattttttcaatatatataaaaagaagaaaaaataatgtatatatatataagttgtggagctaagatgatcttcacctacaaccatgtcacactcaatactctctactactctttccttgttcaattatatatctagggatatgattttgtcctgttattgtactttcacagattgtaatccgtgatgtacgacagccgtcagatgacagagttatttgatctgacggctgagattgatttaagggtaattagagttaaaaagtagaaacgtaccctaacactcatttaatgtactctgagacccatcaaatgtaccacgaaatacattccgtgaaagtac

SEQ ID NO: 300553 - DNA, 2823 bp, Cannabis indica
tttttttttttgaagaaaggtaatcaaaaactttattaaccttcaaactctactaccaaacaagatagtaaatcagttgggacatcccctatactgaaaacacgattagaataaaaattagaagctcttgcaaaagcgtgagctactaagtttgctgaacgttttacaaaacaggtcaaaacattattcaagtccataagtaaatccttataatcttgaataatatagccaaagctagagatcatggtgaaaggacttcagttagcttgaatggccaccaaacagtggacttcaagaatgatgtgttgccaacctctcattttaattcaacttaaagcctttctaattcaaatcgcctccactaactcgggtgtgactccctcaataaggtaactgaattcattcctagcaacaataccataaccatagcctttagagtcttcaaaaactgaagcatcgacattaaccttgataccatttgatacagggagctccaccgctcagccccatcaccagcagccagctgaaatgactccacaagagtttgagcggtcttccattgaccaaggtaagtaacggcagaagcaacagtagcagaagcattatacatcttattattccacactttacatttcgagctttctaaatggcccaacagagaatagcaaccaagcattgggtttcgtttgagaatgaatcgaacgtagcagagcacaattccaagaaatccataacagctgtgattgtcgtattcacaccagcttttgtccaacaagccaatgtcataggacatgtgacaagcgcatggaggatggtttcatcatagtagttgcaaatcggacagaggctactaacaacaactttataaatatgaagaaaaaaaaatcattaatgaatagtattaatgaatgtcaaacaagtcattaaaaaatgtggtaattattgtcgattaaaaattagcccatgctatcttttgggtcaaatgtaatgtagcacacattttatatcaccattgaaattaagttttaacgaaatattctaaaatatagcaatacgctatatttctagctgtccattggagatgctctaatgtgtttacaacaaatgggcatttgatggtttctaggttaactccctatagaattgtgaaagaggattcgtttgaaaaaaaaaatgtttagccgttaaaaattaaatttaattatttattaaaacttaacaaattagtcttaaataaataacaaaatatttgtggtcctaaaacaaacccaacagatttttaagccaataattttctcccacgctaacccattttccctaacattctcaaattcaacaaaagagtttctaaatacaaaaacaaaaaacagagtgatttttgatttgtctttctctgttcccatttcaatctgagccccatttgaaccttacacgcaaagtcttcttcttcaacccattataaaccaactcattctaatcacattcaacacatacctttaatggcgttactcctttcttcttcttcattcctttccttaccatcatcatcatcatcatcttcttcttcttcttttgataaacccttcaaaaccctttcttgcttgatacccaacaatgctccaaaccccaaaatctccgccagatcagcaaatttttcgcctctacgagtggctgccccaactacccaacaatcaagttcggacctttatgaggaaccggtagaagaggaaggttatgagaggttggattcgaaattcaactggagagatcattggtacccaatttctctattggaagatttggaccctcgattgcctactccgtttcagcttttgggtcgagaccttgttgtgtggaaagacaagggtagtggccaatgggttgcttttgatgacaaatgcccacataggcttgctcccttatctgtgagtttattggattatatgttctgtagtgtgcttatacttttttaggatctaaattagaaaaaattcaatctttggattcatagctctgataagtactgaatttcttactcaagtttagttatctatgtatttgaaaagatcaaacaactagagattcacttacttcatgattggtgatgagagaaagtgttgccatctagtgtggttatgctcttttgggatctaaattagaaaatttcaatatttggattcatgataagaactgaaattcttacacaagttagttatccatgcatttgaactcattaactcaaataactagagatttacttacttgctgaagctccctaatctataagcttattggattatgttctttagcgtgtttatgctcttttgggatctaaattagaaaaattcaatctttggattcatagctatgataagaactgaaattcctacacaagttagtcatccttatattagaatccattaactcaaacaactagagattcacttatttcaagattggtgatcagaaagattatagctttaacgattattgaatccaaaataatgagtttttttgttttgttttttttacaggaagggagaattgatgaagatggtaatttgcagtgttcataccatggatggtcttttgatggatgtggatcatgtgttaaaattccacaggctgcaccagaagggccggaagctcgtgccatccgatcaccgagagcatgtgttactaggttccccacattagtctcccaaggtctgctctttgtttggcctgatgagaatggttgggaaagagctaatgccaccaagcctcccatgtatgtaatctattattatgttattatattttaatgtcatgttgtgactattt

SEQ ID NO: 300554 - DNA, 3528 bp, Cannabis indica
tgtatttgtataaataggggttcaccccattgcaataaacaactcagaaattctcgttcactttctatttctctttcatcttcttctttcctctcatctactttatattattttataacagtaaaagattattattttaaatttctgaacaaaattattaaaatgtgggaacaacccaaattggaggtcgactattcatcttgctgagtgcatctgaatcttcaataaaatgtaatttgaaactattagtttcaagatcatatatacctaaatctgaaatcatatgagggggcggtgcaaaaaaacacatcccgtcaagatcatgggtgaaatatatacaatttggttgaattccattaaacttggtagccaaaacggatacagaagaattatcaccgaggaacaaggccataatccctaaacttctaatatgaatccacttattagagtcaaaagtatacctccaaactttaaagaacttagttgttcgacccttcttggtcactttgtgaaaatactccatacacctttcaatcattatgatatttccacacaactccaccaaatatctcttaatagatatatgtccaagtccttcgtacatccatggaaactcatgaccaagttctcttattgttgagtcgacgcaagagtcactaagatcaaaagatctcaatgtaccttctcttgttacagcataacataaatctttataaaacaaaatatcatcggaattaaaatactctgctggttgtattttagtccaagttaggtcatggccattattgtttccaattccaagtctaataaaagctaactccttcatatcgctaaatattacaacaagcatgcattctttatttggatttgctagtggatcgtcactgagtaaagccttgtaaatacagtagcaatatacattttttggatcaataaccaaatcgaagatgtcatcatcatcagaatcatcctcatactctaaagagaagaaggcaggaagttgaataatacatgtatgatttgcattattattgccttgaaccatagaataaggcttgtacaatgttactgtccaatctttgtttatagttatcacccaaccttttaaagagccaccaaaacgtttatcatatggtacgaaatttattgttggtaatattataaatattccatgaaaaattatataatgttttgttttgtttaacttgattatctttcattatgcaatgtcattctgaacaaacagctccaaatcgcaaataatcaatcgatgactctattctttccaaaattaacactaagatatcttttggtatgtttacccaatcaaccaacaaccatggtagaatgtatatgtagtcggtctttctttattctaaatttataatcctagcttgcatgaattaatagaagagagagataattagtgaaaagaataagtgaaagtatgaaaaaaaaaataaatctaatcctatttcaattctttttttttcctactccaattctaattctataaagtttataaatttgaattaaattatttaaaaataatatttatataataacacatcacaaataattgaaattaggatttttttagattaattataaaatagtctaaaaaaatatgtgaggagataaaatgtcgggagattttttttcagtaaaaaatctcaagtactattttattttggagaaaattctttgtatgttatattataaggatctaaaatcaaattttatagtgaaaaacaaaaaaattcaacacgtgaactttcaacaaatttaaattttaaatgaataataaatagatcaaaaactttgccattttttttaaataaaactctaagattatatttatatttgttcaagaaaaagagaaaagaaaacaatacataataaaagataattaaattaataatgttcattgttcaaaaaaaaaaaaagaattaaattaaagattaattgtattttgcaaaatatttaagggagttttcacttttgtatttttaatctaatttattttcaaaaatacgttaatattaaaaactaaccacaattagattatattttgcaaaacatacttggtttggcttctactcttctgctttttccttcttctccacttctcagttctcaccaaaaaaaaataaagagatcgagcaaacctctgacaccgagttcaggtaattttctttcctttctctgcatgtattttttttttcgtttcttattaatagatttgtgcttttgaaatggggattgggaaagagataaggtgcaactcttactctcgtttctcttgtctcaacaataaatatgacattttttaatatcttctttcaatttttttttttttaatttgatttatgagtttcaattccaatttagtcatgtatagttatttttagttttaatttcaaggtaaaatagattaatttagggctgcaattgtggagaatgttaggagaataaagttaattctacaagggttttgaacaatccaagtagtgttgtggctatgtcaacaatgtggttaatcccaaaaagcttagctcaagcttttacaagggtttctgaacactatttgaatggcttagctgaagcttttactggaattggccaaacagagttttactattctgaaattccaaaaagcatgtcaagcattgcaacttctctttttggattaggtatggctctggctagtctttctacgtattgatgcttaattcatttttcttaaatagtctttttgcaataagccaaaaaatcatacattgatgtgctgtccctaaatgagcattctgtgttgcttgttgagtttgtttgagaatttgattgtaaagctgtgtgatttagtcattggtgctaatatataaggatctcagtaaacaatcttatggtcattggtgctttagcacaatgtttttgtgccgaagttgaacttcagcaggatatttcctagtaatatagtcaccatgagtgaagtgaggctagttttgatgagcttagtttaccattactgttagagttgttgttttatgataaatatggtcactctatgtcaaagtaggatggcagaaatcactgaacaacctttcagacctcgtgagaagttaatcgagaagtaaaagtactttcaaaatccacaagtacacacaccttaaaggatcaatggataagatcatgtctggcaattccagtcgcagtcttgctttggcaagtacattgttgtatcttatcgtaagttgtgtaatttatgtgtaacgccctaatgctaaggcaggctacagtactttgtcaattatagtgttgtctttgctaatcaaagaattttcttaaaaaacgtgtcaaattaaaatttttatattaattaataaaatttataatatacaaaactctttacaagttccgggatcccgttttcaaaattttaaaacttaatattccataatacatattatccaggtcgcacagcgactacaaaatataaccccagatgtcccgagaccgaacactccaggt

SEQ ID NO: 300555 - DNA, 3133 bp, Cannabis indica
taaatgtgaacaagataattgtagaattgaaattgaattttattataatattattattgatataatttattattaattaaataaataatatgaagaattaaaattaatcacttataacgcgtcacattagttgagccagccttgaatatatatgagccttaattttgtttcgtggtatttaaagtgaagtgcgaatattattgggcctttttaaaaaattaccattttttcaactacatataatgtattatatgcaatttttgggccctagatattttgggtgggctctaggcgcgggcctaacctgccttagctaggaatcaacactatataaaaaaaaatactatctttagtgataaccttttagtcacaacaaaatttttttgtgactaaatgtagcttttagtcatcacaacaaaaagttacttgtgaccaaagcataatatttaaatacaagttgtcactaatttacttttagtcacaacaagtattgtgactaaaaatacatttagtcataataaattttgatttttgaaactaataactttagccagagattttttaatcacaacatagaattgatgatttacaatcagccacaaattttgtttcgtccctgctgtacaaaaacagttaccttagtgacaactttttagtctcaacataaattttttgtgactaaatgtgacttttaatcataacaaaaaattacttgtgactaaaacatagtatttagatacaaattgtcactaatttagttttagttacaacatgtattgtgactaaaaacacacttagtcgcaacaaattgtgatttttgtaactaataccttttgccacgaattttttagtcacaacatagaaattattatttataattagtcacgattttttcacgtttaatcacaggtttattgtgactaaaagtgagatattttgtagtgcaggcctgcaccatgatagtcttcagaactttaagatgcctgatagtaatgctcctaaattaacttagagactaacctggtgatgatttcggtgaagaatagtcttctctttaaacttgattttacacaaaaatttgccattgccacttatttgcatggtcccatgatggtcacaatacacttttccaatcataagattgtatatgtttgttgtaacctatatgaacataaaagttattaaacatttattagtatatatatcgagcatgacaaaaataaaattgaccatatatataatcattaatgcaccttgctccactgaaaaatttcaccatcatcaaattctagtgtgagaattccaacagggtcaagctgaattgatcttccccaaaattttgtgtgaaggttgctgtcaccccaaaatttccaacctctaccttcacaatggcaagcaatcacagctgttgggtgatgacacacctgttatatataataataatgataattttaggaattcaataaattttttcattgtccaatgataattctcgaaagcaagagaccaagatcattatatcctaatcagtaagcatgcacttagaatagacagtgaactaatttagataaatcttctctatcatttcttcacgatgttttatatttttactgttgaaattttcaatgaagctccttaattagtaatttgtaaatcattcgttaattaatcttgttaattcaataaacctttgttctttgtcctaagaaaaattctccaaagtgagagatcgagatcattatatcctagtgaggatacatgcatttaggatagacggtgaactaatttagttaatggatcatttctctatcactttttcatgatgtattatattcttcttaatgaaactttcaatcaatctccttaatcagtaattagtacgtggttatgtacttaggatggacggtgaactaatatataccttctcaatgaagaattgaattcctttatttggaaaagtcaacttcaaaaaagagaaattattctatcccaatactataattatatgttgtatttaaagtggatggtgaattatatatataccttctcggaaaagaagcgaatcctttatcaggaaagtcagcttcataagtttcccctaacaatggattgaagggcttgcaatgacgatctttagacgaaccatacgcagacactgcaaacgccgcaacattcaaaatcctttggatgctatccccctaacaagtacatgatcacattaatcaaacacataataataattatgatcatgtaataaatttcctaataagtaatacatattaaaaaaaaaaaagctatcataatgttttcatagttttaataacacttacatctttcccatgttggtatgcttgatccaaaagataagagtactccaattcttcacaacatttttgaagtaatgaaattggttcattgaagtacacaggtaaacaaactcttgtaagatcttttccaacattgtctttaatcaaagaccatagattaaccgctttctccttctccaccggatcgggaagcttttttcgcctttcaatacaaggcaccacttctttattctcatcactctgcattttccctttttccatgttatttacaagtacctattacacaaggatatttcatctcctcttatattaatattaagtaagaaatatcaaaagaatagtaagatccaattaatacatgtttgtaataaatagaagagttttgaaataataactttctataattgagtatatatataatatatgccattcattcattatattactctattctttatcgagatatgaaaccaatagaaatggtcccctaataataatgaggttaggtaggcaaagaagataagatcttcaaccatacttcatttaagtctttgtttcgaaagaaatatataataatatacactacaaaaaattatttgtgactaaaaaatataatatttagacgcaagttgtcactaatttaatttcagacacaataagtattacgactaaaaacacaccaaattatactttttatgatttatacttttcgccacgaaccttttgattacgacataagaatgatgatttataataatcgcaactcttttatttttaatcacaaattttgttgtgactaaaagtaa

SEQ ID NO: 300556 - DNA, 4571 bp, Cannabis indica
aaggaacagaagatttggctccatcttcgacaacataacaatcatctcccttggagcggttgtcacatccttgagctactccaccattgtctaattaactctctctgcaacggagttgccccagatatgacttatgggcacagacctttaacttctttagcggattgggagatgttgccttagacttcgcgttagaaatccaagctaccattacaccccggataagccctccaagaagcccatgtggaaaggggttctagtggcctatgcggtggtggccgtgttactttccggtggctttggttggttattgggtttttggtgacagagtgtaaattatgaatgaggaaacgaataaatagtttaacatagttttccttcccctataaacagaatgaataaatcaaatccatagatctttcacatatttgcaataattgtacaaaattaacagcaacatgttgaagagaacctgaataatcataggcttggatttgccagacaaaccgatatgcattctattatcggtatccataagctcatgtcattggaaaatatcacataaagaaagtagttattatatttgacattgtagaaaataattgattgaattcatagcaacaggataacacatttatatagctgcaaatggccacttccaactagaagaactggtgctcatctccataaaatcccatcaaccttgtcaattttttaagctttgcacaataattgtattgagggaggaaatctttgtcagctgtgtataatagtgaaagccaatcataaagattaccagtaatctccacaagagcattttccatccttgaaatgatgaaatcttttgttgtctctaacaatcaattccctcccaacaatcttggacatgatcttgatggcattatggcaatctccacagactcgcagattcttaatgatcctaagaggtgtcctcgccggagtactaatcaggccatacgcaattgccagccgctcgctgtgatagagcaaggcctgctccttggcttcctgatcaatgtcatgaagcacatatctcgtgtcggggacataaccagcttccctcattccactcagggctttcaacttctcatcatccttgtatagagttggatttttgaactcaacaatcttgttctttccatctaacatgttaatggcattaagctttttgggtggtggagtagggatcttatttgtaacagccttagactggtcaagagcagcaatgatctcctcagtacggtctagaagatcaacatccccatgaatctgagcataatctctcaaagcctcccaaacttccacagtgggctcgaaagggagtttcgcaatgtaatcttctgcttcatttagatgtccacacttaccataaacaccaagtatccccaaataatgctccatctctggagcaattccatactcggttttcattgattcgaaatgtataaacgcttcttccacagcatctgcactaccacaagccgaaaacactgcaagaaaagtctcggaattaggttggaatcccttttccctcatctgctcaaataattgcaatccatcatctcctaatccgttatctgcatatccatttatcatcaaattccaagaatcaagagttcggtcagtcatataatcaaacactctccgtgcatcagtcatgctcccacatttcacatacatttcaataaccttattgatcaactgacgttcactcctccaggtagattgcaaaaagaaatcatgaacctttttcgcattgtccagcaatttcgattgcccacacaactcaaacaaagcatgaaaacaatttggatccgctttcaccccttccttgtccatcaactcaatagcttctttcaccttcccctcttgacacagtcggcctaaatctgaaacagaaggttggataacattgggaatctgattctcaaaagcctgaccttggcctcgatttaaaacttgattgttgctcatctgattagagttttgaacttgtccactccactgacttgggtttgggcgttgagggtaacttggattctggttgttccactgattcaaccctctggattgctgataatccgggttatgatactgagtctgagaattccattgattgtttccatacccagcatttccctggttaggaattccgcgattctgaccctgattaggatacccaccaccatagctcgggttctgaccctggtatgagttccactggttagggtttgtgtttccctgtggctgtgatccccactgatcagggaaaggcctagaatcggacggtggaggttgctgaggaggtgacctttggaattcatacgggacggtggaggtgcttagggttttggctagggtttgaaggttgttgtgaaagctattaatggaagtaaaatgagagggatgaaaaggtcgtaccttgaataagtaagagaacttggaacatctggaacggctgatagattgcagagacgccatttttgaggagaatgaagctaatactaaaccctctgcaacatcataaagcataaacccttgtttacctgtgtgagactcagagtgtgactgtggcccttttgttttgaaaattacagttcaacccttctaagtttgatatttacatttatgcaactaagttgttttaaaatgagtaatttgcagcgtaaatacctaatgacatgtttcttatccagtattctgaatcagataaattaatagagaaatgtaacgaaataaatgaaaaataattagaatcaatgtttgtaatatgttgtttactaaaactgcttagaaataaaataatgatttatcttgtttactttataaagaagtaattggaatgtttaaattgattaaattacccttttgagttaaattatagtatataaaatttattttgtaagacatgttttaatttataaaattgtcattataaatttaatatcaaaaattaaaattaaaataaataaaagtcattaccctatggtatttctataagaaaattagtgggctaagttctctttttttttttctcccttatttaatcaagctctcccttttctaaatttaataaattaaataaaccaatataataaaatgactatcttaatattaatttccattgctgaatagtaaacatgtcataagtttaatttttgacggtaataatacataataatttatatttctgaaactttcgtaggtacctaaagttaagtgtgttattatccacatgtcatattcttatcggtatattttaattaatttttaaataaaaaataaaaatttaatgacatggaccaattaaagactaccatgtgggcattcacttgatacttaatggtcaagtacctatggaagtttcaaaaatataacttatgtaatattaccatcaaaaattaaagttaagtatttatctgcaatcgagagttaaatttaaattttatgccgtaaattactcatttaaaatacaaatggcgccttcttaaaacgggccttctcgattttcagttgtaaaactattttttttttataaaagggagtcgcgaattttagaggactttcacagaaaagaaccttagaaacacaagaagaagactcttggagggagcgtgtcgatctgatcgagttcccccacttagtttctttctcttctctttaatttctttatgtttttatctatctttagtttaattatggatttgtttgttgaaattataaactaatttctcaatttagggatatgatgaatgttaactgattttattctatgagttaatgtgatttgactatttcttatttattgttcttgtggtttatttatctttgtgtttattatatgtttaagcttgatcacattatgcatgatttatcatcctaatgtgaaatttgaaaaaatgaatgttaagaatgctctaaatgaataaacatagattttgatgtgaaacgaaagtatttacatagcttgtgtgacttttagattattgcttaatgtaaattgtatgttgttctatcttagagttgacatgcaatttatgacatttatgatctaaaaaaaattaggttaatttataatttgtcatcatataggaggaaaaagcaattaaaattatatctctaattttacatctattgttaaacctctttttatatttgtttgtttaatttatttaatttttgtttagtttatttagttttaaattctatctattccattctcaaatagaaacaagaattcaattaattggtacttagttataattctcgtggaaacgatactctactttcattattattacttgtaaacgatatgtgcccttacgtagcataattttcacaacacccgacctgattattatgggccatgatttagaaatgggcaggacttttctcggcccatttggagaatttttctaaatttaacacttacctatgtaattagcaaaaacatggactctatttgtttgatacctgtaacgtccccgcttcaagcctccattgggtccttacacccacggaataaatggctcttatacacgagtacgtca

SEQ ID NO: 300557 - DNA, 1989 bp, Cannabis indica
tgaaaacatagaaaacaagcgtaatttcgtcccaacacagcgaaaaacgcacataaattgaatcaaaacataggctaaaaatagcctaacagtattggaccaatcgtacttttgaattgggggaagaagaagaaccagagcacccctgcgatttacctgatgcggaccttgttctaaatttccaggaggtttttcccgaggctatctctccaaaatcatctctaagattgattattcagccgtaggagatcaagaaggacttggcccattttatggaggcttcgagcaggtgttctaatgttattgcaaaaggtattagctctatccctcctattctaagatctggttctgtgaaaaggaatctcgattcctcttttttgaattctatctctagcagcaaggttaagataactgaagatgacattaaagaagatgcagatttttggaattcctcaattttgtgctatgtgttaggagctaatcccccactctcaatccttgaaggatttgttaggagaatgtggagtgataaggtggaaagggtggtattgctatcttatggaatttttcttatccaatttcattcaattgaagaaagagatgagatactcaaaggaggatatatctttttcaataggagacctgtagtgatgaaaccatgggattctaaagtgaatttcaagaaagaagatgtcaaggtggtacctatttgggttcatcttgatgatcttgacttgaaatattggggtgagaaatctcttttcaagataatagggcaagtgggcaaacctataatggtagatgatgctactaaaaacaggtataagctctcttttcttataatcttaattgaagtctcaatacagcaggagttaccgaatactatagaatttgaagatgagaatgggttcaatactacggtggctatttcttatgaatggaaaccacttttgtgtggtcattgtgctggtttggggcacgctataggtgactgtaggaagaaaacaaccagcaaataggtgtgggttgaaaaggcaccaagaaaaaaagctgaagttgaacagaaaaaagaaattgcagctgataatgaaggatttattccagtctctagaggcaaaatagaggcttttaatttacctgttatgccaaccaatacatgaaattcctttcaatctttagcagagggatatgaggaagatggcactatagaagatgtgatttttaatttgaataatgcagtcaagacaggagagggcggagtaccctctcttgcccatggatagaatcttggcgtggaatgtccgagggattaatagccaacaaaagcaaatttcagtcaagcaattgcttgaaaatcaaagagtagggcttgttggtctcctcgagacgagagtcaaggttcagaatttaggagccttgtatgtaagaatgttctcgggatggtgcttaacttttaatatagcttggcatgatggggggaggattattgtgagttggaatcctcttagtttcaatgtaaatattataaagtgcactagccaactcatccacctttttgttgaaaccacagaaaaaaaaacaaagttgttacttttgtgtatggttttaatgatgagtgtggtaggaacattttatagagagatcttattgagctttctatttctgatccttgggtgattcttggtgatttcaatgacaaacttagtaaagaggagagaattgtgaagcatgttcggtacaataattcgattgaatttaaaggttgtgtagatacttgtcaacttgaagatgtcaagtacattggcaatttctttacttggagcacactacaaaaaactgctacttttagtgacaactttttagtcacaacataatttttttttgtgactaaatgtgacttttagtcacaacaaaatattacttgtggctaaaacatagtatttagttacaagttgtcactaatttagttttagtcacaacaagtattgt

SEQ ID NO: 300558 - DNA, 2352 bp, Cannabis indica
aggtattttttaacttatcccttgtatttatctaaattcagatccactactttaaatatcaatgtcatactacaaggtgtaacgaataaacgatttcatgtatatttggaaaatttgaaaaactatgcataaaaaatcctaatattttatgcctaaactaatacatttcataatctgaaatatatgaccactttatgataaacctaaaaatacccctctcattttcaaacctcaactctctctctctctcttcctctatctctctcggttgtctctcaacatcacccttaactaaaaaaactttcttacccctcaccgccgtctcactacaagaaatgtcactttgtgctggcaaaagttagtattgcgctggtaaaatagaatttacttgtcctgtgttggcaaatcaatgtgggtattggaacttttgccagcataaaatgaaaagcgctggcaaagatgacttttcccagcatataaatgcgctggtaaaagttagattttagccactgcaaatgtacgctggtaaaactttgacctctttgccagcacagtttgcaaaatgcgctggtaaaagttacttttaccagcgcagtagcgaactgtgctggtaaaagtgacatttttttgtagcgcctacaccatcggcttcacctcaccgctgcctacaccatcggcctcacctcatcgtcgccacacagaccgcctcatcccaccgtgagatccgagatgtcgaaggtaagcttcgacccaaatttttttattttatcattgttttttttttaaatcattgatagatattgatttgttagatttagggttttgttagatttaaggtttgatttaggttcagatctgcgatttgggaaaatcgcgatttgaggaagatgaaggcctgatggttccgatggggaacccgatggggtctgatgcatgcttaaaaaattaaaatttattttgtctgatgggtctgatgaggtccgattgttattaaaatttatttttttttttttgcatttgtgtccgatggggtccaattaatgttaaaaaaatcaaatttcattgtattcgatgggtccgatgtctaacccgatggaggggtccgatgcatgtattaaaaatcaaaattttaaggtgtccgatgtgtaacccgatggggtccgattgctatgttaaaatttaattttttgtatttgtgtccgatggaaatgaaggtattttagagatattgtaaaatgtgtcatatttcacaaaaatgacatgttatgtgtttagaggaaaaatattaagtatttgtaagtataaaaagtcaaatttcccatcttaaatacacacatcattactcccaagaaaaagtataaattttgaatgcaattttccttttttattcaaaattttaattcttaattaaaaattgaaaacaattttatcaaatatatattttttgatattaaaaatacaaaaatttatttaaataaatttaccaagcactacttagtactgtgctggtcaatcttgtatcccatccttttgtctacccatataagagatccaactaatttttaatgccaacaaagatgttttagttgctaataaattgaataagcaattaatgaaacatgctacaacttggaactgctcaaaatatatatatgaacaacttttatatacgaaaacaaaaataattaatttgctgttgaacatcagaaaacaaaaatgtaaagaaaaagttgacataatggaccaaataaaagcttatcaatgatatcgatctattgttttattctacccacttcatggctttgctatgaaaagttttagatgatgggtgaattataggttatcatctttatctgaaaataccaaaaagaaaagacaaccggttaaagaaaaagaaaggaagaaatgactaaagatgaaattctatgtgtaaggctttaattatgaatggaaccttctttggtttcactctttaatcgagttgatcatatagtagcatggatattatcaaactttgactatgtaattttcttatagagccaaaatattattgatacaaaagccttaagcctaaatcgagttcatctgaaaataatttttttttatctatatgggtaaattttttattttactttttcaaatgagtgtgtataatgtatttgttgatatcaaaaaatttctcgaagttaaatgactagaaatagatgatttgcaactctccatctgtggagattctgctcctctttactctaatcgtaaacccaccttcagtgatagaccccaaaatttttttctttgtgaggctttttattattaaaaaatatttatacatatattataatcatttttact

SEQ ID NO: 300559 - DNA, 926 bp, Cannabis indica
ctaatctatacttctccatgtatggttcataggacatgtcttctcttctctctcacacatgtttatttatatatatatatatatatatatatgataaattatgcgcttgtgtatgggctggggtgaaaagtgacggattcaatctgtacctgcctatacatatgtgtataccatataggtatggtacgggatgagctttagaaggttgttagcggtcctgtggtgccggtttagaagaagctttggcagttgaagatccctctgaaagttaaaaatctggttctaacgggctgacagcaggctgcttaccactaaccaccaactttgcttgaagcatgttgatcttcttgtggtgtgtcttcagtggggtcgaaatcatgattaatgttgatttcttgtttgttggcgagggggtgctgggatagattaggactgcttcatttggtgggtgtctagtctagctttacggagtggctttcgagtgcttgtgatgttttggataaagtgcagcgtgctaagttggcgatggtgtgttgggtgatttggacggcaaggaacgattgtgttgatcaatgtgtgctcaagacagtaaaatggattcgtgggtgagttttatgactcatgaaaactaagtagagtactggatatacggagaatatgatcaagattaatgttgatgcgacttattttttaggattataattattataacttttttttgttgcccaagtggtgatttgttgttattgggtgatatattgagttgtcgtttgtgtgtcatctaatcttatttattttttatgttttttgtacgcggtgatccagatcacatatgattaacaaagcagcaatccacaatcggcggcggcaccttctcgaaccaggatagctcattgtctaactgaagagcatgttttgccaaacca

SEQ ID NO: 300560 - DNA, 1361 bp, Cannabis indica
tgaatcaaggactgggaaagaaagctacacttactggcacaagacagagagtggctggggagagacgttgtcccaagaaggaattggaggttagggaaaaagaggtcatggagctttgcagtgcagccatggctgccatcgtcgttgtttctttggttcggattctcagagtcttcgccttgttatctcttcttccacttcccccacgctcgttctttcgaactgatatccgataatatggataatgatagaacggaggggaaaaggggaaaattacaagaaagaaagtatttgagcaaacttcttgccaaaaaaaagaaaagaaaagtatttgggcaaacgacgtcgtagccacgttaaacaacgacgtgtcgtttatgctcttaattattttaatattttgtaagaatttttttttgtttttcatttgaggaagattataattaaaaattataaataattaatttttgttttcaaacttttaatttttctataaaaataaaaatagtttttacagaataaatttttacttttctaactagaaaataaaaactattgaaagtgttctctaaaaatttcttacatagtggtatctgcttttccagattgatgacgtgtacaataccaataccgaatatcagtcaaagcatgcccattcatgggccaattaagttaatacatcatcccatgagcagagtcaagttatgacttcgaatctgggtgtaagtccagcttacatatgtgacaaggcttgatcactttggttggggaaatgtggtttcgccttttggcgaaaggtccatcaggattaattcgaataccctcatgggtaaaatctggatacatacaattgaagagacgtctaaaagcctctggatatcatcttatgtggcatcctccaaacacagggccccactatgccaggggttcatcccctatgtcagactcagggagtgcgcgcatcgccaaaaaaattatatttttgtccaacgccatattctcatacattctcggtatcaacacggttgtgtacgacacctggcatcaccaaacagttcacatgttgagattttgtgccttaaataaaaataaaaattatttcaatgtaatcttatttactaattaataaaacttcaaaaatcattttatgttgcatggttcacatgattactttcgtgattatatgtttaatatataaattctattaaaaatcctgaatatatagttacttatgattatagtattgtctacattgtggaaaataatcatgattatatgcttcgaactatttagtcccacaatttatcagtgcattggattcacactgaacgtgataatcaacgatatagtttacttacact

SEQ ID NO: 300561 - DNA, 1101 bp, Cannabis indica
tttagggcacaaaacctaacaaagtgatcctaccaaattaattccccaaacaacaaaaggtcatagactattcatcagggttatctctgttggcgaagctcttggaattttagaataatgcgaacattgttcacatttatggacatattcagtacaatcctttttcatagttggacaaaagtatccttgggagagcatctttttggacaagctagatctggatgcatgatctccacaaaatcctttgtgcatgacagtgcttatttatgttctagctatgcgccttaaatagggcatttacaacactcttctatatgactttccatccatgagcacgtattttggggcttgatattgaacctcccatgaagtggctctatcatttggaagtgttccattccagatacttttagattggagctatccaggaagtggaatgatcaataatttttacccctagtatttctatgcttggagtagaaaatgggggatggggactattccctacttttcaatctttgggtctgttgccaactttgctagcatatccatgaagaaatttaaagatctttatatttttctatgtaattagccatattttctcctttagtttggtactctttagagatttggttgactactaattgtgaatcattatagagctcaatgctctaggctcttacttcattagctaattgtaggctatttatcattgcttcatgatctgcttcatttttggagactttaaactcaaaacagagtgcactctaatgcttttgcgaagatatgaggatgattctgactccagaatctttctcattcgatggttgtctacatatattttccagacttctagctttgggatgggttcttcaaggttattgtccatccttgtaccttcaataatgaagtctgccaaagcttggcctttaatggatattcttggctagtaaagggtgtcaaactggcttaactccaatgcccattttaagagtcttctggatgactcttgtttttgcaacacttgatggaggaaatggttttttagtacctgttgggtttttgtgccctaaataaaacccattacaatctgattagtta

SEQ ID NO: 300562 - DNA, 2422 bp, Cannabis indica
tgggtaaaaatcatttcttaacaagtggctctagaatattgcttccaataaacttcttctttatacaaaacaacatctaaagaggattgaatatgtctatccttatgaatgtcattattataaatattagtagaagagtaaagactatctaaatcattttgaagatgattaataatttgcttaaaattattcttattacaatctcagtcccaaatttcacaaacacaaaggattgagcattaagaaaatgagcaaggggaatgctattgttattgtttgacccaccttgccaattatatatattataagaattattaagggggtgtttggaatgggttaatgctaacaaggcaatggtattcccttgccacatcaaacaaacggtttaatatagtccaagaatcatttttatgagtctaatatggtaagccacacaaataaaaataaaaataaagatgaaagcttaaattatcattaatatttacaaaacaaacaacacgattacaagaaaaatataaaatattaacaacaacatcatcattacaaaaaataaaaagtcaccccttaaatcacttctagagacttcaaaaatattgtcaaaggacaacttaagctagagccagcagtcaatttaatttgcataacaaaatagatttgaggacaatgtttcttgaccaaaatagataggtaccagaatgctcgaggcctccctgaacctcgagtattccaactgataagactcatttttcctggcgggatatttgagcaacacccgcctgaacatcatgagaaatagttgaaggaataataacaacatcctcagcttcaactatttctcttttttgcatatccttgacagagttaccaaagctaacactctgcctggtgaaaggtctcttaacactagaaaatttcagaggagactccttgggatgaggaagagcagtggccctaggaaattttgaaggaataacaaacttgcccttgtcaacagtagaggtaacagttgttaccattataggggcagtagatagagtacaattaacaaattgggtatcatgcctgacaagattagtagaagtagaagttatcaaagagtcacgagaaaaaatagtttctgacaaaggttgtggtcacaatatcagagctttgggagagatccttaatcaatacagtattggcaatatttggtacaagaaactggttaatggcatcttgaagactctagttgaaagaaacttccctaacatgcattttatcaaaaggagtaaagtttgaaagatcaaagatacaatttttgtagacagatttcgtagggctctaagtatatccttgtaacttagaattggtggaataggagattcatcacactgcttaaggaatttaccacacttattgaatgtatggtcaagcatgccaaataaatagcaatagctttgtataccctcatacaagaatttaagccatttagtgcaagaaagagacttaaaatgcacattcatgccccttattaatggcttggtgatgtcaaaaaggatcctaactccataaaacgaacaatcgattcataaagggaagagatatggacttcaacaagatcaccccctaaaattttagagataaactgagcaagtttagtagacttctttccaaaaggaatgagatgtactttgaacctagagatggatgtatttgacatggaaaggggtaatggtgtcaagatcatctagaatataaaaaagtataagattacgatcaatatgccacgactggccctccatgactctcctcagtcaccttcgacacctaaaatgaactagaaacataccagaatggtaatcaaagaaggtgaaaggaaggtgaataatctaggtatccttcatagcattgaaaagcaagtcaagtttaataatttttggacataaaactttgacaacaaggcaacaggattcagtagaagggtcagatctcatagacatatgatcaaagtcatgaatcaaagcttcttcttagtgaggttgagactaagctcagagttttaggatgaactagccagaacaaaaagcatgtaaaaagagaggaataatgagatatagaagaaaaggttgtgaagtgtgaacaaatctaagttactaaacaaccttacatagagaataaacaaaaagtacctagacactactacaaaaactccctttagaggcggtttttaagccctttcagcgtcgattttcacgaaattcgctaccgaccctgatcagggtgacgctaaagggtccatatgaaccgacgccatatggacccctatggcgtcggttcctagccaagaaccgacgccataggtagcttagcaaccaacgccaaaaggtcgcgaatttcagttttttcaattttttttaatttaattatataattttaattatat

SEQ ID NO: 300563 - DNA, 3590 bp, Cannabis indica
gctgacttggtgtttgatgcaattgttcaagtgattaatgaaaacttctttcttgataaaaaaagaaaagaaaataataatgtcaatactttttattattaaattttatgtttgtatgcttatataataggatataatacatgtaacaaatagaccctaaaaagcactcacctacttgatcaaacatatctaatatatgtagacaaaacataaaacaaaaaaaaaaactacaatattacattgctattaggcaacatggtgtgcctagatgccttttagcatttctcattgattgtaaatgagagaaaaatccaaggagttgatttttaaatactaatatatgcacaaatttggaatgaaatcattgtttctttcattgataataacagtcatagcatcatcaatgatcttgtaaattgaagaaccattccatttgtttgtatttcactttttcaaatcattcacagtatttggtacttgatctagtttgctttcgagacatgcttcttgtaatatattgtcttgggacaaagatactattttttccagtcctacttttcttttttgcagcacttgctaagttttccccgtcactgatacaatcttccttattttccatgttcaaatctattcgtcctccaaaaaattcacaaggaacattcttggaagttgtcagtgtatccttgtaaatattattaatgaccaaatcataatctgaatgtccaaatgttgacagtaaaagatctcttactgtaggcaggggtagatcagtcaaaggaagcggagacagactgttcgtgcatgttcctaaatttatgtccgactcatctgatgcacaagtccttaatgacgcgccttgattggtatattctttacccagacattgagcatactcctcccaattatgtggaaaaccaagcaggaattgatggcatacctattcaattagagaattaagaaattaactttaatgtcagatcttcataccaacatactcgtaaaaataaataaatggatgataagcatgtgggcttggaatgagaagttcaagccaaaagttaaacttatttcattatcttcttgagaaagacacgacaaagaaattcttaaataggataggaaaacaaaagaagaggaaaggcctttgtcacaatttagaagtaatagcctataagattgattatacaggaagaaaatggcaagtattagttctagtcaaatacactggtctgagaagcaccccataagctttttggacacctttgccactaccagcacccgaaaactcaatttatttagtaaatccactaacgtctaaaggttggaaggtaaaacaaatcttaattcattcactactatttctttccgaatacacttctactgaacagtatacaagagaaagctagccaaaaacaaaagttagttgacactgaaatactcaccaaaactagcactttctcctttattaaatctaaagcaagaaaaaaaaattgtgaaccatgtgcaacaatgactacatatcatactagggtaaaatgatttttcaataagcttgcttaatgtggtcatgatcatcaaccagcaaaagaatgtattgctacacattcagctaaaacgaagaaattacaaacctctgatggaattccattttgatgagtgcgggtcatgtttattaaaccactaattttaattgtgaagccatcagttgtctccaaaacagtggtactgtgcctcttggaaactgctgcagagctaaagaatctaactcctagacccctgtaatatgaaatatacaagtactttaacaactaaaagaaattataaagagttaacacaatttctacataagaacaagaaagactaatgaagaaacaatctcagtattcatattaaaaaatttcaaaaacattgccagtgttgcacttgtccacaaagttgaactacgtttaatcttaacttgccaacaattaggtacaatgttgtggcatacactagttcaaaatgaatttcttgagtagcgtgacccacagcttacgtactaagaacatccagaaataattgatttattctctccatttgatctggcaacaaacacatagaccaccctggaaacaaaactggatagtgatctctttcacagaaagaaaataattccatagaagagtaaagcctaaatcttgagacatctctttcagttcaatctaattttctcatcatttcctaccttgaacttcactaacaaactatcctttcatgggcttcttgctttcattctctctcttgttagactctcactgattttcagcaactgcatacctacttccctttgggaacctccaaagccacttcatgagtcctaatttttataaacattaacaaagtctcaacaaagcctaccaatttattcaatttccaactgggttttcttttattgtctttcaaaaacagaaaataataataataataataaataaaaaaaaaaaagaaaaaaagaaacaaaagggagaaaaattggacactttaccctctagaagcggagcccccaacagccaggtctttgccattagccttaatcagccaccaatcttccaaaaatacctacacaatcggaaacttcaatgttgagaaatttggagtgatgattgattagagaaaaagtaattcccattgaaatgttgagaaatcttaaaactggtgaagtaggcaacgaaatccttacggaggaaatcttggaatagggcgacgaccaggtggaggcgttcatcaatccaaattttgtctccgcttctttcattttcgactgtgggattttcacagtggtgtcctcaaccttcctcagccgcccacggccttttttaggtacaaccgcctctttcaacgcactaacttcatgtttctgactattcatgttttgacgcactaacttcatgtcgccggagtttgccctaactcaccatggtttgtgagatggaagctaaatagaaaaactctaattaaatcaataaatttacgtactaaggcacaactcaacaacaaatgataataaacattaaacttgaaaagtttcttgttacttaaaaaaacaattagaaagcagctaatgtttacacaactcaatagcaattatctaatttaattggttgtcaaaatctcggttaacatttatgattagcgctcctactcaattttactactatgttctcaagatataagcattgggccgatctaattggttaactttaacgaacaacataaagaacacaaataatacatttaagccagaacctaaccctcttaagattaagatctattgaactaagatcaactaagtgatatagacttagaaagatataacaataagtttatgatatcttattcaatgtcaatatcggtctagttcgatgtatactccatacatatgatactagtatactttaccgatgcccttgaaaggacataacacttattcaaggtgtaagtaaactttattgctgattttcatgtcagtgtaaatgcaatatattgacaaatcacggtacataaactttgaaacatataattatgattatattccactgtattgacaatac

SEQ ID NO: 300564 - DNA, 4757 bp, Cannabis indica
aaaaaaaaaaaaagacaaaagacaaaaaggtcaataaaatacaaagaaaattattctctaaatattatggtatgtgtgagaagggatggatggccttattcatctgaatatcccatagacaaaggtaccaaacaagaatcctaatgaattgtcataattagtaaatcatgaatgagaatgtatgtggatacttgttaatttggtttggacagagaaatcatttggtaatattttctttgttatatgtaaagatgatttacttgttttaagcatctacaacaaaacttaggcaccttattctagtacaagacttattgcaactttgtctatttggttacctgaatttgagttcttaaacatccatgtagtgcagcaacagtgtacccgaactggcgaagagcagctcctagtttcacatactgctgccccggacatttgtagcaatgcctcgagtgcctcggttcccaactcgcgtgcaaagcctgctcgattttcgggtttcaaaataagaaaagagactgaaaatagtcaattactagctaagaaaacaatatggtaactggttacttaccatggtctcatcattagattttgagtctaaaacagccttgaaaccttcatatataggatccttatttgattcatcataagtttcttctatttgatcaaagtactcattgacacatgctgcaaaataacatgtaacaataatagtgttttaggggaaagtaatggtaagattttgacaattttttaacaagtttgttatgtataccatcaatggatttggctaggccttcaatcttagatatggtggaattgtggagattttcccctgaccaatgtggaaatataagtagagtcattacaagacagataccacagcctattgcaattgtgtagaatctttcatgagcaatcttcaacacattatcaactctgtaacttgaaacggctatcagattaaatgtcaatagaaatatcataactccatagtcaaagttcttctttatgttgggaaagaatctcatgtatgtagtgatagctcctgccaaaaacaaagtctaagttttaagctacattttcttttcttttgtggctcccaaaagaagctcaatatgagcattgtttattacaaaattcaatttttcaaacttaccaattagaaaaacagaagttccaataaaaacagctcgaaaaactcgaccggattcatttgcaatgaactctatcaaaaatgccaatgatccagctatgaaagtcccaaatcctctatttagacctttacacaaagtagcacctgatctccaaacaacaatcaaattagtccgacacttaattacacctatagcattgcaccaacaatctctaactggtattatgcaccactggtaccttttagcatttatcttaataaaaacccaaatgagaaaaccaaagaaaaaatattaaagggtacgttaaggtgtccaaaactataagaggtatcatattgttattggtgtcttttaatacagattcccacactttttgattgaatgaatgatatgaaaaaccgctaaccagggcaccttaaggtaccaaatagtaatgtttgaaaatcaaaatgtgatcaaaaacaaaaacaagaagaaatgaattaaagtaattacctgctgtggactcaagaacaacaacaacagtcataacagcccaaatggcattatcaccaattccttcaaacaaaggctccaatagatacaacaatgaaaccagagttaaagccagaccaactttgagggaatgtgtcacttttcttggatcttcttttcccatcttcaccgcggctcgccaaacccgacccggatatctgtccactttcttcatcatatttttcatattattttcctccttaacattctctaccaccttcacttgagttacttctgcatgaacttttgtgggaatcattttgtgatcaatctcaccaaactgaacaaaataataagatatatatatgattgtggaagacaattttgcaaatcaaaataggtttgtttttgcttggtaagaaatgttcttccttctgctactatttttctatatgttgtgaaataagaagatgacccctcatatatatagctaattatagataataaatggtaaatgactggtcttctcaactttgtactttgtttgttttttttttctttttattaattattaaagttcattagagaagtcactatttaagttaattttacgtgtaacttgtatattacgtaccttcgatttttttttagtcatttcatatatatatatttgtgtagataaatgttgtaatattggattgtaagagatgactacaacggaaaatgataaaataaaataaggaaaatttgtgattaaattctttacatattttgtacttagattagagtttttgttcccaaactatacaaattgtcgtaaatatatttttttagttattgtgggaaaattacgagtaaatatgcataatcaaatcaatgaaactctaaataataaaacaattaacaatgacaagaatatcaaatcgagaacaacaatcgtattaaaaacagggacaaagagagtattgaaaactagaaaatagtaaatgcagaaaataaagaaatcatcaccaagatatataatagttcaagtcctataaataaatgtgatttatgactatactccagttttagaacaccaccataatcttcatttattgattgaacaaaaataggtacaatacaatcgagacgagattctttgttgagttaacaataagtgtttcaactctcacatttacacccaaaaatcttcttcatctacggaattttttttttacaaaactcatatccaatttctcttttctctgcacctctctctctctacctctcaatcctttctctttcaaactctcaatctcatctctctctgagttcttaatctctcaccctaaaagtcaatgtggtatttataggcttaggatcaagatcttaaagtcgatggctacaagaaacgaggttgttaagttagttagaaataactaacttaaccaactcctctttgagcgaaatctccatgtcagtttaagtatcagagtctccaaaaacatatatgagcttctggattcacaaaccaaggatactcgttgatgacgcttccggataagattgagtctgatgtagtcaactacctgcatatacactccaggagtgataactagtcagctggaactctttttcagggaatgactagttatcctgaagactgaacccggagtgaacatgataatcatctagatacaccctttcagactcgactattattccacaggactccttgtgggactgacaaccgcgagtgaacaacttttcaaaaatgacgattgcggagactttttcatttagagaaactatactacagttaattatttttacgtttttttttttttttttattattataaatgatttgcttatgtggtcataccttatagtaaaagttgtatgatggtctacttaataattttaagctacttgaaattaagtttattagttttaaatatacaagtgttggctctaaaaatacatattcatattctcataatttattcttaaaattgctatgttatgtgtttattatttgtttagattcatgaactaggtcagattaacatcacgttattattagtgctacatcaatagattatttaaagaaatgagcaaatgtaactagagagtgtgatatttgcagcatttctatagctaaaaagaaaaaaatcaacgaaaaaaagtgctttttgaaaattttgcaattaaatggtaacaacattgtgatcctaagcaaatgttcacacccaacaaattaaccatagtgttacaattttaagataaatagctctctctttattatgtgtaacttttttctaattagattttgtctttatttcttttattaataagaaagtagaataaataaaatttatagtcagcaatgaattttttttttttggaaaattttaaattatgttgaaattagtggttaaagattgttgtcgtagttaattattgatgaaatttgtacatatatggtagtataagtatataccgtgtttatacgtatttatgaatatttattaagtattaagattatacagctaaactatacttgtttacaataaaagtgcaattaaaagcattgaaagtagtcaccgactattattgcaacttaaatatcaaactttgaaatgttacataatattttgagaattgttcaaacacgacaaacaataatgtaatttaattaatatcggatcttaaatgttttgatttagttagtaatatatatatatatatatatatatatataaaattactaactaagtaggctagaattaatattgtaaaattttggcagtaggtgagatttgttttcaacattttagttgcagtgtttgctgacttcattactagcttagctacaaaagaacaaaccaatatcatcatgtattctacttttataatttataaatatttagtttgtgcttattgagagggcaaccatgtgatgatcacctaaaatttgaaaatgttattcatcattgataaatcatcgtacgtacatgtgtaaattagtagtaaattagtaatatgatttttcttttggctaattaggattttttctctacaaactttgatatgtaccaaattatattctctgaatttttttggccgttaaaaattccccttg

SEQ ID NO: 300565 - DNA, 3309 bp, Cannabis indica
aaatcaaatttatctacacatcacccctgaaaaaagggtccactgaagaaggagcttgagaatgtgcctcctccattaggaaaagagttaggaaacagatgaggccaaggaccaatccccaagcgtacctgtcatcttccaagggtgtgatttcgtctttggcaggtagttcttcaccacctcgaaagaaggttgcgaatagaccccaagccaagcagagaacacttccactcagcccaccaatgccgagcaaaagagacgtagcaaaagaaagcagtgtggcggtacttcttccaaacattgcctgcgctatgcggcctccttccagccttccacaaggcaacacgtaagagagagtgtcaccaccattcctgcatcaaaatggtcaggagagtcatttcattgactgatcattagagataggttatgctaagtccatatttttttaaggacttacccaaaagtccagcaaaggccaggggatccacaggaactccaacaccttctactgcatatggcaatacatttccaaggtcatctgtgtatggtccaataacaaattggataaatgaaagtaacgggttgttatagaagaactgaggccttatatatctgcaagacagagaaaaagaaaaaaggaaagaacaattaataaaattaagtaataatggtttgacattaagaggagttaacacacaaagaaccaataaatttattaccagcacatgtttcacttggcagaaatggatgaacgaaaaaataaaactgttacaatagatggtcaaaatatagcagagttcacctggtttattaattaaagtcataatcatttaagaaatgaactaaatcagaagagacaattcaataatttagactcaaaaacacaaaacaaaaggaagtaggacgctttcagtaatatatatggactctcttaattaattatgagataatttcattatctatatctgttgtttctgaggataagtggcttacaatgcattatcacccccattaaaactgccatcggccacaaaagctgcaacagcaagtgccagtgatgtcaaatatgcactagcagtacgtgccactggaatatcaaaaagagctttcttgtttggcagcaatgattcatagttattcatcactcccaaacaccctgtccaattcgacggcacaagaaaagatgggctcagttttacaccataacgagctgctgttaatcttgtggctatctgcataagataaacactgtaagaacaaaggcaaaacgtatctcatcaaatcaaagcatagaagataataatgacatacctcagaaactcccaagatagaaatgaagccaccaaagagaggcacaacattagaaacgtagtcatcccatgtagcatcaggtttaaggaaaaagccactcatcaaagctattgtcccaaaagttgtaacacataaggctactgcactaatgtaaccccatggagtactgagcttggttgactcaaactgaagatccatttctgctttgggctgaactacacatgcctaagttttaaacaagaacaagaaatgagtatcttcacttgaaaaagggggaaagaaagaaagaataaaaacagatacaccatctataatatgtcaaagacaaatacaacaacataagaagttgaggaaaacttagaaacgtgagttagtgtttgagtacctgttttgtgatgtcatttgttttttcctccatgaaccacaccactacatcccttcctgcagcctcggagagctttttctccaatttaggaatgacctcttcaatgggtttcctcaaattcccgataaaaatgcccccatcgccaaatctccgaacatcagtcgcaaaaaatgtatcgaacccaaaacagctcttcaactgcaatatcacatgttaccccccaacaaattatcaataacaagctattgtgattaaatagttattaaaaagtgggattagattaaatgatttgtatgtgtgatttcgttatgaaattagtcactagcctaacatgggagaacttaagttctcttaaaaaagctgagacaattttcttataatttattattgtcaactcattgattcttctatatgtttttttctctatatcttataatcaaacaattggatcattaatatatagtgaatacctttttgaaagaaaaatacttggagaagctaaagcaaagcaagtaccttgttgaggtcaagagctttaaaggtcccctcagcttgctccaatctctctttctctttagtcaagctatcacgtacaactctgttaaagaaagctacaagtgggttaccactgttttccctgtcaagctccttcagctttctatctgcccttttcttctccaactttatggctgcttcaatggagggattgcccataaacttcttgaactcctcgtctgttttccaatccttctcttgttcttgttcttctccatcaatcacttcagtctcttctttaccactctcaacttcttcacccttcttggtatcagtaccgctttcgctaactgccttttctgaaacagcagcagaagaagaagtgggtttgttgtctacctcggctttaatgtagaatcttagagattttcttgaactgggtttggaaaatagggaaaaagaaaagtgggtgctgttggaaaatccatttttggttaaagaagtagtagttctgctcttgttgttgaggtgccatggtgacatagaagaatgcgaagcagagaagagagtagtcgccattgtagttgggattcgagaggttgttgaatgatgatatgcgaaacgagagaagccatgggagtgaaaaaggattctattgaaggaacgagaagagcgatcaaaagtctagaagtttggagaagtgagacaggtggagtagtttcttaaggtaacgacatgaaagaccagaccccactcccatgaataattggatattgccgttgctaaggataccggtcaaattttttatttagaccatctcccatgtataattagaggaaaaattggctgtacaaattttataagagtgcttcaatagtaaaattatttatttatttttttaataaaaataataagatttattaattaataaattggttcaaaacaatataatgcactttagaataacagtcctccaactgaagcacacgacctgcagagaaacaagaatctcttgccaagtaatgagtcaacttatttgcagatcgtttttcaaaacacaaatcaacaaaagataaagccaaaagcaaattttaaaaatctagaacaataagaccaaa

SEQ ID NO: 300566 - DNA, 1141 bp, Cannabis indica
tactaagagacatataatcataaaataataagtaaatctttaattatctgctaattatcatgatttaacaatgcgatcattacaattatcccccgttaaaagaattcatgctcgaaatcaaatttgaataactttggacgttagttggattctaatactcaagtggtttcctccaccttaacgtttcttcaaacatcttgaccaatactataattctattttaaggaactttatctttatacaacatggagatatcatgtatgctggcaatgctaatcataaggttagataaaaaattaataatctaattttttcaagaagttctaaaaatcttaggaacctaggttatatcttacccttgtccctaaagtaattcattcctatcactggtaacgtacgtagaatgacatgttttcccttacttgggaatttctttacttctgagcttcatattaacgcatctcttactgtctattttgagaagtaacaccttggccataattttctttaaaatctatcatgttcgctgaactgactttggatatatatattttttgtcttgggtttcaaatatgatacttcatactgttcgtatctcataaggaaccgttcttatcataccttgataactgcttgttgtatgagaacttacttaaaaggcatatacttatttcatgaattcttaaaattcatcatgtaaacttgcaacatatctttcattatccgaattatcccttcagactgaccatctgtctaagagtacgtagaaaattgtactaaacttcaatttcgtacttatggcccttcttaaattctgacaaaacttagaagtaaatttcagtttccaatttgaaataataaactttagagtcacataaggtcatactattattggaatttattttaccaggacctagatttactaacaagtatgtttttaacatcctaaatatgaacttctaaaataatataaaatgaaacacataaaagatatgagaagccttacattggttgcagcggaattaaatgactccttctgctcagatctctaacccttgtatcctttctgtagcagagtatcaccaagatctgagttcgacactcctttagttgtttggattcttcacagtcttacacacta

SEQ ID NO: 300567 - DNA, 2336 bp, Cannabis indica
cgcttgatttggtggcggagttctccgttgaccatctcagtttgccttttaaacttgtcctttgaatcaggcttgtttctcttccttgaggcctttgaacccgagggggtagcagctccaggttggtaggtaagattcatggcttcgagcctcttgcttgtgtcgagaaggggaatgttctcgggcaaaggcacatggcaatattttcatataaatgtatccatcaaatccaaatgcatgttatcctttttcaaggctagattccaaatatatctccctactgcagaaatattctattcttaatattttggaaacctaacccttctttattcttagatttgcacacttcattctaagccacctgatccaggacttaaatctgaaatcgagcttttccataagaaaagctctacaaatattatttgctatagcaagaactattttgtaaggatataaatttgggtccaatatgtatgaattgacctaaagaaaacattaattcggacacacttatcaccatatgaaatattacgagtactccatgtcttaattctagttgtcagtttatctattatcccttcacaatcattgggattcccatgtacttaaatgatagatttagcatggagttcgaagttttaaaatgaaatgagcagagaattatatgtgttgggatgcttaataaattttctttgtgatgaaaattcaagtctaatacttcaagccaattttttactaggatcccttcactttttgaaaaatattgcgaatagcatttgtacaaaattctcttaactttccataaaaaatcttcaattgtccaattataagccatatcgagagagttgtggccaaatttttttttttttttttcattgcaccaggatcattttagagtcaagaaaagtgaagtagtgccaataccactgtgaccgaaatggtacgttttacatttatcaactcgcaagcgcacaaatttttattatagtgtagagattgtgaagaatgaggtcgaacccataaaaattacatgagataaaagaaaatacatttttaatctaattagttattataattctaacctaattctgaaaatagtgaaatttttggtaacaaaataaaataaagtggttaatggtaaaaatgatagtaacagtattttcagtgatatttaggggaattattaaggattcagtatccacttaagtgtatataaatatattttatattttatattgattcttataatttaattagtaatcaaactaattatttttttaacaaaaaatggattttctttcgctttaaaattataacttttaagcattaaacgtgaaataatttaatgtaaatacataaaatcaaacaatattatttttaataaaatgtagaacaaagtattaataatttataactctcaaaattatgtgatattaaagatgaaagaaattattttaagaagcaaaaagcataagcatatattgtactgaaaatcaaaataaaaataaatacttaattagatacaatgaatttcatcgtccaccttaataataagggaacttagaaacccataagaaaatcggtaaactaacgagcactttgagtgttttttctgaatttttctgtctaaaatagtattgaattctaaaaacctaaacttttatttataagaagataaaatgactaatgcccaattaaacttattacaaactgcatgtaggtaaaaatataattaccttacagttaaaactatagttgacacgtgcgttgattggttgctttggatgaggcggtgccacgtggaacacgtggattggctgaataaaatattcaagtttgtgctgaagggaaacagtcaaggaggactagtcacgcctctagcgtgtgagggagacgagaggcctagaagaggccatgcgcgcatgagggaggagagggggacagccccctggcatgagacaggcttctgccaagccaatggcagggccacacggcgttgattttggcaggggatattttggcccaaatttggcctttttcatgggctatttcaactttaaaatgccatttttcatgctttgggcaatcttttcgtcacctttattagtttttttttttaatacaaatgctattttcacaatcaaacacaaaccaaattaaatctaaataaaatattttcaatataaaatgtatcacaataattttaatgaaaatatttattttaaatctaattaacttgtaagtcttttaataaaaatattgtattttcttaattttaatttttttttctctattatgcctattgttgctcctaaaatcgcccaatatacgtggac

SEQ ID NO: 300568 - DNA, 3848 bp, Cannabis indica
aaatagagtgcctataggccaaaagcaataacctgaaagcctcaaggccaaatatgagtaaaaaatcaattcaaatgcataaggttatggccccgtaaaaaccgtacagctagagaagagccaggcagagttcctataggaaccacgtaccaggctaaatctctaaggcaaggtagagttcctagtaggttccaagccaaaaggcagagttccttgctggttccaagccatagataagactttgggcaaccatacccaagggtacttgtcagataatgtcattgtacaagggtaggtatcaacaaagtacaatcttaagtgtaacaacttggacaaatgttgagtcttaagttgagcattctactatagtagactcgcgattaagtttcatacagactttctaagagcaccaagtatgcgactaaggctgtatatgcatataaggccatgaaacaagatttttgccgaggtcaaaagaggacagaatactagccactcgctatgaaccaaggcctaggttagccaaggttcccaagctttgagagggtcgtccaggatcccatgactaagccaagaaccagctagggtcaccaaacctaggcatgaactagctagcctcctagggtgaaacaaagttggccaactaccatgatttaatcttatggcgggccaggtctcaaacaagacccctaaggccgaccaaggttagttttgaatcgaaatgtgtgttttttcaatactcgagagtgttcttcatgactcaaagagtcaagaatcacaacgaatgccgaaatagactcttttccattaggaaattacacattatgcattcaaaaactatcatgaaaatcaaaataccaaaaagattacaatctaatgtgagaaccaaagagtttttaagagctttaaaaatttgaaacttattaatggtaggttcaaagaagagatgtcaaagaaaagaagaagatgcaaacaaggagagagaatatcaaagatctaaaaccatgccatgaaaaagccaatactttgttagacaaggctgctcgactaaagctactacagttaagatgagagctggaaagtccctatccgactagatatttgaacagggacttgggggcaaatgttattccaaatttttccacctgatgtggcatgtccatgtaagctaagactgaggacacgtggagtacaaccttgtcaatagcaagacaaagtctccttacaaggcatgacaaaaccgtcaagcaacatgtgagtggagttaagcaagatgtcaagaagtcgcacaactatgtctagacttctaaaatgagtacataggccggccatgatgagcttgtatggccggccaaggtttgagcacaggctagccagccaattgtgactttcagactaaggaggggtccgttaagccaaggaaacttgacctctggaaggaaaagatgtacaaaggctggccaacacctgcaaagggcggccaccacctataaaggctggccacaacctatgaaggatggccaacacttgccaaagctggcaagaagaagacctgccaaaccctggatcagcatggcctcccagaccctggaaggaacatggccggccagaccctaacttgcagacattatgtggtcgaccaacttgcacctagcaggtgcatcgccaaccaactttttcttcgcaagactttggggcgcaatcttcattcgtggacaacagtcaagcagcgaattaggccttgacaacccataaaattgagagaaaatatcaacaacttccctatttttgagagataattagtaatttaaactttattaattaattatgtaaatatatcttcatttaccttttttgagggatattaaggatgtaagctctactatataaagagcattagcctaatcctaattctctaagtctgaactctctaagtcttaagtctccaagtctcactaaagccttgaagctctaagtctaaaatcctaactttatcttctcttctacacgccctagggctctctcttagagatttgcctactagattcatatattgtaatcttaagagagctactgtagattccacaatacttgtgatctgagtagtattatctctggtatcaatataaccaaaaggcgagtaggtcgttacccgctaactatgggggtcgaacctctataaaatctcgtctcttatttacttttttattcttattgtgcaacatgtggcaagcatcagtaataaatacaagtctactatcggttggtcaaatctaaagtcaacaatctgactaataaatataattttactttaatctattgtcttcttggaattttctattatcataattgcttaaaattctaacttttgtgataaaatttaattatgagtcatgttaaaatcattgttaattatgataaagaagatgacaaaattaaatgaattgtgcagttgtgaatttattattttgattaatttatctttattttgcttaatgtttttattatattaaatatataggaggttttctttagactgtttaatggataagattaattaagaacggttgttttaattaattattttggtgatttagacgtgttcgtgttatctgcgattagtaatttggtagagtgtatgaattgatgatgttaataattacttggatgattatttagtagtggagaatgacttcttaactatttttattgacgtataattattttttaaaatttttttaattatttttgtgattaatttttattattcattaaaaaatgtccattttctttacttttgcactaattggaataatgaattgaattactagacctcatgggatcgatttgtattatactgctatatagaagtagctgattagtgtgatattaaaaattgttaaattgttaagccttaccacacacattaccattctatggattttttagtatatttcttaatttcttgtaattttgcttgggaatgaggacatgttgctgatgttgatctggaatggagagattttgcttctgtgagaggatggttagaggatgtaatttagaaagtagactctcaagttcttagtcgggtggcgatgctttcatgggctatttcgtgtgctcgtaatgagtttgtatgacaccagtgaaggtaagtgttgaggaggtggtagtttttattaagtgagcctttgtaatcagttgttagttggaaagagtagtttagtcttttacattttcagttatagttattagtgagttgtcaattagttcctttaactaattcaatatataaagttgtaatttgtacactgtctttaataataaataatgcacattctttcttctctctgattctctctattttctctttgtaaaatggtatcagagccatgatgatcatgctcatatcttctacttcttcttcttgattcttcttcttcttcttccttgttgatccatgtccatggctcgtggaagagttaatactcgaagccagacctcacaaggaagatcctcccataactccaatcctttctctgttttggagccaaataattgtgtccacaatgatccaaattgtcatccacactatctttccaacagtgatcatccaagtgcaaatctcgttccaaaagttcttactggtagtgataactatcattcagggaaacgtgcaatgagagttgcactactggctaggaataagatgcagtttgttaatataaaattgcaagaacctgatgaagatcatgaagattatgatgcttggcatcaatgcaacagtttaatagtttcctggttgctgcatttgattttttcagagatttatgacaacataatgtaca

SEQ ID NO: 300569 - DNA, 1080 bp, Cannabis indica
atatttcttaaaaattattttattaagttatatggaacctgctacttaattatactataacaatatatgacacacagaaaaatattaaacactaatgccttttagcaattatcataatttatgtagctagcaattaattttcacttcttttctttaatatacctactacctactgatttttttggtcaaacttttatatattgaatgccaaataatacaaaaatgatatccctttaacgaagacatgattttttttttactataaaacaaactctatttattgtaaaagaatcaattaattaattatgatacaatttacacctcaataacaactgtcagatattaatgcttaattatgtatagaaggaatttcatagtcatatagtcatactatattccatttcaaacataacgtaaataaattaaattgacagacagtctgcccacccattattaattaattttctcttatatatattatttttaattaattatatattattaagttttgtacatataggattataatgtttttataaatagttcttagttttcttcattttcactaatattaacaaaaattaagccccaaagtataaatatacatatttaataagaaaaataaaacattatcaatgctttatctcctatagtaaaagatgctcatatcttgaattattataattaattgcataaaattcatgtatgtaataaaaagaaatcaataaatacaaattaatataatgtttttatagtaatttacacaacagagccactgagtagtgtttatctgcaattaatatatatatatgtaaattaatgctacaaatagtaaaatgtatatctctagtttatatttttaacgttacaaactataaaactatacatagtaaaaaatataaatatttatatataaatacattatatgacctacatataaagattttgcttgcctgtaaaatatatggacgttatatgtgcttagaagaaaaaggaaaaaaaagacgttatgttaataaattattgaactttccagcaaatcaatgaatttataaaattgtgggaaataaatatttaaga

SEQ ID NO: 300570 - DNA, 3458 bp, Cannabis indica
ttttttgtccctattgataaatattaaagttttacttcccatcattaggtgattcaacccaataattgagaatatgaccccatagaaaattgatatttttatataaatatactggattttgggtaaatatttacaattttattgtcatatagaattttttgtaaaaaacaaaaattgagcaactaaataataaccgtagaacagtaaaaacttaacacggtacacaatatttttgaaaaaaaaaaatacattattattgaaagaaatttcgtcccacggtaaaaataaaaaaaaatgagaatttgtgttgagagtttcatttaaaacttttaaattaaagtcatgggcttcgttgggctttttgtcctctggctgaattagcccatataaccttcgtatgtctcttcactcagtttgtactatcttactaaaaactctattttacatcgataggaaaaaaaaaaaaaaaaattgttctattagcacctccactttctttatttagtatctcttttagaaataaaaaagtttaaacaagggtatacattttaaattaaattcatacaaaattaaattgtgtttcaactaaaataatttaatagataataaattatagatatttgttatatgtatattttttttttgacactaagaaaaggggattctaatttgggacattctctgtgaagagaggtgtaaaattattaggttatgcttatgatcactttgatttatgttgtttaatattaaaatttatatgcacaaataagtaattgatatctataaatgtgtggagatgtaaatttttcttatttaatcaaacatgttttttctaactagactatgaagttttgaaaatcatttataaacaattttcttaatctcatttaaattaggcatgtcgaaaaattcatttagttggatcgagttggagttccgatctaacagatcacttctaatcagaaacattcggatacttattagatcttggattagattcgctccgacccgcctaatttttttccagacacagacggcctgggacttgagactcggaccccctgggacccaagacctagaccccctgggacccaggacccgaacccaaacgtcttgggacctgggacccggattccctgggacctaggttctaaacccggacccaaaccctcaccctggaccttggctcccagattctggctcggaccttagacgtcgaccctcgccatggcctgatccgaaccaggcccctagacttggcccctgtgctcggacctagcccgaactcgggcctgacccatggaactgtactcagacttgtaccctgggctcagcctcgaacatagtcgttggaccccagtcccggcgcaggcccccgactcaaactcaaaccctggccccagcactcgaccctcgttccccagccctgaatccagacctagacctcgacccattttctctcacctatgtttctcattccttacttaaattaaatgaaaaaaaaaacacacaatcttgttttttgtttttaaaattaaaaattaaaagtaattagagaacgtatttttgtaattttaattttatttttgtaatttaataaatgtgtaacaatattatcactgtaaatatgtaattgtgagctatacaatctttcaaaaaagaaaaatgagagatcagtgatttggaatggctacatgaacttgaagggaacattacttgagcttcaattgtgtctctattattatctatatatattacaatattgtttttgtttgtgtgtgaaaagagggttgttgcaaaatttgaaatgagtggaaatgaagagaaagcagtgcaacttcttaagaaaaaattggatcatatacaagaaataaagcctcttgaggcttatgagatggagatgttactcgtagaaatgctcatttacaaggtatcatatagacatacaatactcattatattaacttctcttgtactagctagtagtgactcaataatattgaatatatatatatatatgtactccaaaaatacaagtaaaaattacataaaatatggccttttcttaaacattatgctaaaaagattaaaagttaattaaacttttatatttttgtaaacaattttcgtttgattatacattttgactgattaatgatgtaatttagggtaactatatgatggcaaaaagaaagaaatgcttaactaaacaaaatatttctgatccacgttctccactatatcaggtacaacaccaattttagccttattctaaagatatacgtaccaaaacaatttgtacatttttttttgaagaaattaaattattcttttggagttttttttggccctaagtgcatctaacctgacttaatcgcatctttataataacatgattaataagtagaatcgactcatattatataatatgatatatttttaaataaatgtggatgtgacatgcaggctattatctgcatggctttagagcccttcaaaatagaggaagcacaagaatattggaaggattttattgagttaagaaccaattttagtgtagaaccagtctttagagaaagcatggaagaaattggtatctatgaaatcattacaaatttccaggactttcaaatggttgtgaagatgcttttggtggacatcaacaaggaacatcaaaagaggttaaagtccaattggttcgcgatttgaagatttgtatttatagaagagtaatgctagataaacacttgatcattttattacaccctcgaaattaatacgctatttaaatttattattgtaacgtatatagtattgaagtgtagaaagctaaattgagcgaaaaagtagttatagacataccctattaattttacacactctcctcataaagaaatggtctcaagttataaaatctctcattctcacaatgtaaaaaaattgggaaagaaaaaaccgaacctcgtacagttagtaattttatccccagatgaactttcaacacatttgatcatgtcccttaaaatatacacttgttaaaaattacccataaactcttatatttatagaaatttagtcattctattaagtcaattttttcatataattctgtttaaatgcttacgtaaatttagtcactacattttagtcacaacataattaaatttttgtgactaatataatttttagatttttagtcacaacaaaaaattatttgtgagtaaaagataatatttttagatataagtatattaatttagttttagtcataacaagtattgtgactaaaaatacatttagtcacaacaaattgtgatatttgtgactaatatctttagtcacaaattttttagtcataacataacataagaatgatgatttataattagagtaatttgcgacataacttccataagtactattagtttattgtaactaacctccaattctaaaatttt

SEQ ID NO: 300571 - DNA, 4228 bp, Cannabis indica
aaaatgcatgcataccatcagatcaccatagtaccaagaatttatctgaaaatcaatggaatgtccttcacaacattctctaatgacattttaaggcatactttactcacgacagggcatccatcagttagcacagaaccagatcctgctggttccggagcacatttacggtaatctcgtacctgcaaaagtattaccattttttaacagcattaactaaatatgaattaaaagtgaaatactgtcacaatcttttaacttcactttctacaatactagaagattcatagacctgagacccgtcattattgtttccaatgtatgagcataaatagtgatgaaacaagagaagcacaaaatattggagggagtgatgcagtataagtatgctaaaaaggtatggttcgtatggaataaattacacacacttatatgacaaatagtttcgaccaactgtattctttgaagatgcgtgtcacttgttaaaggtgacttgtcatataagtgttatgtcaagtttccgtgtaatttatgtgtgcacatattattaatcattttatcatttaaaaatgattattgtttataataaaatggttaatgaataataaaaagttaaccatctttttaattttgacaaaattgagataaatggcagagcaaactcacctcacaaacgagtgttccatcaacatacttgcaaggtatatcgtccagaatatctcccggcaaccgaccagattcaattgcctccaaaaaaaaaatcacaaagcaatgggaaagaaattattttttaatagaaaggcttataacagactttttttttggaataataaaacggggcaaaaagaggcaatatgtattttatttgaataaaaaaatttaaagaatccaatattgcagtcctcgaaaaataaacttcagtgctacagagatgctccaaatgatacagtgactaccttaaaattatatttctgtgttacatcaactgtcaatttattttggtttcttccaagtgtgcagacatggcaataattcagaacggatgtggttgaaaagaaatacaatgatttatgaagaattcaacttgtatactacctgtttcagaaatggtgaattatctaaccactttggggaatatactcctagataattcaatgaccaccttatatttggtattttgggatggaaaagcattatacaactttctaactatgttgtattttctttctattgaggatccttcttatttctttgtatccaaatataaaattatccttcactctattatttcaggatggagtggctattgagcagtcaaccaataatacttttcacatagtgtcctttttcagaaagaataaaatttatgaccctttgggagttgatcactactaaagaattcaataactgcgttctctttggcccttttagctggaaagcattctgcaattttataatctgtgttgtattttatgtttattaaagatcaactattcttttctttcttgtaattctcaaaatataaagttatatccttcactctcttattaaaagaacaaaagaaaatggagatgaaacttctcataggaacaaataactgggtacttactgagaagagagtttcggatgtcctatcatatggatgtaacagcttctgtgcatcttggagagctaattgactcgtagactcattctgaaaattcatcaagaaagttaaaagcaccatacaagacggtaacacagatttcctaaatcttagaaccaacattcaaataattttttgcagtaaaatttctgttcaacaaacctccgagggtttcccaatagaatatccatctaaaaagaggttcaaagtaaaggacacttctctatctgtcaaaacagcaacaacaaaaagtgattcaaaacattcaagtctacattataccaaaataaccaacaaaagtatctttaataaaggttagagagacttgagtcttaaacatcaatactggaggcaatggttagcaatctgttcagtctattaccaactatgactaacctttaactccaagttgctcttcagaagacacggatgacccagacacccgtgcaactttctcacctccctcaacagcagcaccctgcaacataagttgatccaaataatcttttcataagaaagcaatgaaatacagaagggatataatagaactgtacaatgaaaacagacccttcattctattcgtgccacagtagcgagcaaactataaataacagatctttcactttgcaatatacaagggaaaagaaagctttcttttttgagagtagaatacaattaattgcagcagaaataataatatagatttctctaacaagtaggctcattttcaagcagcgaaaacttcagatttctctctctgtctatttgagaaaacatacaggagatagtacagaaagtggtggggggaagattgagtgcgggtgctaggacttaaaatgaatgaatagcttatcatcccatttgcccatggtagaaaagggtttcgttttcacaaacaagaaactaagatactataattgtagctttataataaatgttaattcagcaatcaaatgaaacaaaaaggaatacattaccctaaattttaccatgctcttcgacttccaggcagactaattattttttgatgatagtgccactaaaaataatcaaatgaaacaatatttgttggactcactcaaccacatggaaaaaaaaaatcataaaaaactatggcaaaacatcaaaaggaaaaaatccctcaaacaacctcgaaatcaattgacaagcattaaaatttccaagtgtcactttttctagagccccaaataccaaaaatctgtagaattcactttttcctaataacagccaatgagcaaatcaatatgactacacgtccaccatttgcaaacttcaatcacgtcccacaattttttcaggtgatttcgtagacccaaatcaagtaagtaccgaaaatcagtattctcaaaactttacctcgattttccgagcaattgggtcgtccctgtgtagaattcgtgagctatctctagaattctcgggcacatcttcgacaccaacgttggtctcggattgaagagaagagttggggcggaacctggtacctgtcttcgacaatttgaatgacacaaccataatggggtttttctgaaatcttgggaatctaaattctaaagcgtttctttctacggcacctacatgaatgtttggatcaggaaatggagatgagaaagggtcaaatacatattcaaatgaagaaaatgaaactaaaaccctttagcacaaagaacagattgaggttttgatgctcaagattaagaacaaaaattgcccacatataccaagagtttctttttctgtatttctttttttgttgcaagaaatagaaaaatgttaaacatttcctcacacatcaatagagtattagcaatttatctcttcaatatttcatagaaaattatttatattaacttatttatttaataatatgttctcaacaaaatttatttatttaataatatcacacggaagtcataggctgaatatcgagcgggttgaccggattttaagtttgcgggttttagattcaaaaaattatacccgtacccaacccgtgaaattaaattcctactaaactaacatacatttaataatgtgggtattattttgtttattttattactaactatttttatttttattttaaaataggagtcttaaatattcgaggcctaaaccggtggcatatagtaatactaaattagaaaacaatatttgagacttatgacttcgttgttgatttttaatatattaactctataataaataacacaaacatgttatccatttattttttaaaatttatttctttatttatttttaatataaataaataaataaatcgggttggcgggcgagttcggattcaacccaaaacccgatggccataaaaaaccaatccgcgaacccgcccgatgggataccgggttgaacctgacccggccgaacaaaatcagttttgaaaatttgcatgttgagcgggtcaggtccgagcgggttggtcggttcgggtcaaacccggtcaaaatgtttagtcttaactgaagatgttaaattaaagggtagatactattttggaccatgtgttttgtaaaagttaccaattggatcctctgttttgtt

SEQ ID NO: 300572 - DNA, 596 bp, Cannabis indica
atatattaacagccgaaacattctttttgtctcctaatcatatgtctctatcaccaaaaagttgtggaccaatattaaatctcatcataaattactataatttggggtcattctttcctttcaacttttttaatgttcttgtccaatatttttaaggctccattaagtttttgttttcattttatttcgaagaagaaacttatgtcaaatttattcctgttatatattgattcaactctcatttcctatatatcacaccccataaattaatagctataatcaaaaagtaacttttgtttaaaaaataattgcacaattttataaaccccatatgtgataaaaaaaatttttactaaaaagtggtgtgtatataatttaatttcatgatgtattttgcattatggtttgtcaaaattaccatacaaattcttaatgaaatttaatatttctgatttaatgttgtatttatttcatcattgaaaggcaataacaaccttttgatgagctgcgtaccttcatgggatctgactcaaaagctacattgattagtaaaatgttttcataaagggtaagtaccattttggactctctatttt

SEQ ID NO: 300573 - DNA, 1091 bp, Cannabis indica
gataaagtggtcatatattttcaatggtgatatgtattagtttagaaataaaatattagatatatgtaagtatacaaaatcaaatttccttatgtattttctacctatgtaaaaatatattaaatgtagaaattgttcacatttcataaccgttgtctagataagatcaaaaatatctgtcatcccattcctataaatagcactaacaattatgtacaagggatgaccaattttcttaacttaaggaaattctaccaaattgtaatatgtaatcaaaaactataaaataaaaatgactcgtgaaatatctaggatttaactacaaaactacgtaaaaaatttctatctcttatattataattcgtagtaaaatatctatttattattaagtatttactgtagaatattaattatcaagtctcatttatgttaacaaaattcttagttaacaatttggtgctttcattgagagcacgataattaaactctaaaaaacacatctccctatccggaaacaaaaaacatgcgtaatgtaaaatactactcaagatattcctgtggaacaagaagaaattgttcatcatcctggaaaggagcctcaaagaactcagccctccaacaacataaatacaaggataccttctgagtgggacttcaaaaaaaattggtgatgaagaagatgttccagagagaaggaatgaggaagcatatgatcccacaagatatattccattggtggaattagaaaatagtcaacttcgacaaaggttggttaaatctaagcatagtaacactgagttggaatgtgaggccgctccagcacgtgcaattgccaacaacacacctgcagatcaaactgtgcccccaattcagttaagcagcctcacagatcaaggactaggagggcacaagatgttccaactgaagggaacaacacaaataacctacacgtgttaggatttatgccctaaaagcaagtatttattggattatatattatagaatatatgaaatataaatataagataaataaatatactaattatagaagtataattaataaatatctgaaaattctatattcatataga

SEQ ID NO: 300574 - DNA, 6369 bp, Cannabis indica
agaaggcccaattgtaatttttataaaatacaaaatctaaaatagtatgtaccgtaccttcatttaatgatttattaacacaaaataagaaaaataaaattttatagaaaatttcatgccatcttttatgccatatatttatacgaaaattatacaatgcacctcttaaaaggaaagtattgatgtagtccttatttttttttttttttgttgcatctaagaaacttttttagtttaacttttcttatggtcgtgtacattataattattgaagatagttctgtaaaatttttaaaaattcagaaaatttaacatgccaaaaatgaagttcaaattgtctgttacacgcatgactcttttattctatatgcgtataaaatagactttttgaatattgctttctataatgtaaattattctaaatttcttaaaattttgcaaaatatcttacataattataacatacacgattataaaaaaaattagatttattattttttttttctaattgtcgaaataattaggatgcattcatacactcatttatttatatttatatatataaataaatatataacttaccggccaatcatcattattgtggcttgaggattggttcctggagaggcattgaaagttgagctatctacaacacgaagtgaatcaatcccaaacactttaaaatcaccatccacaaccttccccactacacaccccccatgataatgccagaagctagtcaccgagtttcgacaaaacgcttccatcgacgaatcatccgtgtggttcgtcggcacaggagtccccaagaacatgaaatccctagcaccattatagtcagtgtacttaaatcgatccaacgaccgactcttcagcaaatcccctatctttctcgttgccctaacacaacgagagagatcagtcagatcagaaaagtaattaaacctaacacgcggtgtggcttcagcatcaattgctgaagccaaccagagcgaaccctgggacaagggccccacgattttttcgacaatgcttgctagactcaattgtggtggagataatggggtggagtagaagctaaatggtaatgaagttggagcaaatggtaagctataagagacagtctctatgtaataatcagtagtgattccaacaacttgggctgtggaagtatcgaatggaaatgggattatgagattaatgttgttacgtggattgtcagccatgaattttccaacattgggttggggtaagagtatgggaataaattgtgatgagaggtctgaatgtggaccaattccactaagtagcaaaatttgagggcttccgagtggacctgcacttagtattacttctcctttgttgcgtattattgccttgtgaaacattcctcttgcatctgtgtatacaactcccatagcagatggttctgtttattgaaaacaataattaaaaaagatactaattatatattaatgtcacactaatatatatagttaatttttatatgctacaattgtgttctattattaaaattacataatcgatatagaagactcgtacaatataattttgatcagctttacaacatttattaaccgttttagaatttttagtagagaaatgctgagagttaccttaagatgtcaagtactatatatttagtacaatttaatatccagtctcacaatcttaatttgataaataatttaaaaaatcactaaccaatcacaacatgggatgttaggcctgcctaataacaagactcttttatttatgaatgtttttacaaaaatactaaattttggacaaaaaatatttataattttactgttacacagatttttttacaaaaacactgtacaaacaaccatataataataaaatagaacaattaaaacaaaaaataaccgtagaacaaccgtgaaaacttaacataatatacagtaaactttcacagtatttttttaaaaaaaaaatttccccacaataaaaagagtaaaaaataaaaaatgtatgtggtgtaaaaactcctttatttaatatatgatcttttattattattacgtgttatgtttttgtttagagagtcaaatatatggaagggatgagccaacttttctaaccagaaaaatattgccttacttatttaaaactctaattatgatctaaatgtaggtgtagttgagtcaaaacatttatatatgttgcactaaaaaaacagatcttattttaatttgttaaaaagagtcatattaatgaaattaagttatatatatttatgtaaactgaacttataacatacttgacattattgtagaggagaatataatcttcttgacagtggcatgaacagcaattcttaaatttttgaggtctcctttattaagcaactccacagctccatgtcttcttcccatatcatcaaaaatcgaacccgattgtttagctccaaccttatgttctaaagtgactccattgtcaggaccaacaccaacttccaaaaaagcttctttcaccacactttgccaaactgacaaattcgaactcgaaaaaactatactctcttccacccactcataagctttctcaacctcttcataatcccattccacaccggatttcgaaagaaattcactatcggctctagaatagaatcccgcgtttatcatgcttgtccctcccaaaaccctacctctgacattttcaacgccatcctctgaagtgaacctttgagctggcgtatcgccattaatattgtcttgttgttggagattagctaaaaagcctgatgctttcaagacattagggtaagcattaggaatgttgcctctttcgaggacaagaactgagtacttttctgatagagtcgcggccaatggacaccccgccgtccctcctccaatcacgatgtagtcgtattcttctaatggtggcatgtcagtcgcattgtataccgatttcatgtaactaaaatctgtgtatcgaaacaataatgaagggtaagacatttattttcgtctatttttcgatattcagtaactcctgttaaaaaataatcacaacaatctagtataataattaaacatacaatatatgtaatatataaatatattaacgtaccataatcagatgcatgtacatgcaattggtcaagaaatattgtgaaaatgattagaagaagagatagagaaactaatagcgtcattcttatatatattctctctatctctatatatgtatatatatttattttgaagaaatgatcacttaaaaataaggattgcttactttaagtatttatagtaatattgtggttggttggttattatgttaaagtcagtctcttgaggattacgtttcattttcttgttttgactacagtagagagagattagtgaactttgtttagctgaagtagtttaacagttttgttagttgcctaattatctgacttatttatattatataaactattatattaaaaaaacattacagttttcctttaaaaaggaattaagaataactattacaactaaaaaaaaatctcaatttttgacatttttgacaaagtacaattctgcagtacaatataatataagatcatttgaataggtgggcaagtatatatatatctatcaatacacaaattatatattgagcattgttatagagtataattggtgtttagcactactataaaatattatcttataattggttagaattttttttataatttttattaaaataaaatagtaaaactcgatattaaattatactcatattaatattatatctcataacactgcttttagcatttttcggacaaaaattacttaagacactagtgatatacttatagaaccttcttcattgtcgtatttctattcgtgtaattaagtatccggtttcgtttaatataataattttttaaagaatatcgggttgtttcgtgtaattctcttctaaaaattatttgaccaagcagtacaattagtacacgtgtactatcttaattagtgagtaaatttaaatgaacaaactaattagtaattactgactcatgacttgtgaattaaccaactaccaagccgcaattaaaattgaacgtattcatactcaaatttggagataaggcttaataaatttcaccacccaacaaagatcagccacctgcttccactttaaccaacaaacatcaaagaatgtctctacacttaaatgtagttactcatcatgactttctgatatcatatatatatataattaagtatatatatatatatatatatatatataaatggcttaatttcttccaatatttggtatgtatatatatcttctcaactaccacaactctccaccagacacaactaggatgtgtcgaatctaatcacaagtatatggttaattatatttttctcatcattgatatgattattattgagtagtctatcttttcatgaaaacatatatacttatatattatttggcttggttgccacaaaattagcattgtgattttcttctgtgcctttacttctaagccctttaaccaaaactccacaccttatatatttatatatatattgctccactatggcctatatatatatatagatattataacttttttttcttatattaaactgggacaacattaattatgcataatatatataaccatataacttatttaaatagttttttagtgtaaaacaaaaaaggaaaaaaaaattatcgaaaataagataaaataaatatagggatctcaatgcagtacaatgtcatcattctatagaatattacttatagtaacatacatatatatagagtcaatatggtgttgtgttatatatataggacaaaacttgtttgagattatacgtgacttgccatcactttaaagtttactttaagctaaaactttcatattaattattgtggcaaagtttagcttaatttatgcattaaccctacatatttttaattgttgttttgcttgctaataaaattgaagattatataaataaactagcaatgtcattaaattaaattatttcaccataaggagagatcaaacacaaacaatgtgaatttatataatatatatatatatgttatatatgtgtaacaaaataatactacaaattagagggctcttattttaattttttgtccatatacactttggttagatatcattaatatgaatacatatctctgaacaaaagttctcgccccatgcatgctataaaatgtgcctgaagaagaagagcaaaacaaacaaagcatatccgaaaataaatcagcacccctagctctaactgcaacgaaaaacaccatcgaattttaaattaacacaatctaattaaatatcgaattcccctaaaatatttattacgagagtttttcatattatattattattattagctaaaaaataaataaatgacaagatataattaattgagttaagacttgatagttgttatgtataatataaacctcacaaatctatggtgtttatattaccatttatcaagccttaaccttatatatatgatggggttttgatatataattagggtaaattttgtgtttggtaagcattatgtaatctatgtaatatttagattaaaatagtatttaatttttttaaaaaaatatattaattacgcaaggataattattttattttattttatttatgttgttagtgagttgagattattgcttaaaatagttgtggcaattctttcaagataattagagttgtattaactgtgaaagtaaaatattatagtattttttacaagatatgtaatcatttaattaaagtctaatatgaaaatccattaaggttatatataatttggggtaaattgcggcataaatacctattgtttcacacattttatacacttgaatacctaatgtttatttttggaggcaaaaatacctaatgttttaattctcttacaccgttactaccacttccgttattaactcataaatatggacacgtagagggccaaaatgcattacatttatttattttattttaaaatttaatattattaatatcaaaaattaaatactacttgttttttaaaaaaaaaaataagagaaatgcaatactaaattaccataactgagtgaaccagtgtagtatatgtaacatgattatcgaattgaagtgccaatatcatgtgaaaattgttatgagagcattctgatattaaaaatattaagttttaaaataaaataaaaaataaatgtaatgtatctgaactctccacgtgtctatatttatgaattaacggaagtggtagtaaatgtgtaagagaattgtaacattaggta

SEQ ID NO: 300575 - DNA, 1944 bp, Cannabis indica
attaacattcaatttttttttttattttttttgagaaattttcaatattattataaatcaaagataatttacaacaatagagaaaataggatgtagaatttctcccatctaacagacgtcttcatccaatcctagagcatacttgactaagccgtgggcagcttgattagcatacctacgaacatgagcgacagtaatttcacggaaaaaggacaaaagacaacgtacatcattaattaaatcggaaaaacaagataagtgtttgtgtgaagaggtcaaagcagaagacaatctcaaatcgtctgtttcaacttgcattatcgagagttgttgttgaaaagcccaattaagactgtggaatagagcctttgcttccatttcatcacttctaaaacagccttgtactggtttggataatgcaaccacaacttttcctttgtgatttctaatcacagctccaattcttttttttttgtcattcactgccgcatctacgtacattcattttaaagcaatttatgtttggcggctgccatggtgtcatatctgttaatcttgtgttgtgaccagcaacagtcgcctgttgtgcatcgtgtgtttgctggtgcagcacaaaaacatttgtatgttgctggtgcatgtgtcctgggaatgacaagctgtgttggtaacaaatcatctgctcaagttggcatgtatgatgatgctgatccaagggaattggatttgatggtttcttgtgcatagcaacaagtactacattttgttgctggtgcaacaatgaaatatctgttaaacttatgtaattaccagcaccagctactagttgtgcattgtgtgtttgctggtgatatacaaaaccagttgtatgttgttgatgcatgtatcttgggaatgacaagctctgttggcaagaggacagctgcttaggttggtatgtatgatgatgccgatccaagggaagttgatttgctggctactggtgcatagcagcaggtgtcacattttgttgctggtgcaacaatgagccattgtagatgtctttacctttttgatgtatagatctataattatcctcataattgattgcttgtgttgctagtgcagaagcatcaagttttactttcccatgaagtactttatttctatcattccaaatgctctacattacacaaattaggagttcaaaattagccttatccatagttgtcgagagatgaatgaagtagtcaccattatacataccatgagcactatggaaatcaatgttaaattttgttgacttccaaactgattttgcatgtttacatatgaataaagcatgccttattgactcacaagcactcttacaccttgtgcaaaccattaattgatagctttctttttgtgtaaggcagtggcgacaggcaatgcttgttgaatgaccttccaagtaaatattttcacctttggaggtatttacaaagcctaaaaaaaattccaccatcttttctaattgttagatgttgattcttcattggtctttgagatggaagttgctagatgaaagccagactttatagaataaatcacattggtggtatgatgccatataagtcgatcatgagattggtaataacttaatggaatagtgacgattctgtcagtgtcactttgtgtgaaatgctcttgtagaaaaggtatattccacaccatagtatcacacatgaatgtcgatacaagaaggtttggacacccagtatagctaatcggcttgaaatccatataacatggaatccaagggtccaaatcactcctaacatgtaacccactacaaatcttgtatcttagaccttttggaagcaattctctttcccaatggattccttgccaagttaaagagggagagtgtccttgttgggttttatgccctaaataaaattccatttcaatgtaatccgattt

SEQ ID NO: 300576 - DNA, 1574 bp, Cannabis indica
aacttgttgattaaaaagtaaggacaaaaataatactatagtaggtgacttgattttttttgtgccatttaattttttaatgttagttgtctcttcttcttcaccaaactcattgtagcttctttatctagcttttttgtttcctattttatctatttttattgtctaatgagagcgaaattttttagagaaccaattgttgatctcttttgttggatatctgagattgcaatagattttgccgaagttcgtagtttttttggaattgcagaaacctaagagctacaaactaatgttcttgtgcttttagctctccgatttcaaattaattttttccttgatttgaatgttcttttagttctccaattttttcaaaaccaaagcttagtggtttacctatcctgaaagtttatgtcctcttccaatatatcatgcatacttttctcaggataaatttgacgaatactaacgagccaatagagacctttttttttcggacattgcaatcttgtcttgtttttgatgagtttgttagtggtttgctcaacgagtgttgtgatagcttcagttatacttatgcatttacagagaaaagactatagtagcttcttcgattcataatgagttatttattaagagatgaagctctgaaaatttaaaggtttggacttgtgggcatttgggaaataggttgaaagtgaggaagaatcgaacgggtttatgtgggtttgttataaaattgccaaaggaaggggtagaaatgctcaaagataagaagcaagttgtgaataggagaaaatgagtattcttaagtctagttggaaaatattttatggttgtggctgagttacctaatattgttcagaccattgatgaatcataagagagtggaaaatatgaatgctgtttttaatttcatgcaaaaggaaatttgtcttcaaaatttttcatatagttgcaatggaatgatggatcctttattctctgctcttgataattttttgaatgtggttgcacatgttggcatcctgggcagcttcaacccaaatgggtttgttgttcgtttactaattatgtaatgtttggaatacaaactcattcattgaaaatactacccaataaaactaagttatatatgtatccttgtcaatataaaaatttacacaaaaacaaaaaagatattaaaaaattatttatctcactaaaaattatgtaccatccaattatgaaaatatattttagcaagttaatttcacagtagttacaatataatatttttgtcctatttgaaggatgtcaaacctcaaattgaaccgagattttaaataggtttccaaattgaaattttgtaaactttccataccagaacactagtattttgtgacaatgtattttatgtaaaaataaactaaaagttgtagataatttttagaatataagtacaaaaaccacataaaatatcaattctcttataattttttatccctcaagtttgtttagaatattagtacaaaaaaacacataatgtagtgaaagaactacttatccaattttcaagattcaagttaccgaat

SEQ ID NO: 300577 - DNA, 1037 bp, Cannabis indica
ctagctacttcaaaatatcgaaccaaaatagagttaattcgtacattaaaagtctcatttgatgacaacacaaaatggtatttctataccttgtatatctacagtcaataaatccacctacctagctaaccgatattgataataaagaagagtatagttataacatataataaagtaactggctgccgataattgttttttcataattttttttatatcttttctaatttttctaaaaaaattatattttttttgaaattttttttatcaattttattaacggtaatcatttaagattacatcactatttgtagattacttaataaaaattatagtgccgtttgataacacttttgtttttaaatttttttaaccacaaaatgaaaataaaattttaatttttaaaaaataaaaatttaaaaataaaaaaatagcgttttgtaactgtttttgtttttcaattttaaaaatcgaaaataaaagtttgttctgtaaatttattttcatttttatttgttgattttatttaagtctggtgtagattcggggtcggattcgaggtcgggttagagaccgggtttagcaccaaggctgtgggagatttgggttcgggtttggtcggaatccaaaatattaattaagaaaaaaaaactgtttaaaaaatattaaaaataacttctttttttttttttgttttcaaaattttaattctcaattaaaaaattgaaaagtgataacagttttatcaaacatgtttttaaaaaatattttcactttttcgattttaaaaatagattattgattcaaaaagtattaccaaacactatctatatttttgtacacattttacttaaaaccccataaaaactaaaattctgaaaaattcccaagtaatggaggacccacggtcggtatatagttgtagtgtgtgaatgcgttgttagaagtgattagtgatgtaatattcaaactcggtagtcgttcgtaatattcttgttctaagattcgattaatctgcttacttagcaactctcagt

SEQ ID NO: 300578 - DNA, 6209 bp, Cannabis indica
attgttcttcatcaattcgagccgtagtgatacagtactatacacacacatagcaagtcaagtactcaatcatagtgcggaagacggtggtaaccaactcgaaggagagaaggagattcatgctcagatcttgttattactctgcaacagaaaggaacaagggttagagatctgagcggaaagagtcatataattctgctgccatcaatgtaaggttttctaaactttatatgtgtttacttcattattttagagaattcatatttagggtgttaatctaatttacatgttaaaaaatctagatcatggtaaaataagtttcaacaaaaattgagacctagattaagttccaacagaaataaactaaaacctagatccgaatctaagtgtaaatttatagtcaagatagtataattttacataatctaatagtacatgtaattatcaaaccattaaataatattatataatgcaaggcaatacatcccaacagaatttatatcagtcaaattatgtacacatgatgcatgccaattattcactctctcttttaagttggatacaaatattgaaggttcataaaaatagcacgtttggcaaatctgttctatgtcggttgtcacaagtttgaaatctaacatgtactaattctggaatctgatagttgtcctttttcatttctcaatatattttctttaatagaatttcccttaaaaataataatattgaagtgaaaatggttgcattctaatttctcaaatgcattatttatttctgaggaccaaaaaaatggaaacagcacaaaaaattaaataataaataaagaccaatcattgcacatgtccaattagagaatttaattataattaagtgaagtgttttttcattctaaattattatttcatttcaaaagagatacatagattgttgtattatatatatgttgttgtcaaatctcatatatttaaattatgacttattgctgttgttgtgtacttaaattaaataatggaccttagatgatgactaatatcgttggttccatcatagcaaagaagccttaattaacctgttgcaaatttaattaaagggttatttttctttttcaaatttagagacaatctttgatttgatagacaattgaattagagataaaagagaaagaagtatacaaatttggatattgatgaagtaattagtgattaatggtcctaccatgttagtagcacatgcaaattccggatttgctgcttctcaacttggtgttattcatgcatgcatccatttcatccactctccaaaaatagacaaaaaaaaatttcaagtacataaagtttaatttggttcataatcttactgacctaatgactactgagttttgataaatttagaaggaatagacaaagtaaatttttaagttgtgggctttaaatttttaattctcttttatgtgtcaatatagtatgggatgaaaaatgagaagggttgttctatcaaaagaaaaaaaatattgagaagggttgatttttgtctcttcttgtagagaacatacatctttaggaatatatgagaatggacaatgtatgattctaattagggtgtgaatcttttacgagagtaccttgagattttgtctctctaagtctcaaaagccatattactcactttctctattttatttttattttttaatttttgcctaaattccattgaccttttttattgttattattacttgtctctcaagagggtttgtcccgttatatggcaactctttttttcttaattttatcacataattaaggcatgaaaacccaagttttagttcaacaactatgtttcttgttgctgaaaaaaattgttattttcttattattattatattaattagctaaactaagattataacaaatatgtggttatagatataatttagtggttccacacttcttttcacaaagaagaggtctcaagttccaatttcccttcctcaagtcaaaaacaaaaaagattgtaagaagtctatggccaatgaatttattataaatatgatataaaaatttgttataccaacctatttggtttaaaactttttgtacttatgttgtttcaacttttcaccgaagagaaagaaatagagaaataagctttgaaaaataaatggctgtctagtgtgtctaagccagccttatagtaccccaaaacacagcaataaagagatggagattcgaacaatctgagccacataatatgaaatatttccttaccaaacaatcaaatttgaactcctttagcagaggtagatcatatttcattagagaaacatattttagtgatgaaaaaactcccagacatcattatccatgacaagggttagatcaaatttaagtccacaagtaaattatgttgttggttagggttggttgagagtgcccttcacaagggtttgtctttaattttgttgagaacaagtacaaagggcaaagctgtttttaacagatgtttcgtcactgttctcagaaccaaaaatgaacactgttacaataataggttaccccacttgagctctcagtatgatgatgatgaatgatgtagctttctattcttagagaatttcagctacatttgaaaataagttatgtcacaacaatcaacttgatcttactctcaccatccttgttatcaaaattcattccttaatcaatatgaaaaatcacaatttacttaatttattgcataacttgtaaaaaaaaaaaaattgtgtcatatatcaatgtgatattgaagtttaatcattaatgtatctatacttctctctcgcaacggtttttatcgcaacattgaattgaaccaacttacaagttacaacttaaaaagtcattaagatttttttttttcaaaatatctttgaagggaaataaattcccttcacatgtcgatgatggtcgttgttttcaacaaatgcttggataaaacttggatgacatcttgaaagctgcagcgtcttcaatgacttgctccggctttgatcgcttcttggcctctttcaagtcggtgttgcaaccccacacccgaattgcaagccttcgacacttgggagatgactgttgcaaatacgttttgtaccagttgataacatcactcttctggatatttccaagttcatctgcttccttcttcgataagtcgaagatgtatctggaaatcaacaacaattaaattggaatgagcattagaattagataggaaagggaagtgtaatgtgattgatgtcactatcggttagcacacttttcattcttagacagcacacgttatacattgaagcactaaatttaacacaatctacgactgactatttagatccaaatgttatcaggattcagtggatcaaatcaggtggacactgtcatgtaggacccaagctttaaatcatatcaattatgaaaagtttaaacaccacggagaaagcatctaagcaatggtgttcctatccacttaattctacacaaatttgctcgttacgcctcaaaaagcaaatagatgattacacctactgcggaacattcctttcattgcagaatagatgggataacatgctaatctttatttcttaataacaaaatagacagatcaattatacagaaagaaaacgcaccttttatcgacaatctgattccacagacgattggtttcgtacgaaagagatggatctttctccaatagctttgcccttaaaccatctttgtaattctcgaaggaatttttgtcgagtccttcctgcaacatttacactttttcagtaacaaaagattcttctttatgcagcagtaaagatgttttttaggaacttagctacaaaaccttgtaacatgtgaatcaaaatatgaatattgagttcagattaatctgcataaaagtatatagattttcataagcaaaaaaatgttcaaaaaagaattaagatgtcagtgtagtatttttccatatgatatccgagggctatattaatattgtattagtcgtagaatctaatactacagacccacacattgcaatttgcaaaaattaagcttacgcctttatcaaatttccggggcagggtctagataaaaacactggttactgataacacactacctcacgatagaatattgctaagcatgtgatcaactcaagtgcccgaaagattgattgaaaagatgggcaaaagaataacaaagaaagttaatataagtcataaacttgaatactcaccaacaattcttccagaccattgatgaagttctcaattctctcttccaaataaaccgggttatactcagctgattgaacacagaaacaaaatccaaaaacacggtatgttatccgagggctacattctacgacataaccaagctgttcctttgtcctacaacaagaatacacaatcagatttgatcatgtcaatgaacagtggtgtcagactactcaaccccccaacacacacaaaactatcagcccaagcatagacaatttcaatactctatttgtcttcttcatttaaaatataactgaacactgcttttatcttttgcaagtctagatgcaaagtttgtcatagcttaacaagagtaccgagcaaaaccaccctccacaaggtcacacttatgggtaacacaatatttattacttttagtttcagtattcaccttagctgattaaacaatggttcttccacaatttcatcgaacagatcaaccagtgttttcagtctaacagaatccatccccatgtcctgctcaatttgaaaataaagctgcaatgcagaaccaaatcaatttattgctaaaaatatagaaataaagcatttgtattaaactctaactggtaaatgtgaaactattcattacctcgatcactgagttcttttccatcttgttcttcacagtaacatctctaacaaggttagcccttgcaggaagacagataacatattctttgtgtctcatttcatatggaagtgcttgtgcaagaaaaacttctctaaacttatttgcaatgctaattgcttcttcttctaacaaattgccatggcagaggccctcgacgtatagctgtacaaatgagaatgctcataaatgttcatccaacattgttcttttggaaatctcaaagaaaaaaataccaacaaaataaattacaagatgaaaatcgtttgtaacaaaaataatgtagcaattaattgccccagtggaaaatattatgggaaattatatgcaaatctttatttagttcaaactacagaaatgatatgaaaaaaaaaatttcctcaagaatggtgtattacaagtctgtgtagcatacaattaggaatgtatagtatgctacatcttactatacctgtgaacgaagctcgggaataaatgaaatcagatcagcaaccgataactgatctaacaactgaagcttctcatttgcatcatagaaactctgacataaaacttgcaatctcaaatatgatgaatgactcagaggcttcatgttggtattcttcaatgctctcttcatatcttctctaatgacctattaaattcagagcattagtttgctatagtaagccaccaggaacttttggctgaagttcagcaaaaaaggacgtaaaatctgaactgagtaattgaaaacaaataaacatttaagaaatgcaaagttacattgcatataccttgaatcgatcatcagttggcaagaaacttttggctgttgcaagaagtttggataacagaactggaagtttgttgttgaaaccatagaccttcaactctaacttatcacttagaacagatacagaagtttccaacttggcaatactggcctgcacagaaagaaaaaaaaatattcggtattcctatcaataacagacaatgaacatttgcaatacaaaaaagttgaacaaccgggtgaattccctactagaagaaagtattttaagtaacaaatcaagcatgtcagcacaaaagaaaaagtctttgaaatcttaaaaagaccctgaacattttacttggagttgaatactagaagataagatagattaagtgggaagaatataaaattttacttttaagctttatcataaaattaacagaaagacactccctttgcagttttgtacatagacttgtcttagtaattagaaaatggattgttcatttattctaggagaggtt

SEQ ID NO: 300579 - DNA, 2017 bp, Cannabis indica
tgacaatctatttctatgtgcttgtttctctcttaggaaacagattttggagcaatgtgttgtgttaccttgttgttacagtgcattataactggtcccttatgtttgatccttaattctttgagcatggacagaagccaaataatttctaatgtggtgttggccatagctctatactcagcttcagttgagaatttggaaattgaatgtttctttttgcttttccttgaaattagagaacttccaaggaatatacaaaagcatgtaatggatcttcttgtggctcggcaagcagcccaatccgagttagtataggcctcgagtttcactttagattggacaaaaaaataaatccccggacctagtgtgcctttgacatattgaagaactctttgagcagccacacaatgtgttgctctaggcgtttgtaagtattgacttagcttgttcatcgagaaggatatttcaggtctagtaatcgtcaagtacttaagctttccaataaattttctctaaaaagtttcattagcaagtttatcatctttttcatcttgactaagcttcaagttggcttccataggggtactcataggcttactaccctaataacctaagtcttccagtatttagagagcatagggtctttgggttatgaagatgccctgttcaaatctttccacttctaagccattaaagtatattaactttcccaaatcctttgatttgaacttgctatccaacttgacttcatatgattctaatgcattccacatgttgctaactaatatcacatcatcaacatagcctagcaatgctatgaaatctttcttagaatatttgatgaaaaaagagtgatctgctgcagaatacatgaactcttcttcctcaaaagcaactaaaaaattttcaaactattgccttaaggcttgctttaaactatacaaggactttttaagcttgcatacaacattgcaaggtagctcccccttaggactatacccttgaggtatagtcataaatacctcttcatgtaattccccatgaaggaaggcattattcccatcaagttgaggtaaatgccatttaaaaaacagttgtaagagctaaaaccaattttactgttaataacttggtgacaggagcaaaattttatgagtagtcaatgcctttttgttgactgaaacctttagcaaccaatgatctagtcttatacctctcaatggaaccattgtatttgattttgtatacccatttgcaacctataacatggtgatgggttgcagaataactattatccaagtttagtttttctcaagagcttaaatctcattatcaatggcattatcccattttgaaataccagttgcttggcagtaaaattcaagctcataatgacctgatatggagcaaatgacaactcaaaaagtgggggacaacctggagtagtcaagaacctgagacaaatattgaattgtacaatcattagcagggtaagaattagacaaaaaataatgataatcttgaagatagaaaggtttctgagtttttttaatgggtctagataaagatggaatagaatcagaaacagatggtggggagccatcattggattcacaaataaaagcctcactgagaacattaataggtgtctcaataaaaaaaatgtgatatgaatctggtagaccttcagaagtgacaaagaaaaatatattcatcaaattgaacatctcttgaacaaaaatttttgttagtttccaagtctaatagtttgtaggctttcattctcataggatatcccaagaaaatacaagaaacaactcagctgagaactttgatccattttgattcaatataaagacatatgctaagtatccaaaatgtttaaaatggtcataggcaagaagtttcttcttcaaaatctcaaaaagggatttgttaccttgatttgggattggtactctattaagggaaatttgataatccatgctaaaaaattagacatggtgtttaattatac

SEQ ID NO: 300580 - DNA, 2632 bp, Cannabis indica
acctcatcaaagaaaagtatgcatggtgaacacatccttgcacgactaaataacatccgaactgctgattcactttctccaacatatttattcagaagttcagggccctaaaaagccagtagaaaatacataattatatcacgaaatttctccaagttctatactagatatgattaatagaatatttcatttttggttcataaacaaacatctgctaaaaaattattaaaattgaaaaagcaaagaaggactaaccttgatgtgaataaaattagctccggcttccttagcaacagcttgtgctatcaacgtcttaccacatcctggaggcccgtaaagcaaaattcctgtatctaaattcactccaaatctcttaagagaaaagagtcatatcagacacaataattatttatagtgcaagatctaaattcactttcagacaacaattctataaatcaaattatgataacacactggaataataaagagaacttaaagttcggaaatttaaggttgcaatccaattgaaacacaaatgagtacagaagtcaaaaaaaatgctgaaccaagatgcaagtataaacaacactaacatgaggcttatagataagatcttgacaaaagaagtgtataataagagctaaagcatagctaagctaactcgtgcaacattagttcaactcgaactctcaataaaatagctgtgatagtttaatttcataacaaatttaccttatatttctcgtgatatttaatacgactaactatgtatcgatcaagttccttccttatatgatctagcccgcctacatcttcccattttacattaggaatggtagaaaaaccttctcttctagtagagggttggacaattttaattgcttcctgcaaaaatatcacccaagaattacttagtcatgctaaggttgcacacactatatgctcacttcatgactattttgaatgatcctttcaaaggatagatagcaactgcaacatataagcttgcaggcaatatgatagccacactggttatcaacatattcacctcaaagataaataccgtaaatcacctcaaaatcagccatggtgatgcttatcttttccattacttcaggcatgactggttctttcaaccattgtgtattttgatcctcctccatagaattcccacataaactggactttctatcatataaaagtttctctgctacaaggtgacctgcttcggaagccagggccttcaaatctgctgcaacaaatcctggggtagccctggctattttaagaagatcaaaagagtcttcaagtctcatggttcttgtgaggacagaaagaatctctgccctcgcattttcatctggtacccctaactcaatctcatattcaaaacgccctggcctccttagtgcagggtcaatagcattaggtctattagtggctccaattacgagaacataactctgtttatcgtcagaagaaactttcgattctgaatgtgcatccatacaagtcattaactgagtcacaatgcgtcgctccatctccttctgtaagttttctctttttgatgcaacagcatcaatctcatcaataaaaattattgaaggggcagtcttatgtgctttttgaaaaagctctcgtatattttcttcagattcacctaaagtagtttgttatcaaagcattattcacaacatacatcaacattttttatataaagggaaaagaaaaattgatacctgaaactccagagacaaactcagtggcagaaatattgtagaagggcaatccagtttggttggcaatggcatgagctaatttggtcttaccacaacctggtggtccatgcaacaaaaggccagaaattggccgaactccaaggaattgcaatagctgatgttgatagagaggcacaagtaccttcttctcaagctgcttcaaaacccctttaatccctcccaaatcctcaaaccctaatttcactttcacctcactcacaggaacagggaggtctaattccaaaacttccttcttttgtaagttggatgtcgatgtcggcatcgacacaaccccactgtcaacatcagacacactcggacaattctgattgttctcccaaatatttccatcgtcaacatccctcttatacttcttccgagaggaaaggctcctctcctcgtgtctcatgttgggttctaggacatcgtggagtagtttcataaaaatgggtctcttttgtcgtttgtattcagggtaactgaactgaagatcatcggcgatttcatcgactgtggatgaattaaggttcttaaaagactgaagacgtcggccaagaactttctcctctctcgctcttattcttgacttttgtctcatcttttcttcactgggtttttgagggctttcgcggctatatgacctccttcgatagcaaaatagaaatacttatatttggttgtgcggttaaacactttttcggattggtactattatcctaataaaaaatagggaaatttttatatatatacattatatacattaatattacagaaaaaataaacattatatacattaatattacatgaaaacaatccatgtgtatgccgtgacacgtcatcaagcttaccgt

SEQ ID NO: 300581 - DNA, 1514 bp, Cannabis indica
tattattattattattaattagatccaactttttcttacttcctaattcctatacattgagatcttatttaattaatagttaatttagaagaatatatatatatatatatatatgatattaatttcattaattaattgccgttgtttatgcagttaattgatcagtctatagttatctttaagatttggtggtaataataaacggagttatatataaatttagatacataaggaagcaacaatataattctgaatatattatattgttatatgcacacataattaaattaataaatataaaaaaaaaaacatttcagacattagaatatttagaacattcatattattgtttgtttaagggaatttgtgtaaaggtcaagctcaaaattaaagaaaaataagagagttaatttgttatattgcatctaaattaatatatccatatatgtatatgtatgtgtgtgcatctaattaagaatagttatatataattaaattaagaaaaagcttttgaattatagtactatatataccatcaatatataaataaatatagatatgaacaagagggattacagtcaaagtttttatttctcttaaaaaataacactatatataaatatatacaaaggtttttagctagctacaagggacaaattaatgatgaaaaaataaaattaacacttattagtcacttgtgtcacaactataaagtagcatcgtccaaataatatatatataccgattttctataatgaatattgattattaaataagaatatttgagacccaacatttaattatattttagtttaagaattttatttagtaggttttaatatttgagaagagaatctccaactcatggtgttataaaaaatattgagattcttccaaaaaaagattaaagatacgtacacacaaacataaacactctgcatgcactaaaaaatcatataaaacatactttttttaatcattattaattttattagataaatatatatattatattttggggctggtaattatataaaaaaaaaactttaattttagttttacattctcatttccaaaaacctaacaaccccataacagagataagagatataccttgatagttctacttctaatagtattgatgcctttcaatgtttttcaaatcaacaagttaattatgctcattagctatagcttcccactaaactaaattaattagatgaagaaagagagagtggcaatttgataattggtttgaattaaaaaaaaaataataataaagtaagtattcattaataaccaatttgaataaattgttccttgtctcaataaaggatgacaccgagatgccaagagtgatcagaatccatttgagttaattagtcaaaacattattattaaaattaaagcatgcatgcatgcatatataaacaacattgtcaataccattattataagttcacctcttaaaattagttagcaatattcaataaaaaaaaatattattttaaatt

SEQ ID NO: 300582 - DNA, 2413 bp, Cannabis indica
gggtatttataggctaagtggcgggtatggacatgcccatgacccgcctagggtttctactcaaagcccactactgggttaaattacatgcaaaaaatgagatatgactattgggtcccttggaaacaattgtgcccgtgcgtgctgtatagctggaaaattagggaccgtttgtacgttgtggacatgtgtcgctcaaaggttcaaccttaaaaagtagagggcacgtggcccccaaatatttaaccttaaaaagcagaggtctaaaatatttgtcttgcaaaaaggtggatgaggtgtgtgcattatcatgcctggacataggagacaagatctgattttgtttcagaaaaaatataatcgtaattgggcgaacaggattactccaaaggtagacgtccgcaacactcttaggcggttgacctccgcgataggcccctcaagtatccatctaggtatcaatttgggtaggcttccatattttgactattccgagtttgggataaataacatgccttcgagtatctgggaagctaggatagggcaaattggacatctgtatatctttcagtcttgccttgttcctggctcgcgaggcttatccgcgacagagttgcaataggggatcttaattagtggtattaagaggctaatcccttattttatgtcacatctcacatactcaaaaatataaataacaatatggagtcaaacttaaatatttaagctccaaattattctaaattttttaatcctcccaacagtttctacaacctttcaaatcgtaatgaccatattaatcacacttccgttgatattagtcatttactcaagtttaagttaaaacgtgagttcaattaaggtcaagccttgttggcattccatgtggtcgttattccatgaaaaaaaaaaaaaaaatccaatctttatcagagccaaccatcctcatctcccaccttatccactaaaccatatcatcttcatactttaccgaaacaaaactcctctaacacaaacaccaccacatacgtttctttaaacacccaaaactttcatttcttatcttttggttttagagctcaacaaaagaagaagaaaaaaacaaattctgactagtttttttttcttgatcaattttcaggaaaactaaacatggctagtgcctcagctacactgtctccagcaacatttatagctgcgtcatcagtgtctagcccaaggagggcgacaaggaaagtcaattacttgactggaatcaactcctttgccgggcttaaagcgagcaacggcgtcgtttcgcttggtcaccctatgtgtgcggagcagtcgtttgagaagattatgatgtcgtttagagctccttcaaaggggaaaagcagaggtgggggtggggccctttcttctacttgcaatgccgttgctgagatcttcaggattgcagcgatcatgaatgggcttgttcttgttggtgttgctgttggctttgttctactccgaattgaagcttcagtggaggaagcagagtcctgagtttgccttcagtaaattcttatattttgttaatgctcttcctgtttggtttctctaatatgattctacaattcttgtagacattactggtaataaatattgtaataattcttgtttttttaaaaaaaaaaaaactaaattaaattttattagtggtaattttaaaaaaagtctacttaaaaatttataacattagatgtctccatggtatttgtaggagaagatgaaaaaaagcacaagattttcctcttctaaattcaatttctaaatccaatcttttatcaggctcgcttttaaaacctagatcaccattttcattgcagatgtacacttttttatttctagttttcattctactcttcctttcagattctaaaagataacatgggcaagcatgttcccaacacattcatgtgttcactctgttttctttcactatattttatttgtctacttaacattttgtagaagtgattatgcagtaaaattagatggagtaagaaagaaatatactcttaaaattagctcatcagttgtttttaaatgtagctaaaatgcatgggagacttgataatgtacatattattatagataaaactacatatagtgtgtaagaaataagtaacacccatacattaaacatcaaaatcttaactgtatacacacataaatgtcatggaaaacattgacatggtgatggaatttcaatttcaaaatatactcaaactgaggcatgtaagataatgatctcttccaaattatgtgttcttcctgattatgaacagattgttaggcatgcttgactttcagttaatcaaagtgtcagtataatttattgtacgagccttctttttattttttctatttaatttttttttttaaa

SEQ ID NO: 300583 - DNA, 3108 bp, Cannabis indica
ttatagatattgtctaatataaaattgaactcttataatgtaaaaagaacggaaattacaaaagatagaataatattaatggagtgtgtttgatgtaagagttttacatggttagtttttaattcagagaaattgagactaaaagaatctcaaacttaagtgtttaaagagtttgaaattacctaaaaaatgaataaattgaaagttaagacaacaaaaacataaactctcgactaaaaccataccaaacatagtttggttgtacattccaatttccaataacctaaactactatatcaaacaccctctagacatggtttaaagaagatgctaacaggtaccattagtgtctagtatcttcttaaatatcatatcgttatggatgcaattaactatcaggtcttatataatttaatttaataacttttagtgacaactttttaatcacaacataatttttttgtaactaaaggtgacttttaatgataacaaaaagtaacttgtcactaaaatatagtatttagatacaattatcactaatatagttttagtcacaacaagtattgtgacttaaaacacatttagtcacaacaaattgatttttgtgactaatatctttagtcccagactttttaatcacaacataagaaattatttataattagtcgctgctttttcacttttagttacaaattttattgtgactaaaaatgagattttttgtagtgaatgttccatgatttatattctcagaagttaatttgagtgtattatgaagctcaagagcaatgaagcataacaagatagagtttgatgcttgcataaaatggaaggaaggacttgaaggacaaatcttaaaggaaacatcaaagaaacaacactaaaatcaaaataggttcatttctatgtattcgtcttgaatccagatcaaactttggcttaatgtttctcgagagaataattttataagaaaaaccatttggtaatccaaattttggttgcgcaggaaaccagtaaagtactctaattttgtctaaatatttaaaacataaatctgttaaaaatgaaacaaagtttgacatataccttaaataaattcatgaactatttcaaagttcaatatagttctacatttgtttgaaaatgaattgttagtgaactgaatagaaaaaaaatgttagtttagttaccagaaaaggtaacatttttcataaactagaaaaccctgtttgtaacaacaccaatcgactagagaatacatatacattgtcatcaatgcaaagtgttaataaatatcaattgttcttaaaccttatgaagaacttttcaaagcgtcttaagcaaactaagttcatatcatatacagtgcatattgctatattttttaattttcttttgtctaagaattattgtagtaaatctacaaggagagttttatcgcttctatatcattttgtaacggtaaggttgacactggtttaacagcccatatcactctgaagaacataacagcaattaacagacacaaaattaatcaaagagtttgtaaacaatactgtaaagaaatcaaaatgaaaattgatttgaaagccataataaaaatgatcaagaagattaaaagtaacatgtgaataactatgagactttattcataattgagatcagtacaagatagattactttaagtagattagcatttcagaattacacaataccttaccaatgaggaaattaagatccgatgcacgtatttttcttaatatttttaagttaatattgaaatttaggtgtgtaattggatttccaattaaaaatcaaaattggattggatcttgaggatcggataggaaaaaaagattggattggattggatgcctacccctacttgttacaatcctcatagagacaagtattttctctttcttattaaaatgattgtgataaagtctacttatcgacataggacagttaagtaaaactgtcagctaagcctaatcaggaaagctgtgaaaagcttgttacacatcagcaacagacaactcaaatgattgatctaaaatgctacaaatccaccttagaatagtcatttaaactggaacaaagctaataagctgatgaaccaagaaatgattttaaaatattatcacttgtttatattgagtagacatagagagcgcttgaactttgtcaagctcacactctttgttaacatgtcagctagattaatcttaggttaagtgagcctttaaagtacctgagtatccatttgacagttgacctctgatcacctttaagattagccatgaatgtactcacaacacttaagacatgcgccaggtctgaactagtatagaccatggcatacattacgcttccacaatactaatgtaagtaactttttcatgagctttctttctgcattagtttgaggattctaagattgagacaatttgaaatgttgagctagaggtgctgaaacagctttagagttatccattccaaacattgctaacactttctttaagtagcttgcttgtgatagtttaatgaccccttgatgaccattatcaatctctattctcgaaattttcttgtccttgacaagatccttcatctcaaactcctcactaagccttttcttgatctttttgatttcactcttacaatttccaacaattagggcatcatcaacatacaatagttagtatatatgttgattgaagtattcacatagatcatacttactcttttagaaaccaatactagtgataaaactatcaaacctgatgtttaattgccttggagcccgttttagtccaaataaagacctctttagaagaaaaacttcattaggatttccattttaatacccttgaggttgatccatgtaggtttgttcttctagttcaccatgaagaaatattgtttttacatccatttgatctacctcaaggttatgtttggctactctaacaagtatgacttgaactgaagccactttacaatcggagagaaaacttcattaaaatcaactccatcctattgtgtaaaaccttttgctactagcctagcctttaatcttgctctttcaactgttgggttttatgc

SEQ ID NO: 300584 - DNA, 1473 bp, Cannabis indica
ttctatatagaattctgtaaaaaaaaataaataaataaataaaaaaaactgttttgaagtgtaaaaatgaaaaaactcctttaaaaactgaaaatacaccatttttatagcacttcattgaagatactcttatattggagtattattataaaattttgaccaaatataacattaacttattttttgagcaaaatttagctcaaattatacaatatccattagtaaaaattttaatgttaattttcatatatatatatatgtgtgtgtattttcttacttataataaaataaaatgtaattactttgattggatgttagatatattagatttttagacatcttatccaatattcgatacatctaattggatattcaaaaataatatctaatccaatcagactataattagatatttaatttgtgattaattgtaattagatcaagtaattatcttggattgaatcgagatttatgcacactactaatcacgatggtctaacaagaaataataagtactaccgagtacttatcaacattcaactctaaagataatttctaataaaagttccaagagttatttatcaagatttatttatttttatttttttgaaataatcaagatttattaattaggattaaaaacaagataaaatttgaaaagaggaggaactaggaaggcacctaactcgccagccagtttatttttatttttgtttcattcgaattttttttaagcgttttattcgaagttatgacgatttgatattcaataaaaggtaagtaaatcttccttcaaaaaaaagtaagtaaatcaaatatagaatcacgtgcttctaaaaaaaaatatagaatcaactcatcaagtggatttcaaatatatttgatttctttcactatcagctgtcctagcccggtttggggagctttttaaaaagctaaaaatttaaaaaatagtttttataaaaatttaagtaaaatttatagcttttaagaaaagttgaccaaccttaactttgggattttaacttttaagggaagctacaattttggtttaatgaatttttcacttgatcctattgcccttatctaattttaaaattctccatttaccaattaattttaaggcttcttacattctttcaatctcatccttattcaaaaaaaaaaaaatcccttctctgatcaaaaactactcaatattataattctaattttattattattattattattattattattattattagtaaaattctaatttattattttattatataaatattaaagaattaaatattataagaaaaaattatacataatttataatataataaataatatttataaatatattaatatgtataaaatattaaataataaataaccaatgtcatacctatttagtaattatatatttaacaacttattaattcatttagtcttaccaaacacttatatacaattttttac

SEQ ID NO: 300585 - DNA, 2672 bp, Cannabis indica
aaatattatatttaattaaaaattagtttggtgtaacgtgttgatggttatagtgaaaaaataatatgatactgaaattacataatttttatattaaattaacataattatagtgtttatggttagaggtgctctaagtttttctctctaaagaaaaagcattattttaagtactcagtgcatcatacttggcagttgatgatccagtgtccaggcaggagcactgaaaatcgtgtcattatttgctttagtgtataattgcatccttatcttatcttttgacaacatacatgtaactgtggttgagtcagttttaaaccttggaatgattttagaatctgcattaagatgtaaatctatgtttttcctgtataatttaaacctgtacattattttattaggtgtgttaaactcctttataaaacgtttagcaaaaaaacaaaaattaaaacaataataaaaaaaaatcctttgcaaaattatgttttttatttttgttttttctaattacaagattgaatggttgcattgcatgacacacaacgagagagtattattgtattaattatgccgtgaagattttttaatctctgtctctttttcctttttcttttttttttcaagaggtatatttatatatttatatatatacgtcatatacaatcattttgttgataaaacttcatcacaaatttttgtcttaagagatgagtaaattttctaaacaaaggtcacaaacccttgttctcaatcgatcttatacacccctgaaatgataaatacaactttccacgttatcccacccctgaaacaagaaatatgtacattagctgaaatagtacatattgcatttatgcctttgaccagtcgatattaataatggaatgtctatgctttggtccccaaaactcgtttggaaatactatttgttaaaacacatagtttggttctgttatgcatattaaaactaaataatagattagatagtagttaggcacctcttttatccgtgtcctgttcttgttattattacatcacgtgagttagaacttagatctaccaattcataatgatcatcactaaacagtaaaagatacacaccaaaaagaaagaagaaggaaaagagtaaaaaggaatattaaaacatgtgaacttttgacctactttaactaaatctaacaaaactctcactgtattcaatctgttgctaaatagaaaactcgaaccttcctctcatatctctctctctatatatataactttcacaaataaagattcacacccacaccgaaccaaaacttaaagaaatggccaaagttggcttctccttaataggggttgttctctatgcttctcttctacaactcctcttaagcaaagcacaaagctcatcaccatcaaattcaaattcaaactcattagatttcatcaaagcctcatgcaaggccacaacgtaccctgcactctgtgtccactccctctcagccttcgccaccaaaatccgccaaagtcagcgccagctctcccaaacagccttggcagtaagcctttccaaggccaaatcagcctctgacttcgtgtccaagatgacccgagtcaaaggcataactccaagagagcgtgcagccgttaaagactgcatagagaacatggctgacaccgtggacaggctcagccagtcggtccgggaacttggtcacatggggagtggtcaggactttgtatggcacatgagtaatgtccagacatgggtgagcgctgctctaactgacgagaacacttgtcttgatgggtttggagggcgtggtatgaataatgggaatgtcaaggctgccattaggagaagggttgtaagtgttgctcaagtcactagtaatgctcttgctttggttaattgttttgcttctaagcaccaccacccttaggacttgtacttttgtgacttttattattataactttaggcttacattgtgtaaaaatcaaatctgtgttatagatcaaatatgtttgtttagctattaactacttgagaggatatgatgtaaaaagacccttttatttttctttttcgtttgttgtctaaaggtgaaaaaaacaggggtgtcttttcttggacttgtatgtcaatgaaatggatggctgagttttctgtacatgtatagaaaaaaggtcaatacttctctttctgtgatcaatatattacatgttgggatcagaacattttactagtgaagggggaaaaggttttgagtaatgttatttgtgatgtgaatctcagatccaataactgatagaagcctacaagtaagtgagtattgaattgattttattagctgatgtaacttgatttgaattgaagcctacaagtaagtgagtgttgaaatggtattctataggatcctattctatacgcatatattctatacgcatatttagtataagcgaatcccaggtggatctcctctagtgcatacttcatgcatagaagaaatttgtttaaattactcaaaatcatatatatatatatatatactaggtgaatgtacgtgccgagccacgtattgttagtttcatttaagattttggtctttttaagattttgaatgtattttatttttaaagattacaaattttttgtttgaaaaaattaaatatttatatttgaaatat

SEQ ID NO: 300586 - DNA, 5167 bp, Cannabis indica
tttaatgaatcagtatcaatatcaattgctttaatgtacagcatctggtctgatatgtgtgcggatattatttggtattttgtacagcatctaataaattttgactacctacaactagattagattggatcaggttctcattctttccctcccaaaattaaaagtcaaaaactctggaagagaggatctgaatcaggttcggcaccaccaagagctgaattttatgggacctaaagagaccacctaataccttttttacgtgtcaatataactattgatctgactaactattaggtcccatataatttaatataatacttttaaaaaatatcgttagcaaattgcaaagcaatatattttagaagtactaagcactggtgcctaatagcaatgctcttcattaccattggcgtggtaagaatctcggccaaaaatgcaactaacacgcatgcaccagcaccaccatctagtagcttttgccttttggcatctaaaagttgggctgagttagttcattggtatttggaggagaaaaagtgtagataaaaatccaatatgttatgtgtgaaaaattataattttctgtatttctacagctagaactttgaccggtattgttagatataattattcctaaaagttatttaaagctttatttagttggccatggccaatatatataacaagaaccatatttcttgtattttttgttattaataataaaaatgcaaaatcctcatggttcttctcaaatatggtaacattggtaagctatgtatgtgtatgtctctaaagaaataaaaatgggaccttattattaagcattatcaaatagatattaacataaactgatttagtactctcggactccaaaatcttcaatactcacctcctgccccttattgcttcaacgctcaaataaatatgtacaactaatatctagatatagtaattacaatgcagactccattcaaaacataaacctgaaaaaataaccgaaaatgaaaaaccgtttaggtctctgtcattttcaccatccatgtctcagcctcagcgtcttttatgatatcccacccgtcttctgaaagttcgttctgatcatgcttcttcacgctgtcctcttcagctccattcgtagctgtcacgtcaatgattgggggcagactccaatcatctggctgtttagaagacttgtcttcctcatgaataataacagatgatatgcttctcaaggatgaccccgatgaagctaacttgcaactcgtctggctagatgaaactgacatgcttaaaggaaggcgtttgtcaaacttctctttcagcaaactaacatcctgacatataacagagatttctcctctgcaaaagagaacaatgtgtgttatctcttcattgaggtcaataaaaagaaattacaatatttgacattcaacatttcataatttagccagatataaaggaaaacttactgtaacatgtccaagatgcgaccacgatccatcaaaaactctcttaactgccaatagaaaacagaagaatgagtcactaactgttaaatattcttcaataaatcaaatagttttcgaaagagttgctactttagagttatcgtcagctgcctgtgctattagctttgcctcctgtaccacattctccataatctcctcttgttcagcaagaaaaatcctagcagattcttccctttctagcttttcctgctcagctgctctctttagatcttcggcagcagctagtcgtgcttcgagggtcttccgcatctgcatgtacgaataaattactacaaaaacccataaacacacacacacacacacccgatcacacacaaataaatatgaacctcatcaagaattgcaagtgatttgtccttttcatctgataagcagagaagtctagactctagctctctcacttctgtagctaaaattgccttctctccatacacttcaccagcttgctgcacacatgtacatatttgtaaaaatataaagctttaatgcttcttattagaccagcttaattcaaagtcagtaatactgaaacataaactcattgagcgacaactaaccatgctattcgcttccttggcatgttccagcatttgtttcagttcctggaccttgatcagaatatccagccctccaagagcagcttcctcttttgcacgctctgcagcgctctcctgaatttccacttctttcatcatgttaaagattgattccattgcagaaaacaaggttttctgcaccattgtcaagtaattagaaactttttaaaagaaaaataaaatagaaaaaagggatgtaaaacataatatacataataagaaaatgagatcatgagcgttaacaaacgggtccagtgcagatgtccacatattagtattatattccaaaactaccttactacactagtagtaaaatgagtggtaacataatttctcacacaaggctgattttatcctaatacatttcatcttatcctctgtttcagcttaatacttaaaaatatttgcttctgcaccccatccataaaataatttattagcaataatagatacacaacgatcaattttgctgccaaaattttgaaactatagaaaggcgagaaaattaggtaagcacaacaattatcgttaaatgagctaagtgtgcctaagtctgatttaacatgatttacttctccaattgaattaacaaaagaacaaactagaagtgattgtattcagtcaaaagcttaactttgctcgcatctcatttaacaaagtgtagttactattcccaagctaaaaaatttataagccatcagtaccttattattcttggcatcttcaataatctcatcaagaatgtcaattctgcaagtttcattggattgtaaaactgtgctgctttccgagatgttatcccgaatgctgcctgttctactagcaacaaaacagtctttctcaggagtaagacttgaaaaactccttgcttgatcttcatcattatcatttgccataaagaacttttcctcctcaaagcatggagttttcaaactaccattaagcccctcagtcgacacaccaaattggctttgatcagaactaactatgggcattatttttttgggtgaaaaagaagtttcaaagtcagtatctgtgcactcttgctcgacatcagttcttactagctctgcaacctctgacaggacatgattagcctgatcaaactccaatgaaacttccttaattatctcattagtgtaaatatatactttttcaccagtatcatttttaatatcagaagttgaagctttagatccattcagtgatacgttcagatgtgtgtgatcagcatgcagagcaccatttgtaaaatcgatatattcctcatcttcacaaccatgagatattagttttgaagatatccctgcatccccaagtgtggtatcagcatgcgtaccacttgcacaggcactatcttcaacatgtctaaatgaactggatcttgattctgtagaagactcagcatctgatgggcaacagatttcgcatatgcatatcaatcaaataagtgaataccacacaataaaccatttaagaaaaaagaaaaggaaatattggatgacatttaggctttgtttagaatttggattttccttttgtgaaagaaaagactagaaataaaaaagaggaaacatgttttcctaaaattctattatacttgctcttgcaattttccatttttctaatatagctgtaaaaaaattctaatcttttgtttgaatataatgcaagttcagaggatttcagtacaaaatacctcttaaactcccagcgttcggataattgatgttaggaaatgttgaacttccaataggcaagcaaggaagaacatcagtcagaatgtcattaacagctgcatcagcatctttagaatgttcaatagcaacagccttcagaatgcgcacatcaacctaccaagtgattataaaaaaaagattaagtattaacccttgtgcttgcattagatcaggcacaaataacaacctttataatagatacttagaattagagatgcttcatcaaattcacatgccaaaacaaagaaggctacttccttacataaagcaatgaattatagcttcttcaaaatttctcataatacttaattattaaaaacattgaaaaacaataacaacaacaacaacaacaataaaaatactatgacaaaatgaagaaaatagatgcaatataaacaatgaatatatatatatatatttgttagaccgacttgaaaccatagtgagaccgaggcatatacctgaggaaaaatctcttgcaagcagcggaaaaccgacttgaaacccatactcagagtcagagctttcaatctatatcaaaaataaaaaattaaaatcagaataagattgcttatccatcaagaataagcaagaaattctaaaactttatttcgctggggacgaaccacataaatgaaaagtaacctacgatgatcaagagtaatgaaattgtacccgaaaaaaaatgattttaaacacaggaaaacaaaaatgagaggatcatggcggaattgagtttgaaaaataaagaaaattaatattttggaatggaagttgtactgacctttgagaattgagaggagaggagagtgaatagagagagagagaaagggttttgtaatttgtagtgtatttatttgtagtgttgtgggaattattatcgggagaagagaataactgatggaccggggctttatgagtttaggagggaggacgaggcgagcagacctaggcagctaagtaaggaactggatttatttgtcatttaccactttcgaggttattttagtcttttcaccttttacgcattgtcttcttttgcataagatggaaatttccatttattattatggaaatttctcaattgagtttgtggtgtattactcctcaattgagttttagtgctggggatgaaaaatgatgtacttttttttatggaattagctcccccaatgtacacctaacttagcgtgatttttaatgtactatgtagctcgatactaatcaacgagattattaaaaatcgtgattaattaaaatttatttaattaattaaaaatataaagtaacatacttataaaat

SEQ ID NO: 300587 - DNA, 4331 bp, Cannabis indica
gggcataaaacccaacacgctttcctttagccaaagagtttcacaatatttataacattgctcgtagtgctaccgtgactttaactcatcactttaggagagttagtgcctagaatttcaagggtacccagtatgcctccaagatagccatcataacttctgagtttctcatggttgagcgctaccatctggtgttctgtctgagttcaagatctcaagtaagctggtcattttgcttcttatttttgttatgttttattatgctttatgcaaactcatacttgatttcttcatttcagtgactaaagatgttcccgtgcttagtgctaattggttaggcgatttatagagattctacaacctccctagcacagagaggactgctaaacaccttatcacctcaaaaattttgaaaaactctgggttgaccaacactctgctttcctcatcttcccttgcattgatcccagatattgagtctcaagatgattaatatgctctttcagtcccgccttctaatctttcagttgtcgaggtttagagagaccctagtcacgaggaggaggcatatgaagaaagtttaaccccaggtgttgttggagccatcttgcgtgaaggcgcggtccctgttgccagttcaagtcgaggccttctattggggcaaagaaataaagggcttcaatttccaacaaccctggatctaagaaacaattggcttcaacttctaatgcccagacacaggggccaacatcatcatcgacttctaaatctaagaaggtctataatcgagtgagccatgctttctagagctttaagagtaagcatcaaatagtttctgcccgtttggggtttctagccttaacattcctcctaagtcttctattcaggacttgtcccctgttacttctccaacttcctatacgggggaagggtacaatgtggtggagtctgggcttctgtcctcagatatattgatggacgacattagggcgagtggtcctatggatcacaatttgccacagggtgatagtttttaggataagaagtgttgccctcgtgacgaggtggatcctgggtgttcaatgtatgtttctaatgtttcttctgagggtttcaacctctaactcatgttccaaccttcttacggaccttctcacatctttctttttgtcctaatgacttgacctggtctcaatctcaaatgagtcaattctcaagcgggtttatcaagtatcttggtgagtattcccccctaagaatgggttgtgctacataattcatcagaggaaaagtatcaggaagctttgctcaaacataccatatgagttagtatttacattattcgaagttggactctcttttaataactttctgactcttatcttgatttttgtttcgcaaatttttgtcatcaaaccatacacactagcactagctcttccgcccaaagtggcctcccacgcctctagaaggccttagaggattttgctgcctcaaatgtgagtgagattgtcttcaagccaaggtcgaccttctcaagctcagctggacgaggtgacacccaaggctgacgatctttcccaacaacttcaatcatcagaggagaagtgtcaggaagctgtgctcagacataccatatgagttagtatttacgttattagaattgaggctctcttttaataactttctgactcttatcttgatttttgtttcgcaaacttttgtcatcgaacaatacacactagctccagctcttccggccgaggtggcctcccacgcctccagaaggccttgaaggatttggcttcctcaaatgaggagtgatatcgtcttcaagccaagatcaaccttattcaggctcagctgaacgaggtgacaccaaggttgacgatctttcccaacaacttcaatcatctctcaccctgcataaggagttcacgactgaggcactacacaaatgggatgaacttaaggccaatataatctgattaaagtagcgtactgtggttgtaaagaacaagggcattgagcgggaagaagataaggttgaattcttgtagtatgctatgtggataaataaccccaatgcgaatgttagcattctcggacgtgttgcgctctagcttattagggcattcaaaaacgaggacgagaaaaggagagccacatgtgaggccaaacactgtggggatgctggcacttttggtgatggtaatcagtagttgtaatcttgtgtatctatgttgtttgttttttcgggggtcgacaggctttgttagagcgacccttgtgcttttactttggatgactgtaaggaacttgttttttacttcttgtgtctttgtgtgttgttgttctctttcaatgtgtgtgaccccatgaggactctaccagagtaggtagcattttatttagggattattgactcttagagcggtctccacctcattttaattacttattcttttattatgatgtaagggtgcttattgttccttgaacgcgcttcaaacttttaatttatattttcactactgcgtgttgttgtgaatctttgtttatgcctgagaaacaaccttttctttttagcataaggccatgagtttctttcaagacatcatttggctaagcaacttatgatcttttgtgaggaaaaatgtattcccttcgttggccaagggtcgctaatccttgtcgacttaagaattttttttttattttttttacttctcctcttgccccccaagtgtgtagatttattcatagcattgtacagtacttgagttttgctttcaatcttcttctttttttttttggaaaaaaggacatcaatttaaagtatgcgacaagacatgataaaataattccaatgtaacattgatttagttcacttatacaagagaaagggaaggtagaagtgttagttttatggtactacgcaacaaaagagttttgtattatctaattatcattgtactatagtctctaggatttctatatgtgtatacattaaatcaaaacaattaaaatgtaagtttatattataccttttgaagcctgctatctcaaattttttctacctgacgtggcatgtccacgtaagccagagatagagtataggtggaatacaaccttgccagtagtatgatagggtctccatacaagatatagcaaaaccatcaagcagtaaccaaatggagtgaagcaagccctcaagaagctgtactaacatctctggccagccaagagaagcctataggttatgtcatggtgagcatataggcaggccaggatctaggcacaagctggccaagcaaaaagtgacttccagacgaagggagcttccgttcgactaagggaacctgacctctacaaggaaatggagtacaaagttgtcctccacttacaaaagtctaacttccatatccaaagactggcttcgtcttggtaaagctatagtgacctgcaagatcctggtagacacaggacttgccaagtcctggcaggagcatggccaatcataccttaacctacaggccttggccggccagacctcaacctatgaaccttggctgaccaggacatatcttgcagtgcatggccagccagacctctcttgtaggtctatgggcagccaggattaacctagcaggactctgtgcacaacctaaaacatggacaacaagctacctacaaattgaccccttaataacccaacaaagtgattgaaaatatctactttcaagggacaatttagtcttttgtatttaatcaatttaatatgtaaatatctaagtgaaaatatctacttgttgtttgcttagtacttgcacagttaccaggcatggtagtatcgtttcgtgcactaagggtttcctcttgagtacttattcccacgtggccatttggtcgacggggaatctctccagccaaatcaaaaatacctctgtggggagtagtcctgcgactggaatgatatgcttctctgattcattgagaaaatttagccctttactgctcctactcaacttcttgtactatatattctgatagttctccacaaactagttttaaaactattcatgttatttgttgagagaatcttgtgcctgttgttgaaggtcagacactatttggctaagttgttctacccaaggatgagtctccttggggtcttctagttccacacgtggttccccagttggaatttgtttgttggttttagtaccagtagcagttggtggccttagggaacgagctgtggagctggtttcgagacatcaacctatcacctacgatgtaggtgtagtcccatcaccagttccagtgac

SEQ ID NO: 300588 - DNA, 2221 bp, Cannabis indica
tgagataatttagaaaaaaaaaagttattacttactcgagaaaattttggatatatctatagaattgttcaatatataccattgaacaacttttctcgaattttcaagcaatttgatggtagaggcccttaatgaacgaaaaattggagttgaaaatatctaacttatgatttggagtaggtaaatcccaattacgctcggatcttgagaatcttgtctctatgttagaaacgtatcttgacaagaaagttacaacttcatctacaacaaaagcttctactattaaaccatcaggttgagacatgtttctcacatatttcttgtacaaacccatatggcttgttgtccgaaacatccatcttgaagcaactggaccacctaataatactttatcgagtaggtgaacacaaagattaaccattactgtaaaaaatgatgggaggaaatatttgttttaatttgcacaaaattattataattccatccctcaattcttcaatgttagaaatttgtaatgttcttgcacaaattttttgaaagaattggtagagttcaattaaagtaccacgaatgttgtctgtcaaaaaaggaaataaggcggctggtaatatcttataaagtaaaacatgaaaatcatgatttttcattcctcctagatttttattatctgttacacatcgactaatatttgaagcatatccatctcgtagtttaactctttgaatgaatttataaaaatctttgcattcttctctggttaaactgtaactagcatgaggttttttatgtttcttagtagaagggtccttcttcagccaaagctcttctcgaatatttaaattttgcgaatctttacgagcttttaaattttctttcgatttaccttcaatgtctaaaagtgttccaatatttttatcacatacattttttttatatgcatcacatcaagattgtgacacaacaagatctttaaccagtatggcaagtcaaacaaaacacttcttttacaccaattcagctcattctctccactcttacattttctagaagaattacttggtgccttacctgtggtatgaataggaatttcatccaactgctttaaaatgtcatcaccactaaaagttttaggagggccacgtaattcaattggtctgtcatattcttttctctttctccaagaataatttttttcttcaaataacatcggtgtcccatgaagcattgttcgtcagttattcttctaaatcttatgccttctagacaaacagaacatgctaatttaccagtagtgctccacccggacaagtatgcataagcaggaaaatcactaattgtccacaaaactacagctcaaagtttaaacatacattgaccatacaaaatcatatgcattaactccgtcccataactcttgaagctcttcaactaatggcttcaagatcacatcataatcttttccaggagatttaggacctggaattaacaaagacatgagatagtttgttccattaggagaagcccaaggtggaaaattgtacagaattaaaatcactggccacaaactataggttgatgtcatattagagaaagggttaaacccatctgatgtcaaccccattcttacactcttggaatcaactgcaaagtccagataaacattgtcaaaatgcttccaagaggctgaagaacctatatgagaagggtctcctcgagtgagttgaagccttcttctctacccctaggcatcttgccactaatcctgggaaggggctctgtgcatgactcagtgcccacgctaagaatggggtgatcttgcctcttcattcgtactttaagaagatcgcaaattattataagaactgccaaacccagttcactcgaaaggaaatcaagcacttggttactgtaacaccctaactaacatatgcgtgttgacgtgattttaaacgtactgtgcagctcgttgctaatcaacgaggttaatgaaaatcgtgattaattaaaattttgctatttaattaaaacttataatattacatacaaaatatttcgggatcccgtttacaaaacactttacaaaagtttactagtcatttacaaaaatatttgtcgcccagcgactaacaacaaaagccctgatgtctcgaggatcgtacgctccaggcctaaccaccccgacatgtacaatcttcatctctcgtcctcacggttcctcggc

SEQ ID NO: 300589 - DNA, 3009 bp, Cannabis indica
acttttgttaggacactcctcagtgggaaaaccaaacccaaagatacttcatctaagttggatattccaaccctctcatttgagagaaagaaaaaaaagacatatagagttaaatttcgtcgattcttctatagctgcacacatccttacttcctactgagtactcattttcatttgtgattcctagtaagtaatcaaaatatttcaacattcaaattcaatttttcacagggttcaccactgtggtagtattggctatcaagtcaatataaaataccctcagaaaaacccaccacctttaagctgtcacaatttctccaatgtcggtattgcaaaagggtcagctggaagatccgaatattcacttcctaactttgaaagccagcatgaacagagtaagtatttgcattaagtctataatatatggatacacaacatatgttaaatattttaatatgtaggcttaaaaatgaaaagaaaggagcaaggtgattttggagaagttcatagtttgaaaaagcaggctgttggaggagtaaatgtaagagcactctcgttgacttctttaccctatcctttataatacattactaaatattcaatttttctatttgacattctgatttttaaaatataccctctatgcttatctgttttttcttcatgttctttaaatgttatatttttttaaacctttttattactttttataggagtattcattagaccacatctaatatttttaggtctatccattatacattggatgttggattttgtctcctaatccgatctaattaatttcaatcatccaatcaattctagtagattggataagttttattcattaaaagtatttcatgtttttttattagaatagttcggatttatccaatgttttagatccaatatttattggattaaagtaaaattttaatcctaattttcataacataaaatctaatttctcatttaaaccaaatgaaaatattaattagtataattggatattggacgtattggatttttagacaccctgtctaacatccgatccaatccaattgaatattcaaaaataatatccgatctaatcataattagatatccaatgtttggcggttggttgtaattggatcgatcggttgtaattgtattggatgcactcctaattttttcaaatgtgaaagaataaagaaaattgaggaagatgagaaaagaacattcaattaaaacaattgacaatcatgatatgaacgagctatccacctgagcacaggcaatagaacagtaactaacaggtcttattgactatgaaagaggtgtattagtgaatggaaatatggaaatcaaaagcaggaaagctgttggtccttttggaccatgctgagaaatatctcaattctcgcataacctctctcctttactcccctatatagacactatcctatttccccattcaataactaccctcaatgcacaatccttttattcactataccctcccatactctcctaaacatagggtctaacagatatcgaaatatatttgcaaaatacattatctcgtatagagtccctctattaagactatttctttatactaagggaaacaaaatctaatttataataaccattgggtatacaagggactatctatactggatttaagcggagtgcggaacaattttcagtagttcttttccaattctgtttattgcaattaatttctactgtaatgttattgttttcatgtttcatgtttgtttttttcactttgagactaacatgatcatgatcctgccttttgttctattgattgcttacaaagttccattttttttaaaaaaaaataaatgtattgtaagtattttatggtaccactttctagccactgtggtctgtatatgcaacttgtgtacggactttcatgaatgtttaatgtgatgaatgtttccttgtgctctaactaatccatacatgatcacattttcttctcttgcatttcatgtagaattcaggtactaatatagatcggtcgaaaggtcaacaggcggcgctcttgatgcaagaaaacaaaaaatggcttgcaaagtgagtaatatatggctgttttctttctacctgagcctgattagctcaattttgttatatattattaacttaaatctttttagattaaagtaataaaatgtttcttttcttcttcagatgctcggagtatgaaaaagaggagaaagaacttcttgtcaaggtacttgcaaatttttaggaaatttattgcatgtttagtgagctttgtcaatctatagtataatgtgtgaattactttttttcaaaaagatttggtttgatccttaggcatagagtttaattaggcactggaattggaaaagagttttgacatgaaatgcaattgaaaaaaccactttttaaatttttcatagatacagattcttattgctgtgcaggtgacacaactcagaagccaaatagaagagtttggcaatgagtacactcggttattggcagaattacaagcaatggaagcagttaagccagaaaagtccatttcatttaattctttcatttgttaaaaccaatgatgtatatccatagatggatgagccaagcagtttctagcaagatcttaggtacgtatgaagcagaaatggtagcccccaatagctggtcctttttctcttcttctgtatattggctaatgtgaatatcataaatgaggcttgtaacagatgagagtctaggctaagctgctttcacataatacacaagtagagaagtgtgatgtacttcaactttgaaaaagaaaaaaaattaaaaaaagaaagataaaaggtcaaatgtctaaactgaccacttaaatttattatgttagaaaaaaaccataattacaaaatgtataaaatagtttaaagaaaaacaacaaatacataatagttttagagcaagcaattaagtagtttatattacaaaggattgaagaagaaaaat

SEQ ID NO: 300590 - DNA, 6380 bp, Cannabis indica
cttttttttctttggccaagagagaaaatgaagttccaccattttagtcaaaatgtgagctagctgagttgagagagtagaaaaaactaatacagagacagagaaaaaaaaaagggaggaaagggagtggtttgaaaaagacataatattttacagaagagagagaatagtttatatagatattggagaagaagggggagacaagaccgtatctgtaaaaataataaaaaaaaaattcgattcaaagtttgcttttttattattttaagcattggaagactgcatttgaataaaaaaaaggaagaagaagaagaagaaggaaagagaaagaaagagattattagtattcacattggaacaatccaacccacctagccaaaacccaattctctgtttttttctttcttattcattgtattaacaccatactattactacccagctcctctttctctctctctctctgagtgttaaaggttggttttttattgcttagctgtgttgtgtgtgtgtgtgtttggggtcaatctcttactcttctctggtttccccacttattaattagtattattatatgtaagaaaacagtgaacgtgcttcttctttgtctagatgcctcaaaagctcaactaacatcacgctttgggtttgggtttggagggacatgattagagttctctctccatttttttaatccaagtttcttcctttttctacattcacagcctgagacaccacaatttctttatttttctttgtttggaaagagaaatgagaaagcttgttttgggaatttgagctcttttttatttttcttttggggttttgcatcttttgagagccatgcttgtttctcaaatttgaagttttttttttttttccacctttttgagttctgggtctctctctcttcttcaaagaatataaaggaggtgtctttttttctttctgttccagaaaaattcaattatattttgcttggttcttaagctggtttctattgaatccaagaaataaatactgtaatgatgaaaaaactggtgtcctgaaaattagtcagtactttttaagagagttgctgtgaatgaaaatgttctgatttgctgaggtgggtttttctctttgagcatagttatgcagtgggtgaaagttgaagagaaagaggaggaagaagaaaagagtgtttttttgggtgtttttgtgaaataataataataatgggtctgaagatgcagcacaaccaccattctgtggttgttaggttgaatgaacagatgggaaccaaaacaggttacacttgggttcaggcttacagaacttggtttagaaagatgtttatattctggttaattcttatggtcatatttggttgggttctctacaacagaatggatactaaaaacatagaaagaaggcaagaagtgctgaccagtatgtgtgatcagagggctaggatgttgcaagatcagtttagtgttagtgttaaccatgttcatgcccttgctctccttgtttcaacttttcattactacaagaacccatctgcaattgatcaggtttgtgcttgaattttctatttttggattgattagactctttgtgtggtgggttattgattgagtgtggcattgctgttatgtctgtatttataaatgcaggaaacttttgctgattatacagcatgtacctcatttgagagacctttactgagtggagtggcatatgcagagagagtaattcattctgaaagagagagttttgagaggcaacatggttggactataaagacaatggagaaggaaccatcaccgctccgggatgagtatgcccctgtgatcttttcacaggagacagtgtcttacattgagtctcttgacatgatgtcgggcgaggtttgtgttcttgttcaaaccttttgtagttttgtgttttgttttcgtttgaccattggttttgaacatgattgtgcaggaagatagggagaacatcttgaggtctagggccactggtaaagctgttcttacaagtccctttaggctgctcggttctcatcatcttggcgtggtgttgacatttcctgtttacaaatccaaactccctccgcacccaactgtaaaggagcgaattgaagcaactgcagggtaagttctggtcaaatgaatgagtttttgtttgagtagaaatgatttagtgtaagataacactgagagttcgaaatcactattttaatcacactactaagctttaacaatttgttttgtaataacaataaatagcggtttccacatttttaattttgtgattagtgaatgtgggatcgtagaaggtttttgtgtatgaaaagaaaatgaaattcaacactgaatgcagataccttggtggagcctttgatgttgaatctcttgtggagaagttgcttgggcaacttgctgggaatgaagagattttggtctatgtatacgatataacaaattcgtctgataaactaatcatgtatggtcgccaaaatcaagacgaagacatgtctcttttgcatgaaagcaaactcgattttggagatccattcagaaaacataagatgatttgcaggtaaggtcacaccacaccgccttgttggctagcattttcaaagtaaagaagttttttagttgcctattttgatcaatgatgctatgtattgaattgtgaatagatatcatcagaaggccccggtgccatgttcggcaattttcactgtaattatattttccattatctggtacttagctggtcatatcttatatgctgctgtaactcacattgtaaaagttgaggatgatttccatgaaatgcaagaactgaaagtccgagctgaagctgctgatgttgcaaaatcccaggtactgttgcatgcaacatttccgaaattatgttcatcgttatatgaatatgctcatcctacagtattgtgatccaagtatgtcttgttttcttgattacagtttcttgctactgtttcccatgagatcaggacacccatgaatggtgttcttggtatgttatagattccacttttgacatctttcttttcaaacattaagtacatgtaattatgtatttacgtctacatgtaattgcaggcatgcttgggctgcttttagacacagatttaagctcaactcagagggatttcgctcaaactgctcaagtttgtggacgggcactgatagcattgataaatgaagtgcttgatcgtgcgaaaattgaagcagggaagttagaacttgaagcggtgccatttagtcttcgttccattttagatgatgttctttccttgttctctgaaacgtctagaaataaaggcgtagaggtaagatcgagcttactctttagaaacaatatatggtagtgaagattcttaaattaagtgtatgatatgttttgcaaaaacatgttcttatattatagattagatttattggcatgctcaaccatatgtttctttagctattttggggtaatgatgttgaccacgacggtgtttataatgtcttttcatgcaaataaagctggctgtgttcgtctccgataaagttccagatcttgttatgggggatccaggaagattcagacagattgttactaatcttgtggggaactctgttaaggtaagtcagtggttttcttagttatttttcgggtacttattgattctaaatactaattagattcatcacttacagttcaccgaacgggggcatatatttgtcaaaattcatctagctgaacctgcaaagactttgataaacgattcttgtttgaatggagggttagaaaatattgcactaacacctggcggtcgtcaatttaacacattaagtggtctcgaagcagccgatgaacagaactgctgggagacctttagacatctaattactgaagaaggagcaaccacctacgaaatttctgaccacgtcactttgaccttatccgttgaggatacaggaatagggatccctttatcagcacaggatcgaattttcacaccgttcatgcaggcagacagctcaacttccagacactatggaggaaccggtataggcttgagcatcagtaagtgtttggttgaacgaatgggtggtaaaattagcttcgtaagtcgacctcaggttggaagtacattttcattcactgctactttcgagaggtacaagaaaaacgctttcaatgaagtgaaaaggcctattactgaagaattgccttctgattttagaggactgaaagcaataatagtcgatgagaaacctgttagagctgctgtaacaagttaccatttgaagagacttggtatgctggttgaagttgctagtagcataaaaatagcggtttctttatctacgaaaaatggttctgtcataactaagtaagcttctttctgctgttatatgtattgtaattaatcagataccttaaagaagccatttttaacaattttttgaaactttaaggctttaaggcttgagtacactatcattaatttcacaaaattgtgtctttttcgaatgttgcagaaatgtaaagcaggctgatttaatcctagttgagaaggaatcgtggatatctgctgaagacggtggcattaacataagatttttggactggaaacagaatggaaatgtattcaagtttcctaagatgattctccttgcaactcatattagcagtactgaattcgagaaggcgaaggctactggttttctagacactgtgattatgaaaccgctgagagcaagtatggtggctgcgtgtcttcagcaagtgggtataggcaagaagaggcaggagggaaaggacacgcccgatgagtcttgtgcccttaagaacatgctatgtggcaagaacattttggtggttgatgacaatattgttaaccgaagagttgctgcaggtgcgataaagaaatatggagctcgtgtggagtgtgcagacagtggtaaaaaggcactagaattgcttcaactacctcacggtttcgatgcttgctttatggatattcaaatgcccgaaatggatgggtatgtttttagtggcatagcttgattttaatgttcaattatttcaataagaaacttccaaattgatagttcataatctaatgacaggtttgaggcgacccgtctaattagaaagagggagagcgaagcaaatcaacaaatgaacgggggatccagcgttgaaggaattgcccgaaaagatgagtggcacacaccaattctagccatgacagctgatgtgattcacgctacgtatgaagagtgccttaaatgtgggatggatggttatgttacgaagcctttcgaggatgagaatctccatgaagcacttggtaagatcttcaactctaaacctgttccagggtcataacaagaactcccgaaaaacaaacctatcacattccgaatcacaggaaactgttgggcatgttgttgaccattaccagcaattttggatgtcacgacaggcattattgttttccctagctgaaaatggtgacaatgagttggttctaagaataccgaacaacgattcgatgagcatctcagatgatatacaggtttgcacattcatgtgtaacgaactttttgaagttaacaatgattagaagaatctgagtacatgtatactacagaacagaacagaacaccctccaaaaattctccacttgtatgtgtatatagatccttaggtgggagtaggagccaaacatgtaaatcatattattttttgtatgttttccattgaaaaactttccttttccttccatgattgaaacttctccatttgttgacactgaagagttactttctttttactgtatattataatattggcgggcaacaccgtctcggtcggttgtctcagcttgacatgctcggcctcggcctcgtcttcgtcttcgtccctatacagagatatgaaacactcatcaaatgtagaagtaaatatggtataaatgtgcagattgaaatgttaatgttataaggtgagggagggacactttacttggtagaaaaaaactaaagagtcaaattagaaggccatcttctctacttatcaattttgacaaattatacttatgacaactaaggaattaaaattttcaactaaggtactattaattatttaaattgacagtaatatcatttcttagtggcaaggtttatataattatgtcctatagtttcatcaaggattcttggggaggtaggtgggtgattttcccaataagtacaacaatagatagatttttggcatggttgaaatcataaaaagaaaagggtaaataccattttgaactctttattttgtaaaagttaccaattggaccttctgttttgtta

SEQ ID NO: 300591 - DNA, 2437 bp, Cannabis indica
cagcgcggagatatagaaatggtgctcataccgaatatataatatcacttgatgcagatgacctttcacaaggcagtaatgcctatgttggaaagttgaggtatgccattactatctaaagaaaataaagtgaaatcttaatggggttctttctttttatttggctctactcttgcatttgcgcttaagatggtttttaatatctcaaatgcttgtagttattgtcttaactgttagttattactattttaccatggatccattgtgtaatttgttattaatcttcgaatgagcaaggtttgaagtagctttaatttcacagtttatgttattttggagctcattttggttcaaaatgttcacagatatttggttttattggagctgtttttggttcaaaatgttcctcaatatgtggggctgattggtgcgtatagaaatttgtcgatggaataatatcatcttatgatagttactgaaaatcttctttaatttcacagttatataataactcccttgatcctaaaacatgttacatatatagcattaatcattgttcatattttcccatgaatttgccaactgaaatttgccttgaggaaccatctaccttttttttgtactttgataaaacttttgttggtgtaatatgaattttcccaggacagaaatttggatacattattgtatttgttaggcttagtaatgatacaattatatgtcttttttctttttatcttttgcagctcgaattttcttggcaccaattttacaatctacgatggtgagcaacctcacaacggtgcaaagccatcaagtagtaaatccagtcgtcgtgttgcaaccaaacaaataagccctcaaatttcagcaggcaatttcgaagttgggtatgtttcttacaagttcaacctcttgaagtcaagaggtccaagaaggatgatatgctcattgaattgcccttggtctggtgattcttctatcgacaaatttctagacgagtctaatacaaagaagcagctcgaatttgctgctgcttctggatccacagttttgaaaaacaaagccccgagatggcacgagaatctacaatgctggtgtctgaatttccatggccgtgtaactgtagcatcagtgaaaaactttcaattggttgcaactatggaccaaagccaaccgggaggaaagggagacgaagaactagtcttgctccagtttggtaaagtcggggatgatacgtttacgatggattatcgacagcccttatcagcgttccaggctttcgccatttgcctcaccagctttggcactaaattggcttgtgagtaaataaataaatatataaatatatatatgctttttttgttgtatgtttatttaaaaaagacatgaaactgaggactttgtccataattttctctatatagtgttgattggaagagcttattacatgtatgtatatatgtatatatgtatgtacatgttgtttgttgtaacttgtatgattatgacatgtcttataatattgaaattatttgtagcaaaaagggtttttgttttttttttctcttgtaaatttgaaaataataaccaagacatcttatctcaaatgttgatttgatgcatcatttattaaactaattgcttatttttctattttcttaagcaatttcttttgtattagtctttactttcactgcattcttaaataataaatatataaataaaatctttggtgaagatgagaatattatacaactcaaaagtgtgattacattctaaatagatatttgttgtgaaaatactttaaattattatgtttatagcactaagttgtttttttttggcataaattttggaaaattatcccatatattattttttatttatttattttttttttaaatttacgatttgagtttctaaagtggttgtaatgctagttgcaataggagtttctttacgattttttgttgcaatttaggttgtagcgctagttgcaataaaagtttctatatagaatttcgtaaaaatacaaaaaaaaactatgttaatgtgtaaaaataaaaacccctataattttactgttaaaaagtaattgtaatttaagtatttaattgttacaaatgtaataaattagttagttctgttataaatatctttgggaaattctataatgcacccctttaacagggatgtactgatacatctctttcagttttagtatccgaaataatttttagttcaaatttttctcatagtcatttaaattatagttatttaagaaattctacaaaattttaaaaaattacggtaaaagtttaaactatgtcgaaaattgtgttcaagcagtgtgttgcacgcttgactatttagaatgtttgtaacattgttttctatattgtaaattattccaaattttttcaaaaatgttgta

SEQ ID NO: 300592 - DNA, 1458 bp, Cannabis indica
tatttctttatgacggggtgagtattttttccccctattcttttttccagccggagttgtcatggcaagttgtgatttttgcttaaagttttcaataaacaacttttgtaggcaaggttggtatcaatactggaggattacaaactcagcagacaacagaaagaagaagagaagaagagatacagggtaatttatccttacctcatcgcttttagttttatcgagcataagaatttaacaagtaataattgtgcagattttaaattacgaaaacaaagtagaatcctctcaactattgctttgtgtttacattttttttaatctcattttataggaccaaaagaagctccaagatctgctccttacagaaaaggaatcaatatatggatctaaaccaagtcctaggaaaactaacagctttcggaagccaaatgggtaccgtgcaaatggtaatggctcaatgacaactacacctcgtcgaagctcagttggcagtgcaactcctgaactcatgacaccccggtcctattctggtcgccaaaatggttacttcaaggaaatgagaagattgtctacagcgccattgaactatgtggccataactaaagaggacacaatgtcttttgcatctgtatgtgggtctgagctaggatctcctccccatggttgaactttaaatttaaaatcggtttgtcactctaacttgaatgcatttctgtgcttgcacacattaaccttctttcgatattttcatgtcgggaaattgaaaaatgatggtacttctatgcaggaacaggcagctgtttacacgctagaggatagtacacgcaattaaagcagcagaaactttgtgaatatggatggaactgtacactatgattgtaatttgttaggattacacgggggagacgaagacgaggatggtagctaacaattcgagcacataaaaatttcgatcttggctggttggaagaaatttactctggaaaaagatggtgtcattggtagagtagatttacattttgaaagatgttttatagtagtgctgaccatgtacaacccaataacacttgatggattttgcttttgtttgtttttcatgaattcttgtgtatatatatatgtatacctgagtgaatattatcattttatgtgggcaactttggtggtctttagagagaaagagatgcttaacttttgtttgttgtttctgccctgagtaacctttttagccttattatcatttctcttctctcttgcatttgattgggtttcttaattcatattgtgatagaaagctttgtgcaatgataagtgtatggtttagttttctttattaataagattatagagaaaattacgtagaatatggcattttttccttaaatttcatagatatggaaaaattagagatttacttaacttatggctttttttacaatttaagttagttgtatg

SEQ ID NO: 300593 - DNA, 1790 bp, Cannabis indica
gccctctctgttagagaaaaggaagttgtcaatctttcttccatcactgctcctccaccacgccaatctgtacaccaacttatctgtaggatcttctctcgacgaggatacaatcccaagcaattgcatgacttcatcagcaaaaattggcaaggacggtttgctgtgtccatttccaactatgagtttgaatcttatatgatcacatttggctgtgaaggtgatctaagaagagttttatcaaaggaaccttggcatctccataaccagcacatgattctctgctctccaagtgttctgcagaatgcctctatggagtcttacaccataactcctttttggattcaagtttttagactaccctttctcagtaaatctgaatcgctggctcgggtaattggtaatctcattggtacttttattgaagttcatgaagattcactaaatgaaggatggggtcctttccttagaattcgagtggctattgatgtttcccagccattacttaggggacaaactgttactttcccttggatgaaagatgaaatatggcttgattatcgttatgaaagactcccggatttttgttactgaatgtggtgtaattggtcatgtatttgataagtgccctcaattcttagagaaaattgatgaaggagaagacactgatctcccttatggtccatggatggcgggatcggccttaccaaatgcaggatacaatcgatatcgacaggatttttcaaaagaagggccttggccttttatcacccgattggctaggaaaacaattgagcctattatatctcatcctaaacagtttcctgcgcttccaccttcagtaactaatagagaaaaagggaaaggagttgtgatctctaaaaaccatattcataatcaccaacctgctatccatccagaatcaattactgttgatgttcaagacaagcctattcttcaatctaaaggaaagtcaattgccacaaccccacctgactccactttggataatcctaccacctttcatacatcctcacatgtaacttctgctgatattggtcaatcttcaggttcaaaatctgtcacaacaacattacaaaatgatagccaaatctgtaagaatgctatcacgatccaagacaatactaatctgccattcactactgtccctaacaaatccattgctttacctattgctataccaccagcatacattcatgcttccccattaccatctaatttatctcagacggatcctgcacactcaaatattgtcttctcggctgctattccaaagacagatgtgaataaaatcccaacaaacactactgctgactgttacccgctcaatgagaatagagtttcatctctatatgctaagcgacaactggttacttcaggcggtaatgttcgaaatgttctcaagcgatgtcgtactagatcttcaccattcaatgactctactaatcaaattcatcaccaacaatcagatgcttcctctgagttatcccaactctcactggcagttgatgacagcggtgtctctttggcgaaggctgctgggcagcctcgccaatctccatgaatgttgtttgttggaatgctcgtggcttgagcagcccgaaggcattccgtcaactccgtttgctcatttcccaaagtagtcctgatgttttatttattatagagtctaaattatgtgctggttctatttctaaatatcgtaatgcttttaaatttcctaatggtatagaagttcctagggttggtcttagtgggggtttgctttt

SEQ ID NO: 300594 - DNA, 2449 bp, Cannabis indica
tttaattattcatgttttttcaataacctcgttgattagcaacgagctgcacagtacgtacaaaatcacgttagcacgcctatgctagttagggtgttgtagtgtcctactcccattgtcactggtagatcaatatcattgacagatggagacgcactgtataatccaacaatttacaaaagtctcattggtgccctttagtatttatgccacacaagacctgatattagttttgttgtcaataaactaagtcagtttctcaaagctcctaccataatccattggagtgctgcaaaatgaatactcaaatatttaaagggtacaatgagtcatgggctgcatatcgattatagtgacaaacttgtaatcacaaattattcggatgttaattggagatgttacattgatgatagaaggtttgttggaggctattgtgtctatcttggggatactctcatatcatggtcatcagagagacaatctgttgtttcaagatcaagcaccgagtctgaatataggacgcttgctcatgttacaatagaaataacttggatagaatccctactaaaagagataacgtttcctctaaccaaaacgtctatagcttggtgtgacaatgtaagtactagtgcactagcttcaaacccactttaccatgcatgcaacaaacacattacattttgtgcatgacaggatattgaagagagaacctatagtgagatacattcattcatcaaattaaattgtcaattgtcttactaaagctctatctcccttaagattctagctgctgattttcaaacttgtagtgacaccatcacacccgcctttgagaggtggtgttaagacttgagtctccacaacaacttattgtatagtgcagcaacaaggtatcacaatagaggagcacagaggacaactcaacattaattctagaatattctctaagggtattgtattagtgtgtgtgcaatgattgtacaaattcctatatcgatatttctgttattcattatcaaattgtacactgccatttgtcaatattgtagtggccattaattgtaaattcttctttaaaaggcaatgggattcattagcataatttaagctgagatttatcaaatcatacattttctattttttctctcattgttcatgcaaaatgcgatttgaacctagaattaaaactcaaaacgaagagaaagaaattaacaacatgaactaaagaaaataattaagtaatttaattggtaattttatatatattttttaaaagaaaaaaatgaaagcataatattcccatgtgatacatatagcaataaacaactattaactagtggcataattggattggatagaaaaagactccaatgttggagactttcttaacacccctatataaaatttttcctatatatagatttagtgattcaagatgacccaggtatgtttatatcattatgctattatgctaataatctaaatgtttgatcttggatggtaatgatcatgcttttgcgttgattattgatgagatcaatactcatataatgtattattataacatcacatacacgagaatgggaaaaattgacactacatctcccctaatctattacgattaatgtaaactactagccaaaagggaaaaaatcttgtaaataaaaaggaaaaattaaaaaataaataaaaaaacaaacaaacaatatatgataaggtacaagtagaaaatagatggagcttgagataaaagagagtagaaactatgtacaagttactgactcgtactaataatggatcaaaatggctcaatataggaagcaactagtacaattgtgtggtacgtttatgctcaaaattgtcataggcatgttttgttcttaagaataacatgacactagaagctagtcccaaaatcgaaatgcatccccaccaaacgaaagtcaagtaataacagtgtctccccatgcacactaccgagtcactcactacgtctcttagaccagagctcgcattggcatcataaaccgttgcagcaagaaaaccatacaacagtgagccaattgggatattggtgataagaatgttgtggttcacactcacattatttggcccaaacagctccgacgttatggacacagctgctgcaaatatgaaccctgaacttaaccccaccagcgccgtgcctgtgtgtaatgccgcctcacttcctgacatcgccagtaaaatgaaggcaactggggtcggcagaagtgcaatggtcagccatcctgttcttgcaaagtataacttcctgcacgaatcaaaattctgttaccactatgcccacaaacatgtgttaccaaatacaatgtgttaaatagcaaactaaaaaatattacccgcgaatataatctggtacagccgaaaggagccgaccaaagaaggagaaagatgagtaaagcgtgac

SEQ ID NO: 300595 - DNA, 1816 bp, Cannabis indica
tgacaatcaatcccatagcaatagcaaagaatccagttcatcatgataggaccaaacatgttgaaattgatcgtcacttcatcagtgaaaagattgaaaacaagatcatcaccttgaagcatattccctcgagacaacaagctgctgatatcttaaccaaagctctccatcgtcctaattttagggagctaagttcaaaattaggaatgtttagtatatatctagcttgagggggagtgtaggaaatcaagctagcaattagttgtaaatttacatttaatgtattttccatttactctagtattactaggtgttcacattgtattatatataccctttgtatacactaaaagagatcatcagaaaataaaaatcatttttctcatttttctacaaaaatctctacaacttttgtctatagccgctgtcaccttttgaggtaaaatgaataagctcattcagtcattcctaatccctaaaagaaccgagtgaatgaattgagcacgacctgaaaaagacaagtttctactagcctagttattgagatttttatgaatctaatcaaggattataccacaatctgagactttccacttggttggtctaaggttaacacctaagtatttaagcgaaaaagctctttcttgaatctgaaccatgctcaagattgcccttttacatatatctttgacacccccaaaataaattgaagacttggccataatagctttccaaccaaaagagtcgcaaaaaaatttaaaagtttcatgaatgtaccgcacaaacttttcattacctttgcagaatatgattaaatcgtcagcgaagcttaaattgacaagtttgaggtgtttacaaagcgggtgataaccaaaaccatccttgcaagcatatgaccaaagactctggttaaataatccataatgagaacaaagagaagatgaaaaatgagatcaccttaacgcaaccctttttcacccttgaaagaaccttgaagcgtcccattcaacatcaagttataagaagttccttgtaagaaaaccaagatccatttaataaatcttgttggaaaacaaaggcccttcaataagtctacgatagaaagtcaatcaattgtgtcatatgccttgcttagatatatcttctaggggtgtacgtcggtcgatttggtcgggttatagtatatttttaccagtctaatataaatatcgggttgcaaatatttaattgtaacccaaaattaaaaattaaaaaaagttcagcccgcccaatgattttggtttggtcgggttaacccgttcttcatttttttttttctaattattattattagtttctaattcaaaaaaatagatctaaagaataaatatatattatttatatttcaagctaaaaaatactttagtctaaattaattttaaggactttaatataagataaatataattgagtaaacataaaataattgaataaaataataatattgtatagattttaaatttcaatttcaatatccaaatacaataaaaattattaattataaagtatagatttgaagttaaattctaaagtgtccaaactttaaatacaaagtagtttgactaataaatgtaatttatgtaatatattatatatacttttattaaaaaaaaataaatcagtttaattggacagtttagaataatttgtaaaccacccaatatattcattgcacggtttgaattttcattgtattatttcgggttgtatatttgtcagtttattcggtttggtttggacggtttattcgagttgggcggtttgtaaattttattga

SEQ ID NO: 300596 - DNA, 5517 bp, Cannabis indica
attttaaaaacagaaaacattaaaaaagtgttaccaaatgccaccttaataatattagttctagtacaaataactttgtgacttttcaacttatttttaaattatataaatataaatagagttgcaatttatctgtagtgagaccatcactaatagaaaatgtaaaaattatactaatatttagcaaaaaaaaataattttgtgatatatttgcatcgatttttagtattgtgctccaatacacaattgcaaaagttaacgtttaattaatatttttatttaaaatataaaataataataactttatcataaattttattatataaaataataaaaaataaatgtaaaaagtttacaatttaatgtaataatgaactttgataataaaatattaaaaatgacatgaaagtagtgcatttattttgatgcaaattttgaatcatgccacattgtgatccaaattcagaacaattttgttacgtgacaaattcaacttttggcacaccaaactgtttacaagatgagctatattttaataatagattacatagtggcacccatataagaagctgaatgttaaaagaaacatgaggacatgaatgatcatatacatatttaatttatgcaaacacgaatgttggtataggatggtattagtgtgggcgaaaaagggactttactttttagcattacatttgaattggaatcctaactcccaaggaaagggagtggaaactggaaagattaaagtctcgtgtggcgagtaggatatggtaatattgggattgaattaagaaaaataagagaacccaaaagagaatgagttaattgatcaatttccaacaacaaatcatgagaaaacaagtttgactctaagctgtaaaataatgccttaccaaatgatatttatgaaaatgagcgatttgataagatataattattgcaggtttctaatgagatttagttagcattaccacgtcttagagggacaagttattcaattaaattcttccatatactttctaattactacatcacatgatgaaaatgatcaaattccaatcacaatcataacatgggaattaaaattgagatctattctcccaaaataaaaatacacaccaaacattggaatgagccctttacactaaatccaagtttcattggcatccaacatccacataacagaagacctcaatcaaatttctaatgagcaagaagacttagaattggttagcctaatgcgagataattagacaaaaaaaattgttagacatccttacacttgaggaatcaaattgactgctagaagtataaagttggtaagaatatgcactcacaatcaaaagagtttctgatagtataaacaaagaaataaaagagaaaagaaaaacaatattaaagctaaagtccttacaaaaaaagaaacaaataataaagctaaagccaaatttccctaaaacaatcacaatcatcatgtctcaagttccttctaattttttgaattgtagataataggtaagttcaaattgatatattctctcagcaatgtagtaaatacaaaagtattctacattcttggtaagtagggtagtcccatacaagcttggcagaggccactatctctcaaatatgaagtgttttcgacaggcctatattcagtattcaccataaaagctaaggcttgtaaaatctgggggactacatgcaattttagctaaaccatacagggaatctaaacctaatattagctgcatgatatgatagaaaatcatcaaagaaatagactgtagtaaaaccttgggaatcatggtggtttacatcctaaaactttatttactttttgataaaaaaacaaatcctcacaacttcagccattgatcgtgaaaatactacaggaaaaacagtggaaagcactctaccagaacaaagagaaaacaaacacaacacccaatcttgcaaagcaagcctactgctatcacatctgacatcacctaccatggactatcgataatgttgttatactgtgtacgtttcgaggttactataatgcaaaatcaatgagcagcagtatgactgtgaggccaggaaaaggttagcaactaactttgtagtcctgctctgctctcatgtggttatacttttatcgcaaaaaaaacaaaagatgataagctatgagaaaaatggaatgagagagagagaggaggggggtgatcttaagagatgcttaaaacaagttctactacgtatgatcgatcatatggacaagaaactgcaatttagaaaaccaattcagtttgtagttttagaagtaaagatatatgcagcgaaaaatgcaaaacaagaaaaatggggtgttattttcttctaagaaatggtgatattattaatttcaaaatattaatgatagtaaaatggcataaagaattcccaaaaagcaacatcactagtagcaaaataaaaactagtctattcagaacaactcccaaatcctgaataactcaaaatagggggaataaagagagaaagaaagtttaggagggatacgtcatagggtaaggacagctacaggaatatatgtaggttgttacaaacaaaacagcagcaaaccgaaggaaaggataaaagtatccttaattgtatgcagataattaactacaagaaactatcatgcaaaacagtcctactaaacaaaataataattaacaaacacaatgaacaccaaaatattgcgcagaaaaatttggatgtatgactgatgattcataaatatatcaagaagtactcacatgtatcaccaacacggggcatttcaccttccggattttgttgatattctgcagatattctaaaagttaatagattgaaatagcataaacatagagtaaaattaatgattggcatttagctttctaatccttggaagtgtatgaaaaaattcaagcttccactagaaatatccacagcatatataatggccagacagacctatatattaccttataaatgtcaaagcagaatgtgaaattcacatgacaaagaacacgaagaccagacagaattgcactatgcaaaacaacacctcttagtctaggcaacttagctgccaaatgcaatgttggcccacttccaactgactgtccatacaagatcaaatcttcctggctgacaccatattgagtctgaaggcattcgtatactgcctcaatgtcagagtaagtatttgattcactaggctgaatttcataaaagacaaaaccaatatcaaaattttataccattagagaagacggaacaataaaagatattgcagctattgtaaagaaattccggagaagatcacataataattgaccacatccaacatgagaaaggaaaaagtaataaaaaaacaccaatttgattaaataaatttgttacaccgatcgtcaattaataaaaacagccattccacttaaatgattcaagtgagtgttaaaattttaaaagataaatttcatgacacaaacccaaatttaatcatatagtattaaagaatccataagaaaatcttgaacaattgctctgattactttgggtagcacgattctagaaacaattgaacatttcagccagttaaagattctagtagcaaagttcctcaagtcactttcgaaaatcctaacaatccttagcaaacccaaattactgaattgatctcccaatataataaattccaaagtgaacacaccacttacacttacatgatgagtcaattttaagtggtccattagccctaaaaacataagagaaggtggtccacttccaattcatactagtaggctaagagatttggccaataattacttgtagaagttactgtttttttgctttatacaaaaaattatttaccttgccggtggaggctccatatccagaatagtcatatctgcattcacaaaatttagagttgaatgtatgaacaaacacccaaactcactcaagaaacattgcaaggtaaaaggaaaaagaaaattcatgatttaaccaaatgggatgctctaaaacttaaatagaatcttcgaaacgcaaaaatctcaaaaacccaaatccagtatggctggatgaagagaaataaaagcagaaagtgagatagaatgaacattctgaatcatgaaatctcttagccgaatggaaaaccagaacgcaattattttaaggggaaatgttaattagaagatcctagaggcacaaaactccaataaaaatagtaaagttgcactgtgatgttgttgcacagaaaataatattgcaattacttttctttttgaaagtatataatgtatatacatatacatataaattactttaaacgaaggggaaaagggaggaaatgtataaaaagaaaggtagaaaaggactagtaagaactaacaacgagggagctaataatattgcctttaacaattccgaacaataaaaataaaaataaaaagggggaagggagagagagaagggaaccattcaacgaaatactcagagagtaaaagtaaatctcaatggcagatcttaaccaaataaaaatgaacccaaagatggaccatttccactaaaaacgatggtaaaaaaatctcaagagctgacaaaaagcaattagagaagaagccatggaaacaagcaaacaaacattaatagtgaaaaaaatgttaactttatatattgtagacccatcaaagactaaatgagaggtaagaagattaggttaacattttttgagaataaggataaaatgactgaccccataagattaactctgagattaaccttgagctgaacaaagagatcatagagttgaccaaggtcagcagcattgccatgagagtaaagcagagtgagacgagcataagggttcctcaaatagaaagcgacaatcttgttgccgcgtttcgtatcaatcattagaacgtcaaatgagttgtcgtcgtccgagcacgaaatggccattgacggcggcgcagccgtcgtcgagaccaccgttagcttaccatcttctctctttttaacgccgtaagttggcggagacggaggaaagaaggcaaattttgccgctaagtgagaaaacatacaccccattcacaatcacaggcaccccaactcattgactgaccctaacaaactccaatgcatgtgatgtgaaagtgaaacacagagaacccaaaatatattgagaaaaacttgggggtcgatttttctggggtttgagggaaaataaatatgctttctttcaaagaaagcgaaaatggcaaaaatgggaaataatggtaaaaggttttgtggaggatagtgttggctgttgcttggctaagatttgtgtaaaaaaaacaggtcacggctttgatggagtagaggatagtgcagagcatctagatagtagagagagagagagagagagagagagcttctctgtaatatagtgtactgtgtagagtgaagtgtggagtgtagggtggcaaagcagaggaagagagagagagagag

SEQ ID NO: 300597 - DNA, 2039 bp, Cannabis indica
gattatatgaaatgagttttttttagggcataaaacccaacagccaatgtacttagaaaatacctcaatgagtttaattatatttctctttaattaaataacattggtttcaaaattgatgaggatgatcaagtgattatgttactaacttctttgccttatgtatgtttgttgacaccatgctctatggaaaagaaactcaaaaaaggtctgaggataaaaatgattctaatggtgaaggacttatggatcatgacagactacaaaagagagagaatataggttttaaagaaataattgtaatgggaatcatcaaaacaatagtggaagcaagaatcgtggtggccattggtctaaatgaagattaaaacatggaaacttttgcaacaactgctagaaataaggacattagaaaagtaagtgttattttctaaggaataagaataataaagataggagtagagataaagatgacaagatcaacaatagagcaaaagatggtattgtgacaaaagggtatgcatcaactgatgtgtttgttgttgctaattaaagtttgaattaaaagtggattttgaattatgggtgcagttttcatatgtccctcgagaaaagtttgttcagatcccttaaagaaaaagctgttggaataggcttttttggttaaaaaaaggcttgttcagtgaaagacattggttttatcatcattaagaagcatggaagcctccaaagaactattacaaataagaggtatgctcttgaattgaaaaaaaaaattattttctctattggttttttaacggttaatgcctataaagttaaaattgatgatatttcacttaaagttgtcaaagatttgatgatttttatgacagattagtatagagataggatgtactgccttattggagatactgtaattgatgttaaatcattagtaacaattcgcaataatgtgtcggatcaaaccacatcgtggaacttgaaatttggggcatgcgagtaagagagtcattttagagcttgaaagacaaggtattttgaaaggaaaactgtcagggaagctccaattctgtgaagcgatgtgtatgtaaaaagttgagttatgtttaatattagtgtgcatattttaagtgaacctttactattaatgtattcacttagatctttggaattcatctaagaaaaatactttaggtggagccaggtactttatgaatagcattgatgattaaagattttgtactttaatatgtttctaaaacaatttattattgttgatgctaaaaatttgttgaacaacaaatttgtattacaacataaaattctttacacaaagtctgttctaatagattacaacactctgtcagtttacacaattttctctcaatatttgtgatctctctcctattttattgtttcctaagattgaaagaatacgatgatgtattcctataaagttttgactagtcttgtgttagccagaatccctccctctttttgaacgatggggtcttccatttacaggcgagagtgactattggtccctcacatttctttttttggactggtccacgtggacttgtttctcttcatttcttcacacgtttctcttattttcccctcctctgtgctcttcaaactctacttttagttccccaagctttattctgctttcctctctggctaagctttctctttcctttttaagtaagatgttacatttaatatcactgccacatcgtttcatcagttcttattcatttacaacaaataaaactacctttttacctccgattatttttatcactttataatttccccttagttgtacaatatctgagctcgtgactctctcaatttgagcttagatgtcatttaactaatcacccaaaataattcacatgtgtcattaatgagccatgatatgtttaatagataatcattcaaattttttgagaaactgtctccaccctttctaattaatttaatattgggttatttgcggcaaaaccccctaaagtagggaggtttttgca

SEQ ID NO: 300598 - DNA, 1873 bp, Cannabis indica
cttgcactgacaggtccccagagctttttccatatgctcttagtagtataatccaccataatcctaaataaagaaaatgattactgttaccgaataaatcattctattctcaactgtatttgtgcttgtacctgtattatagtgtttggggtgttgaaattgaatttttaaaaagctaaagaagtataatgttatgacacaaccttacagaaaatgagctaaattttaagtgttcttgaacatgaggaggacaacaatgtctccaacaaatatttgccattatttgtgacgaaggtgaactacttacttaccggaatcaactggggcgacacgaccgattgcagcttccccaaagtcgggatctaacacatcttcagttgcataatcatgaccttccaattctagtggaacagtcctgactttgaaacttgcaggcatgaggccttgaccaggactgtgacaatccatagttttctcccagctctaataaaacacaaacaaacaataatcaaaactcaaacaaagaaatggcaattattaatgttgttggtatgagttgagttgtacctgtaattgaagggtgtgaagtatgaagttcttgacaatatcatagtctcctttcaaaagaaaagctattgcagaaggtatgaaatcacgaatgaagatgtgatcatagttgagaagagttgttgtggtgttgggatcattagcagcagcaattgtaccaatgggattgttacagtaatagacaatggattcctttagtaaattccaagcttcatcctcaatcatcaaactaacattattctctcttattttactatcacatttacaactcaacctattactattattgctataccaatcactagtctgaaggccttgacgatgatgatggtgatggaatatcaatcctcttggattgagagtagatttaacataaaagggtctattgttaaagagaggataagccttagatagaagagtttctgccattgtcctttgctttgtccaaaccaaagattggttttttttttcctaattagttatctaaacaaaagaatgttaagacacatcaaacatcaacacaataaatatataattgcaaagaaacattaagaggtaggtacctgagatgagatgagattcatttcatattattttatccatggaaaaggaaaaagataaagatggaaatggaaatagtatagtacaaaaaggaaaatgatcttattcttatccatattattattattatgaattatgagattacagaaatccaattaggcagttttagatggcagtgtcctattgattcaattcaattcaattcattatatatcatatcatattttcttttctcgctttccaaacgactttgctatttgtagcccttgacttggtcacgtttctaaccttataattatacatcaccccaacgacgtcgtttcacattttatttaattcattaaaattaatgaatcaatttcaacattattatatattaatataatttggattaacaaaaaggatgagatgagattgttggttcaaacaactcactacaaaacatatgtaccaaaatcaaatcactgcataatatattttgtcaaccaaaaccaattgacaccttttaaactaaaaatgaaaaccaaccatatataatttgagtgtgtgtgtgtgtgtacatacatgttacatgttgttctttataaaatatgctggacatcatcaaatgatccaagtaattgagacattaaaaaaattaagaaaaacgaaacaattttaacaacattacaaaacatacacataatagaaaaaacaagatgatagtccttgcctctctctctctctctctctctctctataacta

SEQ ID NO: 300599 - DNA, 809 bp, Cannabis indica
aaaaatagaccttagttttagatatatatataccttccatggaacaaggccacatgagtaagtgtagaagctatagtagcaaatccaaaaccataagtgatagcaaaaaaagtgcttaaatggacccttccttgctttacatactctacttggtcaagctcaaatagatcattaacaatcaaagacacattgtagggttgacccgaacccgtaaacaaatctgccgagaatatgggaaattttctagcaccgaatacatctaaaccccagtacgaaacgggcatgaccacatatattatcacaacatagcccaccataatgttggcgatggcgaaaaatgggctcactagtgggctggacaagtatgaggctacagtagtccagtccagagtgaatgcaccgagtccgagccctttaaggcccgacccaatttggtgggccgtaactgaattgggaaaggcccaacaaatccacgaaatgctttgcaaggtttggaaaaggtatcccgggaacacgtaccagcagaaactacaagtcaatgcaatgatgaagaactttgcacgagaaattcgttttttgttgtatttgtcttctacttcctcttcttcatgcaaggtccttcatgtgtttataaatttcagctattaattatcctacgcattatgtctatattatatataaacacattagtcaaatataatatatatacaattatttgagtaatttaaaccgttaaccattaaaacatctcaaatgcaatgttccaaattataataaattttatattactctaaaatataatattttat

SEQ ID NO: 300600 - DNA, 1433 bp, Cannabis indica
caaaggatcctttctcaatgagcaactcattctttcttagctaagaacaatggctgaagttatagaaaaagctgagggagtttcaaggtcatggagcaatgagaagaagagcaaaagaagaaagaacttgagagcaagagaaggcaaaaagaaggaagagtttatttgatcagtacaactctagaagggaacactccctagagagctggtggaaagtggtatagaaatccaaatgagaggcctagacaagatcaaagaggatacatggacaaaaagccaagaacagagcttgaaattgagttcgagcttaacacttcccctgctcagatttatacggagaacaaagaaaaatctatatgaaaggagacttacaaggtgatagcaccgcttgaaaggagagatcaatcaaagtactgtgcattccacaaggatgtagaacataccacaaacaagtacaaatctcttataaggaaaatacaaacaataattaaagaaggaggattccattccaccagtacatgaagaggaattaaggtggaaggaatgaagaaagatacactaaggggaaaatagggggacacttgagacaacaaacctggaaagagttaagctcatccaaggaatagacacaaattctaaaatagatccccatgattctacgaagtgtagagccaacacttaaccaggaaaatatgactcaacaggagaaaaggaccatataaagggtgaaaaggctccgagctcaacaacatgaagttaattatattcttcctggagagaagtattttcctatggctccaaatactttcaccgaggaagaccttaaagatgtaaaactgccacttgaagatgcttttgtcattcgactacaaatccaagattgcgtactaggaaagatcttggtagatggtgggagtagtgcacacattttgtttcatgtggcattaatcaataagggattagatgaatgcaaaattagagcttcaacgtttccagtgctttccagtgcttcctttgacaacaaccaagtttttcccataggagctattgagctcgactgtcacaactgttggaagaactttgaaagttgattttattgtaatcaaagttgtatctggtagcccatcatgaaagaactccacagttaagcgtgcttaacgtggggtaagtttcaggacgggtgactgttgggaatattttacaaggatctagacttactaacaagtatgttcattaacattctaaatatgaattctcttaaacaataaaaataaacacataagggtttaagaaaaccttgcattgattgcagcggaatataacgactccttccgttcaagatctctagctcttgattcttttatgtagcagagcattattaagatctgaacctagatttctttctcttcttcgggtttggttaccaccgtctt

SEQ ID NO: 300601 - DNA, 2152 bp, Cannabis indica
gatgtcatgttggcatgttgcattggtatggttctcaaaactagagagaaggctacttgtaattaataataaacctagtgaattttaaaatctatgctaaacatatccaactggttatatttagtatgataaatgatcttgaacagctttcccaaagaaatgtgccagtaaggcagacagaaataaataaattatttatttttatcaatttataagctatttgatacagaagtgtgctttcaaggttctgaaaacagagaaaagcctcttgcgataaatttcctcgacttcttttatttcccgagggaactacaaccaatggaagagtcattatttctttccagctgggggcgttcatccctggtcacacaattcagccagttattgttcgttatccccatgtacactttgatcaatcctggtgggatatttatatattttaatgtattacattaccattggttctgtcttcaattattatactaagcagtgttttatttggcacattgatcagggggcacatttccttggcaaagctcatgtttaggatgtttacacagttccataattttatggaggtaccttctctgttaatttgagttcactatttccttatgttgtccactgcagttgacttggaacaattttattgactccttatattctgttatacaggtagagtaccttccagtcatttctccacttgatcacgaaaaagaaagtgctgtcagtttctctggaagggtgagtatctgccagactgctattcattggctgattgtttttctttttatgtgactaatacacatcagcagtaggtttttgtgttgcataattgggctacattttgtgtagtctttaataaaattaagtgaagtataatttaatatttgattacagaaaacaatatttgaaggaaatatgattgaatttcaataatgcatttatagtattgacataatgatatgatttttaggcagacacttaatgtgctagtgcgggattgcttttccgtgaactatttatttaaatctatatgtttatttctaatatgtaaatatatttatatatatatatataaataactggtgtatacataatatatttaaatgaaaacagtcaaaataacatgtttacaccttgaagcttgaacatgtgttgcctgatgcttctacctgtatttcttgattttatctaactttctaacaacaaggatgcatacaatgcagacaagccgggctatggcaactgcattaaatgttgtacagacatgtcattcctatggggatttgatgcttttagtgaaagcattcgagtcgaaacaggtacttgcttcttggttggtattttaatttgtggctgcagaaataagtataaggttctgctagggaattttttggttttacgaatgagtattcacaattaaacatataacacggaagtaattattatttgttttggtctatgagatccaaattctttccattgttgtgatcaatcaaattacatttttgtgctttacaaccatcacatgcggtaatgaaaactgaaggaatgtaattttttgtaatttttctatcctgcacaaagtgaacaacactttttttatttgctgcattaattgttactgatatttcaatatgtttttaagatttataacttataatttcaacatttattggatctatgaattgtttctgcatcttacactatctgtttttttttgtgtgtgcgcgtgcaggagaagccctcagcttacatggttgaaatggctagagtagaattggtgagtccgtgaattgaactttctataagtgcatccttctttgtgtaggttgcttttttttttctctcctggtggtcgagaagtttataattgtcagtgtgtatctacattgtttgttagtacatcaactttgatctgttttcctatggaaatgttctttcaagccttggctgcttgcatctttcagtctatcttattactgacgataaattgtacaagaattgtttggcatcagttgtacttttgcttcttccaatagttcatgttcaagtcttaatattacattctaaaggttgtccatatagtattatgctattttttttcacaagaattgaaatgtaatgcagatcctctctctctctctct

SEQ ID NO: 300602 - DNA, 1627 bp, Cannabis indica
taaaaatactatattttctgtaattacaattaagaaatcgtaaaaatatttaaaatttcgtgaaattatattattgtaaattttttgttgttttcgtgtatttgtaaaataattccaaattaaattgaccattttcaatatataatggatgtaattaaaatggtaggccatgaaatccaaatggatcaaggcaaaaataaaggcttttcggtttggttggtactgggcctggtatctaccaacaggacaaatgtgagtgagactaagataaggatgtcatgtgcctagtccatttcatgcccaaattagtgaggttgcttttgctacaagaatgagagaattcttaagaaaactataccagacattaatcaataacataacacatcacattttatcttatagcatatgccttttccaatattggcctatgcatttcatcttttctgctatgttttgctgtactggttttaggcaaatagtaataatattaataataataataatggtttgaatatgaagggtggaaaaaaaaacagtaattttctaaaagaaaaaagaaaagaaaagaggggaatggataaagatcatgaaaagagggcccatgaaaacagcttatcgtaatctctcgtctctattgctgttatttcattttcagtccgacaatgtaaggtagcagaatctctttacaaattatttctgctcttctttctttatcaccataaaaaccttgagactccatactataatttctcaaacagtcttctaacaagtacaactgtgtacagttacatacatatttatatgtatatatataattaatgtttttgatatcatatctcaaaatcatacgtaagctttataattaacatctcatcaaatattttaacggctcacaacacaaccatttattgaacatgttaacaaaatcacatgtagtcttgtactatttatgaaaattgtcgggactcaaaacccatttagttaaaaggtacaattttttgtgtgatttggcaagatttgtgggatctcctatgtactgagtcacttcacctaaattgaacagctagctaggaaaaaaacttaaaagatgataacactaagtaatgggacaaattatacatttttaccgttccaatcatgtcttggaaaaatttcatggtggagaaaaaaaaaaatatatatatatatatatatatattcatttttgacacgtaacttatgataagggccaagtgatgaggttgtccttactctcacaaacataataatacaaactatcatgtgcatattctcagcttatgaaactcccaatttatacttctcttaattattggcaaagtgggcatttctcaatgatgaataatataaaaagaaaaaaaaaaaaaaaagcaagtaaatcttttgaaatattaatagatgaagtctataaatccacaaattttttgaagaaaacaagtactttaatgtttcaactaaacacactttaaaaaaaaaaggttacatcgcgaagaatccttcaacttaatattattttttcactaaacaaatagtaacaaacaagacataatgtttataagttgcatatgaggtatgaaattaaatgctagaaaaaaaataatatatatat

SEQ ID NO: 300603 - DNA, 1216 bp, Cannabis indica
taaatagttaagagtaccacctctcctactcagagatttcccagttaaagcttaacattttgccctctcagctattccaaatcctaccttgtattattattataacatcatattattaaagtcatatatttctcacacatgtataaatcataatcatctcttatatacttgtcaaattcaaatttctatcatcatttttttcccacaagaagaagagaaatggataatgtgaaggaaaagcagaagaaaaatttgatagccaaggcatggggaaggtgcaagtctcttggaactggcttcacaaatattaacaatactactaataataatattattaagtcttcattgaggaggagctccacagtgggcccatctcctccgctgcgggccgagagagaccaaagtcggcggcggaggaggagaagccacgtggctccagaaggctgtttctgggtgtacgtgggcccagaaaagcaaaggtttgtggtgagagcagagtttgctaatcacccacttttcagaatacttttagaagatgctgagctggaatatgggtttaatagtgaaggtccaattgtgcttccttgcgacgtcgttttgttctataatgtcttggctgagatggagaattatgatcagttgagtaataataatggttatggttgtataaatagtggctttgctaagcgaattttgagcccaaattataaccatagttatggttcttatagttataagcttcttagtccttcacatttgcttaagatcaatcctttataacaatttttatgtagttaaatatttagtatatatttataaaacagaaatatacaacacatggcttgcttgcttatatattgtaatatacttttatgtaattagcttctcttttgggaataagaatagttaaagattgttgatttttgttattagattagtttttgatctaacaaaatagtttttagtgtagaatttgggtaacaatatgtgaaattaaacttgttcagtattctctattctatgtaaaaaagaatagtttcacattattataaacaaaatgattaaaagctatgtttgattttggtaggaaatgaaaaatagaataaatattattttggatctgtcttttgcaaaagttattaatttgactttctgttttgttaaagggtaaaaatagtatttgagctaatttttaataattttatttttaatataa

SEQ ID NO: 300604 - DNA, 1457 bp, Cannabis indica
gaccatggaaagtggtggtcgcgactactgaagcaaaatttgacaacttcagcatctttcagtaaaatgtgcataactttcacatacaaactccaaatgagttgattcaagatgcgttggaaagaagaaaaataaatctaaaacttttatgctttgacgttttctaaaatctgatcagaatatagtcaaatttaagcttgaagtttcagctttattttcatgcagaattttctctattctatagattattgttttctgaaatttgatcaatttatacattctaagtgtgaaacctgaaaccaaagaaaacaagcataattctattccaaaaagaataacaaagaaggaaaacaactataaaaagtgacccaaaacgtaggctaaaaatagcctaacaagagggctcaggatttctccgggtagaaaccttatgaggggaggactcaatggtgttgtttgttgagtattttaaagcccctttttcccccggcttgtccgtcctctttctccctgcctttagtgctcctcgtctaagaaggagtatctcggagcggcctctaaggagttcctccaacgccatttgcatgtttgcgaccgtctcttccagtcgcaagttcctcagccttagttcattcatttcctcatcgtgtagtcgggtccgtgaacctaaacttaccaagtaggttcacttctcttttcccaatcgttggtggaaggttctcgggtctttcagcctcgacggctgcgggtgccttatcggggatggagctttcgactgtcaagctccgttatactcttccaacgtgagggaggtagtcatcccatagtggggtggttcacttgtcatcctcgagtttcttgttctcctcttatgtcgagggtctttcaccatttgtacctcctccattttgtggtgcttcatcaacatcaccccttccttcggcagttgccactggcgggggatcaactggtgttcatcgagtcgtacttctgcttcctgacggcgacgagaacgtctcagcatcttcttggtaacttgtagtagagaagaaatgttactttagaatgtcgcttcaaacagacggtgctaaaacgttaacgatctgaacttgttaacgatatagataaactttgtcaactaataatattgataaaatttaatggaactttgactttaatgccaagaagaaagaacttcagaatctttaaagtgtttgaaagttatatctcataaattttctttcaatgatacaagttttttcctctagaaaaatccccctctacaatagatgggagagtctaatttatagccagcccccttcccctaacaccttcagcttctctcatgcacactatgaccagtcgcttttacttatcattacactgtcccctaagctgttgggttttgtaccctaaataaaaccatttacaatctaattagttatcaatataagaaa

SEQ ID NO: 300605 - DNA, 1378 bp, Cannabis indica
aaaaaaactaaaagtaaaatgattgccgaacaggcctttaacaaacgataacaagagattgcaattatggttatgtatttttagctctttaatagttataatctgaatttcttttcaggatggtgtatattattgttattgaatattatatgaatttttgaaaacataaataatttatagtgtcacaaatataggtgtatatttctcttattgaaatattatggaatttttccaaaaggcccataaaatcagcccaccatacactacaggtgtctttgataaagcaagtaaggagtctaccaatatcaagtgcacaaattcttttctttattcttagtagcccatttaacttccttatgcaatgaggtaagaaggggtcatacactacatttcctttatatatttttatatgattatttacaccacatactgaaattttttattttttcttactgtggggcgatttttttttcttcaaaaatactgtatttgttttaaaaatacttgtgtaagttttatagtgtgtaatgtgttgagttctcactgttgttttttagttgttctactgttgtttttagttaatatattttgtattctactgttgttttataaaattacagtatttttgaataaatttctatgtgacagtatttttgtaaaaattaatccaaattctaatatttttataagttttcctatatatatttgatagaaatcttaaggatggtaagctctttttacacattcacttagatgggccaggtaaagagcttgggcagcacttacaagcccattaacgaatttcaagcccacccttgacatacttataagataggatatgacatgagggcatttgattggaacttcttgtttggtgcaatttttgtatgtgggaatgtagtgtttttattgggtaatatgaatatttttatacacttgagttttatattgattctcttgtccacattcccacacaaatcaaaactcataacaaacactcccaccactccacctcttttttctttttatttttgatcttagctatttttatgttattgaagattaaattcatgttctgtacgttcttcaagttattcttatgtttttgttgtgattagttatgttaagtttttggtttatgcgagttaatatagttatcaaaattttacaagaccgatattacagtatagaaacagagaaaggaagagctttattgattggaaaaatgaattgaattgatacagagcagtactaatgatacaatatttatatacaatgaaatagagttaaaggaccaatctaccctcctaactaactaacagaattaacggtctaagaggccccctcaagatgaagtgtaaacattgttgatactcat

SEQ ID NO: 300606 - DNA, 7977 bp, Cannabis indica
gattaacaataaacttttttttaaggagattatcaataaattttgattctcgattcaaatgctattttttcaattctattttcatatattctataaacttactcctaatatttttcaaatcaataaaacgaaaaggacaaactttaattcccgtatgaaaaatcaaattttcaatctcaataaatcaatataatcaacatcaaatttcaagttctcaaaatctataaaaataaataaataaatacataaaaatagatctcataaacacaaactcaaacattagagcctcagtaaaatactaaaaactcaaacattaaaaacacacacaaaataaaattcgaatccagaacttaacacacacatcaaaataaaaattaaaccataaataaagatttatgttattattttttgaattttaataggtattagcaacaaatttaatattttaagtatttatgtcacaaattttttaacagtaaaattaaaattttaatataattttattaagtaattattattacttaaaataaataatttattttttatataaaatttaaaatattttatatatcctttattaatttgtattatataatttaattcaataataattaaaaaagaaaaataaaactgaaacggaacagtcgattcgataaaatgggcggttaagtggggcccggagggccactttccaatattgccttcaaacgaaacataaggttacccggtttcccttacaccgggtcccaccaccctgactcaaccggggtcaaacacacaagactgttatctctgtttccaaacagctctccttcctattctcgtcggctataaaaaagatcttccactctccccttcaccttgttcttttaccaagctttgcctccacacacttctcttactgtttcctctcttttcaaaaactctaaccgcatttcataggtaattcctttcttcttatgcaccgccactagttttagattctcagcttcagtggtggaattgttcacctgctttcctttttctctgaactattaattcatttttttttggttatttttcgatcgattatcgttgttatttatctaactaactggaagtagattcaattgcagaacaatggcgcactttctgaacgatgatcttgaatacgtcgctgatgattattacgacgtcactgacttcgacgatgatccatttggtgatgaacagtctcataagaacgacgctacggattttgagtttgaggatgacgttgatacggtgcttgttaaattttgttttgtttttaattttttatagttcaagtgtgaaattcatttcatatttgtggtacggtgttttacagagcaagccaaagacggatacctcagctaaggaagctaggaacgggaaagatattcaaggaatcccttgggaaaggcttaactttactagagacaagtatcgcgagacgcgactgaagcagtacaagaactatgagagcctttctcgctcccacgaagagcttgaaagggtaacctcgctgttttttttcctctctctatatttacgagtgcgcactcacactttaactatgatttttgctacagaatctttttcgtcgttgtattaatacatgtaatagtaaaattatcatatgcgaatatccgatctagaaagatcggtttgacgattttaacttcttcaaggattccacatagatttgttgtgcttttctgagaaaaaagataattaaaccaacatatttgtgtctgcgtttgtatatatataaatatatatttatatttatattcacatatattatatgcgtatgcgtaatgcgtgtgtttattatattgattcattttaatcgtgttgatcgttgttattttggtagcaatgcttggaagtggagaaggggaaaaccttttatgactttcacttcaatacaagacttgtaaaatcgacgattgtgcatttccaggtagtgactatatttcttcaaaaccattttacaaattttcacgtggagttcatataataacataatttatacatctcactatcctgaattaagggctaggacttaatccttttgctctgtaaacataaggtcactcgaatttatactcaattgccaatagcaacttgctgtcatctttaacttgtgttgcatagttttcacagcatctgattttgtgttttggccaagtctttctctgtacttttttgatcgtttcttcttttggatcgatgttcattgtttataatattctacttaatggtttatcatttgcgtgtattgggacggcataaactttccttttaaagtctcttgtctaggagtacaaaatagtttacttcttgtagctggtctaggatttttctttcttggtcagatagttgttgaatttggttgtgcacacatcgttagtctttaatttttgcaggtcttatgcgtatttacagtaattgttggatatctttcattatatgagtatagctttgtgcctcagccattatttggaaggtatggaggtggtgtcgcagatcttattatcattcgagatgtattgtgacttacatgcaactaatcttaagtttatgtagtgctccggcttaactatcaactttgggctattataagaaattgatgtgtaggcctacaaattgatgactcaattgaattttgatatgaaggctggctccttgctccgtgctttttttttttattgaaaggaaatgaggttggatttaaacaacttttaaccgaagtgatttctcattcttgtgactttataaaaaaaaaaattctccccatatatttccttttagaaagtttcctcttgtctttcttttactcccttctgaagactactttgaagggagatttgttattagtgctactgaactaagaagctttcatagagaacaattgttcaactattatgagacagaagtttcagcttatggtttagtgagttcaattttttttggttctgacaaactaagtgcaaccaaatgttttcctaaaattacgtggcatggttttagcactcacaaaatccttttttgcagttatgtgaagggtggatttgtacttctaatattgcacattacattttgtaaaaacataaattaagagttcaaatttcaaggatacatactcgtatatctgctactgtcagatgtgtctttctactgatgagattatctgacgagtaagatatggatgcattacggctgtggtatgacttggtatttctatttgtatcttgatttgatattgatatgctcgtccactgtattgctataaattcattcaacaaaactttattaaataattacatcgcttgtccttttacatatatgaacacactttgcacccgactgtcagtcttggtaatttataacataccacagacacatacgtaagttttaatttttagaagatattctgtgtaaagtatttacaacattgaacatataagcagaaaaagtatggtcatctcttcattgcgaacgcaatttacttgattcttttttacttttactggtgtggacaattttctagacacgtgtagagtgccctgctctataagaattgtgatgcatgattgctgattctcctacgcgaactgttctgtttaaagattctgtctagagttgttaatattcctgtaagttgtaaaactgtagatatattgcatcagtttgattgttaagtatgatcttgcgctttaacccctcagtggcatttgggactgctatttctctttattacagcatttaaagaaggtgggagttataactgagctgctggcgcgtcattgtttatatggtatgataggaaaaaatttgagcatttaagagacctctgtatcaattcttgttgtagtatgtttatgtgcagctcttgagggtacctaggctgcgcatctcatttattaatttagtaaaattttcatatgtttggattatgtccttgtaagatttatgtgcaagatttctgcattaagaaatcagtcctgctgtgctgtattatctctagttctcttttgcctttatgcaaatgcattgaactaacagttttttttatggttaatttgtgaaggtttatctctttcttgtgacctttaattctaacttactatgattacatggtagattatggactacgtgaatgtaaccagttccatctttcagtttttgtcacccctctgcggttactcatatcataatgcatagtattattttttcactcattgcagtctttcctgcgcatgttatgctttcttctggactatgttcatttttttgttttgttatcttagctgtgatgtacgctgtaagttatttttgatgttttatatgctttcttgaatgaaataatgtagtccctgatttttccattgaatttctttttgttcttgttgtgaagctgcggaatttactgtgggcaacatcaaagcatgatgtttaccttatgcagaactattcagtagtgcattggtcatctttgctcaaaaggggcaaagaagtactcaatgtggtgaagccgatagtgcctactttggtcagttgagacactatgttaaataaatagtgcaaacatttccctatttccaaccttcatgttttttgtgaaaagtttgctcttaaatccagtactgagtaatttggttttacagaagaatcctggactgttggcacagacactttctcgagtacaaataagcaccatggctgttaaggagggtttattggtagcaggtggctttcagggtgagcttatttgcaaggtatgagaattctgtagatacatatttatgaatgttgcatccttaaagctatttttcttttctaataatgtttggtatatgtgggacagaacttgaaccatcccggacgttgcttactgtacaaaattgacaacagatgagaaatgccatcaccaacacagtggacatttaccgtaatcctaggtaagttaactgctccactaatctgacagtgagcatttggctttcatccatgacccataaatgtacctcctctttgcagtggctcaaggagggttatagctgcaaacaatgatgctcaagttagagtatttgatgccgagaattttacttgccttaatcgcttttccttcgattggtgtgtgaatgtgagtgctaactatcatctgaaacactcttttagtagcttggctttggttcttctccatagtttctcatgagatttgtttctttacagaacacttgtgtaagccctgatgggaagttgcttgctgtccttggtgacagtgctgactgcttgattgctgatgctcaaacggggaaggtaggtcttcgctattgcatactttatccttgattttgtttggtctccattcctctctgttcctgattctaatttcctgcctctcagatcactgggagcctcaaagggcacttggactactcttttgcctctgcttggcatccagatggacgtattttggctactgggaaccaagacaccacctgcagattgtgggacataaggaacctgtcagaatccttagccgtcctgaagggaagaatgggggcaataagagctgttaggttcactaacgatggccggtttctggccatggctgaacctgcagactttgttcacatcatcgatacacagtcagggtactctaaagggcaagagatagacatatttggcgagattgctggaatatcctttagccccgatgctgaggcactctttgttggtgtagcggatcgtacttatggtagtttattagagttcaacaggaggcattttaaccaatatccacaaacgatgttttaagatagaactcgtttaagatggaaaaagtgtataactgtacattcattcgttcagggtctgtataaaaaatatgacttaagtttgcttgttatgcatttgtttcaactttgtggagggacttaactatatttatgactcaagtcccttcttaatatccacacctgctcagattttagctaagttggtcttggagctgaattttattttctgaagcaaaattgaaattttgtctttgtaaagctcgaaaaagttgatagataggtcatatgtgctacttttactcgttttcatatcattgtttgcttatgatgcgtgtaaagtgtaactagttgggcacacaaaaaactctatttgtaatttttccttttacatttgccctcttttgaatttacgctactctagtctcatccataccaacagttacatatgtctcgatcactaaatcttatataataatgcattaactgatagttgtaactcatatgatttaatattaccaatggttttttcaaaccttagttaaaaggaaataaagagccaactgtggtcgagaccttaaataatctatttgaaaaaaaaaacaatatcttctggttaattcgtgtaaacatataaatgattatttgactttgtgggaaggtgtagtatgttccattctgttcactgtggactttgtatgtttaaattgcaatgaaaacgacccataagtgttttatgggcagtagcgtgccgcccgttctttaaagtattattggtcatagaggtattattaattttgaaaacagagagcatcaaacccaagataagatcttctataaaatcaagacaagaatagttccacttaccttatctaactgtcaatactgtcaaaacaaattatctcaaatttattacgaagtttagtagttgggtttgaatgttagagacacgtagaaaggacatttttatggtggcatagatggagggctgtttatctcaggcaattgtttgcacctttcagtggatattggtacaagtcttatctgtctcactagaagattatataatctctgtcagttttcgaaggctaaacatatttaatatttagggataattccctcgatatcatgtcactattaagttgagaatgacttctttcggaaccatattcaggataattgtataatttttatgaaaacaatgcttcttaacaagagtggtttttcattaagtttatgaagatgtatgacttaagagaagacaccatgtcctgtgcttctaatatacatcaaaacataataacaattgagtcagcaccaaagattcagagttcatagttatatttataattatatagttacaatattatttctgtaaatttttaaaaaaattctaaatagtatacagtaccgaaaatatagttcctgattgctacgcgtgttcaaaaaatttcaaacctattttcgacattgtcaactattcaaaaaatttcaaaattttacatgattgatgttgtaactataacgaacacagtcatacaaatttcttcaaaaaaatttattacgacatgtagttttgagcacggaagttgattaaaaaattttaataggaagttaatagtaacactcctaaaaatatcaactcaaaagttttccatttaatgaacaaaaagaaatcaaagtagaaagaagaataaggatccattttaataatagcaagatcttgtagatcaattaaacaattttgttgggttgttttaataatttagacaataatatttaagctaatattatacatttggctaaagaagtaatctaattaaaatatgtgcctagtggtagccatttttgtcgattcaggttgagtaatcggtgttggctttcggttcaggccctcctttgggccctctttgcttgatctctcggattcatttttggagggttttctttcattcatcatcagatttggggattttccttcttgtggctgttgaattttatgccctaaataaaactccatttcaatgtaatctttatcttttaaatatcaataaagaaaaagaagtattttcattactttgtgtgtcatttgattcatgttatcatttatagttttatttgatttataaattcatccaaacccttatcacatttatgttcttgtttattg

SEQ ID NO: 300607 - DNA, 4091 bp, Cannabis indica
tttttttttttttgagaaatagtttgtttggatggtgggcacattttatgtttgtgttagattatatcaatatttatttggagaaaataagatgggtagctgaatcagagttatgtaacttacttcatctttgttttttctcaaattagcttttttgtttcaactgttaagcctcaatttccttataatcgattattttgagctgagttattggcagcaggatagtttacacttcacataggatgtttagttacgtgggtggggtatggttcacttatcgatgtggttgtgtttgttgttctttgtacatttaattccttttctcttgttatttttgtttctttcgcattgttttgttcaaaacttctaatgaatttgcaataagtgtgggcaattaattatctttcattatgctatcatattcccctgtgtgatatcatttgtttgttcttacttccgttgttaatgatgtcctgcttttgccaggtaatttagtgaactggtatattgaattctaaggagggttattgaggacatctttgtatttttgagccaatggcttctgtaagtgtagctcctgcatctgggggagtaagagaatctagcggtaatgtagctggtgttgataagttgcctgaagaaatgaatgacatgaaacttagagatgataaggtaaatgttaaatctttgaatcccctttaatccttaatatagaaatctttcattgttgatttctcacacctgtatctttttgttttgcgtacaggaaatggaagcaaccattgttgatggcaatgggacagagacaggtcatataattgttactactattggtggaaagaatggccagccaaagcaggtaatttgtctaacacatcttttctacccttgcaacattattgttcctaaagctcttgattgtaagtgtactgacataacctggctatcaattattgtagactataagctatatggcagagcgtgttgttggtcatggatcttttggagtagttttccaggtgcgtagctaatctaccgggtagttttatttcatggttttgtttaacattctaatgtgatgttttattgtggtttttcaggcaaggtgcttagaaactggggagacagttgccatcaaaaaagttctccaagacaagaggtacaagaatcgggagctgcaaaccatgcgacttcttgaccaccccaatgttgtgtccttgaagcattgtttcttctcaaccactgagaaagatgagctctatcttaatcttgtacttgagtatgtccctgagacagtccatcgcgtgatcaaacactacaacaagatgacccaaaggatgcccttgatatatgttaaactctattcttatcaggtatatatgagatatgcttccgttgcttgtttgaatatctaatattgttattgagacacaataggtgttttactgtcttgacattttacattgtcccactgcagatatgtagagctcttcattacattcacaacagcattggagtttgtcacagggacataaagcctcaaaatcttttggtatgtattataatatgctgttagcttcatcttgtttgttatatttgtgtgtgtgtgcgactgtgcatgtattggtttctaaatcttttctagtggtgtttgtttaaccttcatcaattcttaaaaaatgattttacacgtgtcctctatatagctggtacaggggacagagttggcacaactggtttttaatcatcatttatctcttccttacaggtcaatccacatactcaccaacttaaactctgtgactttggaagtgctaaagtcttggtttgtttccactccacattacttgttttagtgtattttggacaaataataatctatgttactgaatcatatatgtaaaattgcaggtgaaaggggaaccaaatatttcatacatctgttctagatactatcgtgcaccagagcttatatttggggcaacggagtacagcacagctattgatatctggtctgctggatgtgtgctagctgaacttatgcttggacaggtaggtgctggggtttcttatggttgttttgattatgattttatcttgattagaaagatcctaactgtgactttttgactttacagcctctattccctggggaaagtggagttgaccagcttgttgagataattaaggtgaataacaagcccaaatggcttattatctttaatttgacgtattactttatttctttgtacttctatttcttacctattctattctattttatttcttgcgcaggttttaggtaccccaacaagggaggaaatcaagtgcatgaatcctaactacacagagttcaagtttccccaaattaaagcccacccatggcacaaggtataagaaagattatgtaaagctgttgtcccaaaaaaaagtactaaccaacatacgttgtctcttttgcttaatattttaaacttattaatctttgactatccagatattccataagcgcatgcctcctgaagctgtggatcttgtttcaaggctactacagtattctccaaaccttcgaagcactgctgtgagtatcttgattctgttcgatacttacatgtgtttcatctctactttgtgttgatggtgttttacacctttgtccttatgcagttggaggctttagttcatccattttttgacgagcttcgtgatcccaacacccgcttgccgaatggacgtttccttcctccactattcaactttaagacacatggtaaggactaacaggcttcatttatttatttttcacttttaatctcatatgtggtggatgtgaactaatgattgtcaatggttttgctactaaccagaactgaagggtgttccggcagagatgttggtaaggctgattccagaccatgctaaaaagtagtgtggctttcttggatcgccatcataataatagggtgtcgttgtagttggtatccgctctgctctgctcctcgcagtagcgttcttgtagagaaaagtagttcgagtgttcttatctaatttcatcaaatcaaaaaaagtaaatctagctctggggtatctctgttttcttttatctgttcatttgttggtacacacatctctattatattacattcatacttctatttatataatatggtagaaggcagattaagaaagggtctctgctccctgcttcgaaaacagtcacttgggttcgtcacatttgttttgtgtcgttctttttacggtagattgtatcatatcaaagtaatggaattataattttacaagtttctccatttcaaacggcaatatgttttttgtgataatggtagtaacaagacgtgctaccttcccatcggaaaagaagggacaagtattagacataactgtccaggaattagtctatgagcacaaatataagcaactctagaaagccaagacacggcaaactcaggaaaatgatccaacaagcgaaaaatataaagaagctgtacaagtcaagtttggaatccttttagagtatgctccagattggagtaccttcatgaaaatccatgtttctggtcgtccaaagagaaagtatagtcgtgctgcaaaattgggtaaatttaagagcatgtatgacattattttttattttttattttcaaaaaagtattttcagaaatgataataaaaaccagtttttgaagttttcaaattagaagtcgtgtgtgcttggttaatgttattctaaaaataattttttatttttacattattttcttttttgaaaaatacttcaatatgagattctaatatgaacaagagcagacctgaccctagtcttggccttggactcggatcccgactctagacctggcctcggtgttggtcccagcctcgtaccccaactttggacctagccccgttcctggtcttagacctcggcttggaccccggcctcagatccgggacctcgacccagtcccggaccctgaactcggactcggtcacagacttggctagacttggacctgaacttgggcccgacctcagactcggactcgacccgaaaatgaggagagagaaagtga

SEQ ID NO: 300608 - DNA, 4445 bp, Cannabis indica
tgaattatcttggaattacacttgtcatctaaggaaacacggataacacactaataaacctcctaaaagggtcgtttaatacaccccttatttgttttaaatccagaaaagttttttattctattttatttatgatcgtgtatgttgtaattatttagaagcaagcgtgtctcaagccaacttgggtcaaaaagtttaattgggcttctttttttttgttaatgaaaaaaaatattattatttttttttgtattataatggtaaaaattttaagatatagtattttaaaaatataattcaacattttttttcaataaaacatcaaatgtagtatcttagaaataaataggtattttaaaaaagtaaattaagtatttttgttaaatattttttggcttgaataggagactttggcctggctcattgctgccgcacccttgagttgccgttatttagaagcatctaaaaaacttttagtaaatatcaaatagtgttgaaaataaaatttttatattttattaaacttgtggtaagtaacaaataatcctaaaaaagcaataatgcaccaaaatagatggcggaggtactgaaagagctttttagagaggtactgtaccatatatttttgctaaaattaatgcctgttttttcagtgatgaaaggttgtatgaggaataatgagagatcaaaattcaaaactgaattgtagggtttcatatcaatcctttcacgtggcgaacttcaacctcatgttggatatatttctttgtattacatcatggggtagagagtgtaaaaatataatacagtgggtaattaaggtaagcttatatggcggacgagagagtattgcggtaaaacagaaattaaacagtaagatatagtttagtggcaaattactttgaaacccaatgctatattatatgtttaacactcttcataatattattcctcaaaaagtattccaatttcattaagctgtatggctcgtgagaaaataaagttatggatgaattatttgacattattaaaatcagtgtgttgtactgacatgatcaatcattcgatttcacatttaatattgtcattaattctatattgggttgtgatggttgcagtactagtctgtgctctggttctggttaggcgccatgtgatcgccattaagtttggcccctaaaatgtaagaattcatacaagagtaatgatatgtgtacacatcattatcattactgttcttagaaataacaatgagcaatattatgaacgtatatacagtgataattaagaagatttgtatattgggttagtcatttacgaaacctcaactatatataaacataatagctagaagaagaaatgctgaaatattgtgattctaaatatttgtattttagtgtatacataattacatatgagctgtttaaaaatatgttactacggcgattttttttttattattgaattaaattgttttaattatttatttgattaagtctttttttctttttctttttttttttttaaaaaaaaatcattgaataagactttattagaataaatgataatgcaaataagtggttggaaaacggtttattttttttgggtttttttctttatttttacactttaaaaataggttttttttattttttttaactatttttacagaaatttaggtaaaaacttacatagcaaccaacataataaactatcactccaaactgtaaaatttaaaaaaaaaattaaaaaaataagtatatgaagtaattcttctttcttcgtagttttgtaagggtttaactaaaaataaatgagaaaagaaaaagtgctgaacaaactttttacctaaaataaaagccaattatatatcatatgttcaatattgttaatttgtgctgattttataacagggcaacaataatgggacctgtttgaaaatttatgtcttttttctatcaaaaaaactttgaaaataattcaattttttatataaaaaaatatgaattttattatgaaatgatttttgtttaattttataagtaaagtaaaataaatacattaagagaacctataattaacaaagctacctctagcttcgtacaaagatgagatttattggaagcaacgttctagggctaactaacttaaataccgataataagaacactaagtgctttcataaagtctctactaggatgaaaactaacttcatcaggtacattactcttgatgatggcatctatgttagtgatactattaactcttatagtaatctttttacatctcaatgagctgattgggatgctatttctgctattttgactgggatatcttgtagacttaatccctctcaggtttctttgcttgaagccccttttgaggaagctgaggtgaagggggctttaaatactccgagatagatgctttaaatgctcatttttatgaaaaaaaaattggtcagttttgggtcctgagttttgtaaggctatcttggttgtccttactaatgactctgaggtctctttaattaatgatactgttattggtcttgttcctaagaaaaaggatgcctctaaaaggcctattaatttgtgttctgctctttataaagtagttaccaaggttttatccaacaggattaagcttctcctgaacactctaattgctcaaaattaaagtggtttccttttggactatctgattctttataatatttttattactaatgaggttgttaatgctctctatcataggaagaaggggacaattggttggcctgccttgaagcttgacatggagaaggcctttggcatggtagagtgaagcttaattgaagctattctatatcatttaagtttcccttctcgttttgtttccattattattaagtgtatttccttgattttctttaaatttctcattaacgagtgttttttttacagttctatttctactaggagtattaggcaaggtgaccccttgtccccttagctacttctttttactggtggctcggggtcttttagcagccattcgtgtccgagagcaagctaaggattttgctggtatttctatttgtagaactacccctgatatctcactcctgctttttattgatgataaccttctatttactactgttagtaacaagtcttgtttggttatcaaggaaatttttgatgtttataagcgtgctactagtcaggtagttaattttgccaagtcctctgttctatcttccccaacactagttctagggatagagagtttttctgtggctagttgggtctttgcaacgatggcttgttagaaagtgcttaggagttccccaatgtatttgtagaattagcaaatctatctttcattacacgattcaaaatgtttcttctaaaatgaatgcttggaatggaaagttgatgtggtctggatacgcggctcttccatggtttttttttctaaggtttgtaaaaaaactctgattaaggttgtggtctaggttgttccttcgtataacatgttctatttcaaattacatgtgtccacttctaagagtcttgagagccttatggctagtttctggtgggggcagcgagcaagaaaggaaaaattcattagaaggggtgatcaaaggtttgtgattcaaagttctttgtgagcctgggtgttagatctattcaccatcataatcaggccatggttgcaaagcaggcttggagagtcatgtccaatccctcttctctcttgtcttcacttttaaaggctaaatacttttaatgaaatgacttcctcactacttcaaaaggccattactcctcggctacttagaggagtctccttttggggaagagatctgcttctcaagggcctttgttggaaagtgggcaatgtaaatatatttttgctgtgaactcaaattggattcctcatttgaactcctacagttttttgaatggtcctccctctcctacccttactatgcctgtctttattgatgaggctagatattgggatatcactaaacttaatcttttctttcctctagatgttgtggatgctattcttcaagtcccaattgatctttcttctgctgatagtctcatttgggtgcatcattcctcaagtattttaactataaattctacttaccacttggctaagtcctcttcctattccccttctccctcttcttccaatctttcatgttttaaaagctagtgaaaaattgtttggacattaaagatcccccacccccaaaatcaagcatttcatttagaaaactttcaatcatgtcctgccttttactttgaacctctacaagatgaaagtcttagataaccctacttgctctctttactcttgtaaactggagtctatctctcatgccctcttagagtgttccatttctagatttgtatgtggaggaagtcttcttttaaacaatt

SEQ ID NO: 300609 - DNA, 2622 bp, Cannabis indica
ttttttactccctaaaagacaaaactaaaaccttacctcactataagaaacaaaaaattcccatccacacactatcttaattatctccttattatctttttttttttttgaaataaagtcccccccccctttttttttggaatttttcacatgtccactagtgtacaaatagcttaaaaaatacattaagacatcacttttactggtacttgataccctcctataaatgttatattgttattggtgtaattaagaatcgaatctcataaaatttaatatattaacttttagagaataatatcgctaatcaattataaggtacttctaaaagatattggagactattgatatcgaataacaatagtgagactagacaatgtcactaatccagcatttgaccatgatgaatgactgtataactaattcagctaatcttatatgtatgagattatttatcccatccagcagtgtaagataaataatccttacacactggattatttttttatctttcctttttaatttttatttttgtaaatatattatatatttaaaaataatttaaatgaaagaatgaaacatttatttataaatttattgtcaaatttatttattaaaattagtgaaaatatataattttgagttatcatatgatattgaattttaaaatgatataatttttatggctagttttatgttaagacttgttatcagagctcgatttttaggtttggttagggtcaatattcttcttcttttggaccatcaaagtggtggaattttctttgaaagttttttcttccccttaagattaaaaatttcgtctagaaagtaaatcttaattttgttccatcctatgctaacttgaatggacatagtataaaggcttataaggtatgtcctattttccttcaaaataataaaggttaattaggatttttatcccctgaattttgacatgtactaaatcatgccccctgaacttttaaggtcattaaaaatgtcccttgaactattgcgtttgttagatttaaggattttttttcaattttaataaaaaggtctaacatggacgaaagttcaggaggcataatttagtacatgtcaaagttcgaggggtataatttggtagatatcaaagtctggggagcatagtttagtacataaacaatcactgaaatagtaaaattgaatgaaattagacaaaagtccttaaatccaacaatctcaatagttcagggggtatttttaacggctagaaaagttcaggggacatgatttggtacatgtcaaagttcggggggtaaaaatcctagcattacctgtcttgtttgtggttatgtccttctctaaatctattcgattcggttggggtttgaagggttggatagtttgaagatgacttctagtttctatgaacttttggttggggtatatggatattttatccaggtaaaagttgaagaattttttatcctttggggtgagaatatggcatcgtcgcaatacatttgtgcatgataataaggttctttttgatgatatagtcagtagatgggctcttagctatttgtggcagtgccaagaagctcaaactcgattgctccgccagctctagtggctatttgctgatttctcctagtcatattggggttctggttcctgaaatgattttgggggcgtacaatttttttttatgttggtacataaaaggtggcagattggtttaagggcgatggtatctcgacaagatggtgatatttatgtttagctactttccctgtctcaggtttgcttgaacctcatgtggcggaggcttctttctttcttcataggcttctcctttgtgtgtggttggatatttactcgtatcaatatattctctaactgtctgcgtctagtgatgtctctttcaaataagaggaatgattgcaatgagtatgatattgctcttactgatattcttcatgtttggaagtctttttcccatgtctcaatttctcattgtaactgcgctagtaatgctcttgcccattttttagctaaatttgctcttttattaaaaacttcttgaatttggtggtctggtcttctgtccaggatatcatcgatggattatgcttatattaatcttataaaagcctttttaatggatttatttatttttctcaaaaaagtactttgattctaataaaaataatataatagtatatagtgtagtctctttaaattattaacaatatttatattaaaattttaataaaataatatttatattaaatttggtgggattatgaggtagctgctcaaagaagttggtattggcgtcaaatagtaaatgtgaagaacaaaatgaaactttatatgtctaaataccaactaatgcaatgcaaatactctatcagacttggttatgatgtgttgagtacaagagaggagaatgtgagctggtatggtcaagtttgggggcgttttaatatccgcaaacatcgaattatcttttggctggcgattttggaacgtttgcaaacaaaagataaactattttgtttcaaagtctgtacggatcaggtatgtcaaatttgtggatgttatactgaatcaattgaacatatatttttt

SEQ ID NO: 300610 - DNA, 3036 bp, Cannabis indica
attttcttatataactgacatttgcaaaaacacgatttttcaacttgttgtgactaaaactaaattagtgacaacttgtccgtggctaaatgtatttttagtagtaatattttgttgtgactaaaagttatattttactaaaagtaacaattttttgtagtgagtgaaacaataattaagtgaatttagctgtgagaaacaagctaattttataatttatatctacccttcttgtatattattattcatgtgcttgtcatttaactaactatgtttttgtctcttccactaccgttgccggtccagtgatgtaatttagtagattgtcgatttggaaatatcgcaagaaacgaattgtctcgtacaagttgctgctctttgagcatttatattattgtcgttttcttatattctaggtcctttcttaaagtagttcattctctaaacttgttgagtatcggcttatcctttttccattggcctagaaatggaaaaaaaaaccattcccttctttatgtaaatcctctttgcttaaagtaaatatataaaggcctccaattacttaggaagatccgcgcctactagttcattagtaacatgaactagtaggaactttaatttaaaagaataggttttatgacttaatctatgaatctcagtaagcttcacaagctcaggagtcaggacgtactcatcagtttcataatcaaaattggaactttaatttaaaaaatctataagaaactaataatgcagtcgttcaattaagtaagcaagccaaagtaatttgcttttaaattttattataatacgcataaccagaagaaagaaaagcaaaaaaaatgaatgaatttccctaatctatcctacatattgcgtgtacaaatattctactactcaatatcctcaaaccaaagtggagcaagaagaggttgaaggatcatacaaagccggaaccaagtactttcttccattggagccatgcgcattgtagctagctccagtagtggggtcaactagcaagtccccagcataaccagggtaggctcctttggcgtacacaccagggcaagccgatgcagcctcaagtggcgcctccgccgagccctggaagtagccgttaccgaaggggttggtcactgttccagccaaaagactagccaagttgatgatcatcccgtccacccccacatcgttgtttggggcaaccaaggccggagcttggggaccgtaaataggctggtggaatggccaggcgcattgacctgggcactgggtctccgagtttcctacccatatgtaagcgaacttggagttctttctcttgagatgaccactctttggacctataacagaggacgagccatgagtcccacatttactcatacagaacccttcaacggagacatcagaagatgtcaacaccacgttaatggcgttgctgtggtcacccttggacgccaactcaactatctgtttggtggtgagagactttcctaaagagtaactctcgtcgatgatttgttttcccaaaggcaaggaaagggaggaagaacggtgtcgtttctgggaggtgagatggtagtacttctcagtgagtttccaccacgtggcaacagatggttggctctcgtgagaaacaggggaagaggaagaagttgatgacatagagatagaggttatgaaatcagagacaatggttctttgggaaggcttgaattttccataccaaattagattaatagagattttccctgaaagaagagccccattatggtatttcaacagctgaggttggtcttgaactaattcactcagtttcctagtacccaaagagatttggcacaatgagataagaaaaactagctttagcaagatttgtgtagaaagaaaggaagccatttttcttttttcctaatggaaagaaagtagagtgagatactaagtgagtgttttggattggaatgaataatgaggatgtaagagatggtatttatacaaagaaaaaagtaataaggagggaaaagagtatgaaggaagctggcgtgaaaggagagtgtggttttgccatttacgagttttcgtctttgccagcaagaaaagccatccaatccaacggtactcttcagtcactcacaccaattcccaagcgcgtctctttatttcacaaaaccccatattgtgatccaccttattctaacgcgtttgttgaccacgcgcaagccaaaatttaaattgatgagtggagcgtgagaaccatgctcagactggagctgtgtgtgtcttccccccttttttttttaacctctgcgtccactaagaaacaaaaaaagcaatacagcttaactacagatagcaggagatgaattgactaaaataccctcaatgaagattaacggtgcaagggtatttcaggtaaacgaagggagaacaggctgtaaggtaataaaagtgtgtttattttatagggaagcgcggactcaatgacccaactggcacttctcttatctcacaccgtgggtatccgatgttacttaccacgtgacataattaacctcactcaatacttaaaattttatttatttgttttctcattttagaaatatttttttatgctaatgtttttaattagtcaatagtgacgcaagtaatgaaccattaactaaataaatatatatcagaaatgctaaaaagtgttgtgatgtatattgagttctatataatttaatataataaattttggataatattactaactaattacaaagtaatatatctaaaggtgttagattctaatcatactcaataacaatattcaatatacattttaataaaaaagtttatttaaaattatatatgtaaggaaaaacaaaattatcatctattttagattttaagcaatttccaatctgttatcaaaatttgagcttgaaattcatataatttatcgtccataattaaattagagcatgataaatgagaaattgaaagaattttttgttaaaaaaaaagagagagagagagaaattgaaagaa

SEQ ID NO: 300611 - DNA, 1843 bp, Cannabis indica
ttttttcaaaaaaattaaaattaataaatgtaccgacaccttcatttgcacatgaaattattatataaatatttataatagtacactcgcatttgaaagagagatcacaaaacgaaggtaaatagaattgggtgagttttatttgtactcaaatcaaattataagtagtccttctcgaaattccaccaaccatatggatttttgacaaaagcccattcattctcaaaattaaccctggcaatgttcttgatcatgaattcatgtaaaaaatccccttttgggatcaaatacacagcatatcattctcctgtaggtctatctccttagctaaaatagttggctaaattgttgagacccttctcaaaatctaccaaccctcccttttgaaaacatgtggctcctttctaagagtttgaatcatgtttgatatcaataagcccctcccaaaaggtgtgctctatcctcttccctagaatggcctcagccacttggttggagttgaaatacgaagacttccttgtccattgttacttctgcgaacgcattggccacacttacactaaatgtactgactatataagaatttctgatgagtccctactcctaccaccacttccttacgagaatgttctgaaaggaatcgctcgtcctaatcacggctcttttggccccctccctctccctaatcaatagcgcatcccagtatcatgacactcccaccccatcttatgccaatgccaaaccgaaaccttgttaacctcatcaacactcctaaccctcgtgggctgattaaccaacatgattcctcattttagtcaaatggacgagagtacactgatacatatagccaattcttatcccatagagcactcccaactatgatgtagggtctaaatccttccttattgatgctttaccaactccctcactgaatcaacaactctaagtaccccctagtccatccttcactgctctcatgtcggtagcctgagtaggttcaataacatgttctgcttctcctagacaaccttcaacccctggctcgagaagctctacctcctcaaccactagccatatgaatgccccactgctagtctccccccaatccaataataggtccctcgctgctcttacttaaataggagtctccagcccccttacctttgtagtgggtagttttgagaccccaatcagaaggaccatgatgaaaaggaacccttctgctaactcggtgggtttcaagagatagttggcaaccattggtaagaaacaaagagaagccctgaagagattcgggcctcaaccatgtcaggacctctagtgaagaggcaggtcctgtggattaacaagcctgccagaacacatgaatctcatcagctagaatgctcaaggtcttgggagtgatcgagcattcctaaatctctcccttctagtcaaaatgtataagttgtctcttctttttgttgtggaatctagactatgtaaggatagacttaggatttggttgggttttgatgtccccagaatcagcttaggagggggacttttgcttttctagactttgaatttgaatttattaattactaattgctctattaatcatgttcattgcaatgtctcaggtgtcaattttcctaattttaattttattgctttttatggggccccgagcccaacaaatcgtgcatgttgttaccttggcttattatgggggattttaaaagattcataacttgggaagatgaaacaaatgaaacccataggaatggcccttttgacctttttagagagttcataaacaaattccaattatatgttattgatgttgggaatattttaccag

SEQ ID NO: 300612 - DNA, 2971 bp, Cannabis indica
tggaaatcaaaaaaacaacaaaccgtctctcgatcttctgccaaagccgaatatcgagccatggcaaatgcaacttctgaactcacttggatccttactcttctctaagactttggcatccaccactctactccagctatgctctattgtgacaataccgcatcaattcacattagtgaaaacccggcctatcatgaacgcactaagcacgtggagattgactgccacttcattcgagagaaggtccaacaaggctccatcaaaatacttcatgtttcttctcaaaacaacctcgctgacatttttaccaaacctctattgcctactcatttttcaaacattgtatccaagatgggcttaataaacatatacactccatcttgaggggtgcttttagaggcactttggataagttagttaggttagtttaatttttagatagtttgttattcctacagtctttttcggttgtaagttagttgttcccaactaacactttcttgaaatctcagagctatataagctcagttctcacttgtaaatctcagttgagaacaattaataaaattgctctgattttcctctgttcttctctcctttctcatatactatgaaaacgattgaaacttacctatttttgttttctttaatttgttggaactgttcttattaattaattatatcattcgtaaatatactgtgttttctctttctttgaaagattcaagccatcttatctttggaaatctttttatttattaattattcaccaactctaatcttgtaaaaaattgaaaagttaaatttaataaaccaaattataacatagtggtcttaattaattttaaaaatagcaggtgtcatagaaaaatgcacatcttggtgtaaccatagtagaggtacaattagagtactactttgttagtattttgacttcttattataagctctaaaatgggtccaaaatggaattgtaaatacaagttgggatgttaatttttaagtgtgaatatttgacttgtaagatcgaaattaagctcccaatttataatagtaattgctagctacttggatatactgaaattgtttgattttttatttttatttttatgatatattgaaaccgtttgtatcatatgtatgactgtagtagtacagaatatgtcaataaaattaatttttaaagttctttcagcagtcgtgacatcgagctctatagctgccattggatagacttgattgttgttaaaagaaagcactagcagagtagaagctctgatcttacattcatccaatctcatatttattaatgcttcatggagagaaatgtattcattgctctcaccatccaccaagatcctgcatgcagtcttaaatgacaatagcatcatcatgtggcaatttcacatctctgaggtcttccttagtgaaagtgattggaaccacatggaaatatttcctttcatgaagaatataattaactttgtgctgctaagaccgtagtcttttcaccctttcaatggttcttttcttctgttgagtcatattttcccgagagtgttgcctctatgcttcctaagatcatggagatttatttcacaactagttcctttcccttggatgagctcgactcttcccaggtttgttgtcttcattgtcccccaatttttttcagtgtatctttcttcatttcttccacttttgttccattttacatactactagaagtgtaatatctcagaaaatataataatacttatttaggcatattttattaaatttgtgattatgctgatattggagtaagattataatcttacttaagctaatggtgtgacaattagtgtaaatgtaataaataattaaataaagcgtaatttattaattatggagaatttattggattacgtgggtattgtaaataccatttttgaaataaaatgtttttgggcccagcggccgtggaaactcgacggagtggtcagatatgatacgacactaaaagatgaattgaattgggattatactggactagtttagaattttaagttatcgtttggcggattagttagaaaatgaccaaaataccttaggggtgcgtcaaagcttaagttttaaggggatgggtaaaatagtcattttaccctaacttggctttttggatatcttgtaaagtgttgggtgattatttaagttaagatatatattaccttaaatattttcttttctagaaattaaagaaaaaaaaagaagataaacctaaactaagaaaatcttaaactaagtcacatagtgctctttatctttctccctctcgttgccatagaaaccagcaagaactagggatttcttgctacttcagctgttttctagcaaggtttgatcaaggattagagttgtccacacttgaggtaagctttgtctcttttctccttgatttttctaaggtttagtttgcgtttggatagggtaatttagggatttcggggctgtgtagttagtctagggttagagtttgttctaggtttaattaaaggtttgtttagagtttaattggttgtatggtggggctgttaggtttagaactgggaaaaatttagtttagaagctcaatttttactctctaatggtaaatcgattaatttgataaattgttgtgatttggtgcgctggatacattgtatatttggtattggactattctgaaaggtttaagtaggtttggagcagctcataattggtttcagggtgtaaaagcagaattctccaaaactgcccagaaaatcggtcgagcagttttgcatgtaactggcaaatcggtcaaccggtttgctagcagggggaactctagggttttctccttgaatctggttttggctaggggtgttttctggagattaatttagtgcatttttttttggtgatgtttgggttagttcatgttggattattattttaccaggatctagat

SEQ ID NO: 300613 - DNA, 2411 bp, Cannabis indica
tgtagataccctaagtgatatttctaatttattgaggggctaaattaaaaatacttaaaattaataacctggatatgaggttataaattggtagtggtccccaagaaagaagaaccaatttctattctcatcttccccatcaagagagaaaattagaaaaccctaatcttgttttcttggaagatcattatccaaaatcatcacaaagattatctctatggattaagatcgtaattatttttgaattaaggtacgcttccgctatttgagtttttctctttgaatcaataaaggtattctttggatctattgttattgcatattttatgagtgataaagatttctaacagttgggtgtattataggccatggtttaaaattgtcgactatactatagcgacagttttaaatcgtcggttatactatagcgacagttttaaaccttggcctttagtatcaactatagctgatagttttaaaccgtcgggaattcttttataacgattttttttactgtcacctattctacccagtactcgtgatgctcgtatgaatgacgattttatagacccttggaaattatttacccgacagtgtaaaaccactgtgaattctgggattttagtaatgggttgaagaggagcatgtccatgagatgcctgggatagtttcttcggttgttgaagattttttctacttccatgtcgatgcttcagcaacaaattattttgttgggattgctgcagtttagaaagattgtagttcgtttttggactctctggtttctgtagattcttgcttggttttggggatactcgaaactgaactaagggtaatcttcctgactgtaaagcttgctaaggatagaagaatcactcagttgactgtggaaacggattcagagattgctgcaaaggcttttcgtgttggttctttgccttttaggtgtaacacctatcctttattttcttcatgtcttgtttatatgaataattttgagtttgcttatgtggtttccactccttgttctacaaacttgctagctgactctttgacaaagtgggttagggttgaggtagttaattctattggttgtttaaaggatgcgacctcctttgtggtcactaccagtgtttagtatgtgtttttttctctctcaatcaataggtttattgataaaataaataaataaagctttagagttcttagactagaacaagaagccataacactaacaagtgtaaaaagagttaggctccaaattcatggattagaacttatcaatggcttcctcttaaaaccacatttacaaagccctaaaatgaacaaattagaccaaacaacattcgtaaaatgtatcatacaaaaggcttttgaaacagagacaatgtcgaccgttttgtgtatgtaaatatacaataatcaactttagataaagacatcacaaaaataaccaccattttaagacatgagcatagatttcaaagcccatttggtgagccagtagcaaagcacattccttaatggcatatgtgaaagtgtaatggttatgagaagttgggtagtgaaccattatttggttgtacatggaccactgtattttcaggcatagtggaatttatcaatgaccctaataatgattttagggtttatgataacttggggatttggttaagtttcttagggctagagatacaactctagtgatggcatgaatgtttggttgttgattgacttgtttatagcaaccacaacaacaaaagaaaatgacataaatgtggatataaagtaggaccgaagggttggtcatggattgagttacatagcattgacaattatattgatagtaataaaatagtttttattattattgtgagaattattatcatttattttgtgaataaataatattttgaattattttttaatttggtcgtgaacatgtcactttatgagataataaaagatggcttttgagaagttacatcttttattggattataagagataattatctcatttgataagataaaaaagtgaactatgagagttacacttatgagaattgtcttctcatgcaagaacaaatggatcaaaagtggatccaaacttgtgaaatgagccataaattagaagagcaatttttgactcaaaaataatgtgaatcaatgtggattcaaaaaatagtgaaaagataacaaaatcggagaagtaattttgaatcttaaataatcaaagttgtgaacaaaattgatgacaattttgttaactttggtacaattttgggctaatctcaataaagagataacctttaaattatgggtaaaaataatcacattattttgttagtagcaatgtgagtttgatattttagttttattgagaaagtaaaaatgtcaaatggtattttt

SEQ ID NO: 300614 - DNA, 5761 bp, Cannabis indica
ctagctaaaatcatatagaaggtaatccaaaacgtaatttgagccataaagactcctaatcccgtcgaaaagcccatatgtagaatgttggaaataatgaatttctcgtgtatttttgtcatgtaggtaagagcttacatatatacaatttttccccctgaaactaggctcccttactatgaaaatactcagagggactctaacctcagaccttgtggccacatgcctgaccatttgaatatccttctcgggtcaatgtaattaaagagcatattggaaatacgtcgacaactaaataaatatacacaactaaatatacatctaagaaaaaattatataagagtaattttgtccaaacgagaaaattactatgcagtcatccatattattactgagatgaaactcaaatttgcattagcaattgcaattttcatgtgtaccgttgttttttttataatttattgtctttaaataagcaaccacttttttttgctgctaataattttccttatttcaatccaatggtatctcatcctaatcacaaaacgaagcctaaacgtaatacaacttagctctaagagaaatgacccccttgaactcatagcatagacaaataaattcaaaacagctcgaaacttcaaatataaatatttcacaagctccatctcaccccatctcacaaaattaaaccaaaaaatgtattgttctaatcaagaatatccaaccaaaatgtaaaatgtaacattttaacgcaaccaaagaaccaaaattgactaaaaataaaaaagatgagataaactgtgaaccagtagtagatcataattggaatagttttaacaagaaaaccaggagataaagctatagactttggtttgaaaaccctttttaggaatacccattcataattaacctaaggttgatagataaacagtgtatagcaaaggtttattgaagaacttaatttacaatgacacagccatatatataaatatatatatatatatatgtgtattatcaaattgaccgaaacgagatccaaacggaaaagaaaaaaaaaaggacttaaatttaagtttgtttgttattatgtcaagtaactagttgaatgcatatactaaaccaacaaaaccattagaaaaaaaagtaagctaaacagttcaatcaattgtaatttaattctgaagaaacacaagaaagtaactgacatatgctaaagacaaagtaatacaatgaatttgaaacttgttaatttaagcataaatccatcatcattatggtctccttaattctatctattaaagaccaaacaagttgtgatttttgaatataacttactataaggaataaaagaaaacccctagtctcctctgattaatcaatcataagccaggatctgagttcgtcatcgataagaaatgggaaatcagatcggaaagaaatggaacagaaataagacttaccggcgccactcgcggcgagcgaagccttcctcgtgcatctcttccggaggaggcagaacggggccatcctctggagcgaaaatgtcgtcatgatcgtcgccgttgccattggagacgggcatggcagattcgaagggcgatgagaagtcggggttggaggaaggcataccgaagccgtagccgtggtcggagacgtcgtcgtcttgcggaagtgggtcgttgtgggaaaagtcgtcgttaggtgggttaaacgacgagtcgtagctcatgtagctgtcgtcatcgaagggtccggctgtggtgggtgggtgttggtgggtctggtcttctccgtcgttgctgaacgagtcgaaagacgccattctcttagtactctctctctctgtgtctgtgtctagatcggattgaaaagactgaatctactctttctctgaagatgacgactaactttcgcaattggactattcataaatcataagtcttaaaacgctatagtattcgatttaagaaattttatttttactccatttatttatttatttattattattattattattttgaaaataaactgaatggatttcattagcaatgggccaataatatggcctttaacccattgggaacaatcttcacaatggaaagacgatcatgagaaaaacatgaatagcgaaccaaccagtgaattgcgttgttatcggaccgtttaacaaaagtaataacaacattagagtgagtttgaagcaaatgtttacactctgaaattattaaaccaaaaggagaaaataatgcttccaaattagacaaagcttgcacaagaactaagcagtctgattcaacataaacagtccctgtcttatagagagactaagatgtatcatcttcaatttttcctttgatctagccaagagcttccttgaggccaataacttctatcatttgaagatcgacacaaccaatcatgctctttgttgcagctttcaacaaacgagtgtcatgatctcgcaccagccatccaaaaccaaaacgattttcagcagtaaacaaggcagcatcgtaattaatctcgatagcaccatactgaggtttcgtcaaaaactcacttgcaccagcaaaagaactcgaggtcccctagtgtgaaacaccattttgttgagctgaaatccaactatcaagataagcaattgcacccgaaactaccctatccactatagcagttttaccattccaaacatggagatttctagctttccaaattgcccaaaataccattgaaacttgactaatgatttcggcagtatgagagttgcagaaactcataaaccaaccaggaaaatgaagccatccatcctggcaaaagttactcagaaccttagacaaacagagtttagtgaaagagcattcgataagcaatgaaaagtagtctctaggccatcgttacacacttgacatgtttctaagaggggcacatgcctttgttccaatttgatatatgtgggtagacagtgtgtaagaacacgccacaattttttattttttattttttactttttgtggtatcttcaagtgccagaatttcctccaaaagcttaagttgtcaccaccctcccatctaccctgcaattcttgaataaacttatagtaacttttaacagaatagcttccagatgactcattgtaccaataccatgaatctgggatcgtgtaagagatttgacacgtgggatgtgtctagggtagtaaatggccccggacatgatcccgcaaaatttgggatgttgtcctctctacgagcctgcaaagggcattcggcaagagggatgatcaccttggggataaaagctaccactactctgatgattatggaactagagcttgcgtcccatagaagattgatgtataatcaagagaccaaccacattctcctagaagaatcacttgatgaaattgaagaaaagagagacttagcaaatttaaagctacatgctgatcaacaaaaagtagctcagtacttcaataagcaagtaaaggaaagaaaattctttgtggaagatatggttctcaaaatagtgttccttaacactaaagatagtgcagtcagtgtgctcggacctaattaggaagagacataccaagtaaccgaagttacaaaagctggagcatacaagcttggtcagtatgatgaaaatatgaggttagttatggtattacggtattggaatggcaaacatctaagaaaatactaccagtgaatgcaaaaggttcggggaccacaaaattgtttgctgctcaaacattactcttaagtgatggccttctgagtggaccttgctcaatggtttagagaaatggttgatgctaaggtctgatgaccacctctaaagcacaattcatcttaacaatcatttctcttcagtaatgtctttcgggtggaatatactgtttagaagtattttctattttaattagctaaagatcataatagatcatgtaatagctttttataattcaataaatgtacattacttcagcaacaacgcataccaaacaataaatgaataaagattattatcgttcaaattgtgtcaattttatatttttatttgcaaattatagcaagtcataaaactaccaattatgtgtgcaaaaaggtctgcctagacttaagagctgaacagataaataagaaacttgttaaatcacaagtaacaaagagttaaaagtttacttggtcacttaggggcacctacacacacacaagcattggtagaaagcacgaaaaatatatggcaaaattcaagaacaaaattgaaaagccaaatatatttattaagacaaaaaagcagaataaatctagccttaaaagtcgtccaaccagctgtttgtcttaagcagaatataaataaaaataaaccaattttagaagctcctttgtttgctacattgtcttaaataaaaggcccgggggccaaacagatacaagaaaggggtttttgagttcactccatgggagtcccaagctcttcatgctgagggaccaaattttctaaattttggatggcagaagaaggatcggaactcatgttttccttatcagcagtttggatggatttttttgcctcatcctcacccttcctcatctcgcaaaacctgagcatgtcttcacgaatgtcaccattaagataaccaaagttagcctcgaggttagctttccaaaattcatgaaactccttcacagcgattatttcatgacactcaacatctttagtgtgagcttcctgctcagcagccaatgcctcctcaagggcagttttctccttcagaaagattcctctttttgcttaagggcctcgatcaacttgaaacttggcctcttggctttgaagaagagttcggagtccctccctctcatcaaggagttcctgcactctcttggattcttactccacatctgcttcaagcttggcagtggacaacgtatgttctctttgttgctttatgaaattaatggacttgtttgcagcatcgagttacttgttaacctcgccaagttgtttgcccttctgcttgacatcacttttggcctcttccaaggccttccttaaatcattggtggtcatactatttttaagatttgttgacttagctcgggaataggcatacgccaacttcatattcgactacaaaaagaaataataaaataagtcaaattgtttcgatgacataacccgagcaaaaaactttaaaaataaagacaccttggtgatttctttcaagactccaccgaccaaaagctccactgtcatatcctcaacaccagagaactactcgtttacctcagaaattaaacagtcttgctaaaaattgagcatttccttagccttttttgtctcgggctgcatgataattgaagtgctagttggcttagacggttaggccactcaacattggtgacatcagtcccaaccgaacccttagaagatttggaactctttggtgggacggcaggtgggcaaaccttaacagaccttttggatggaggacgaggttctgagatatctataacgactattccttttgtcccagaagtttgcattaccaaagcttcttcagtattaagataggtattcttagagctcggaagaatgctaaacagaggaatatctcctaaccttgactgcttaacaggttaaatttggccagaactatcaataacctttctcttcagcatgtctttcaacctatttgacatagctgcatagaagaaaatacttagtaaatatttaaacaagtgaaaagag

SEQ ID NO: 300615 - DNA, 2504 bp, Cannabis indica
tttaatcttttcaaattcacacttatttttatttatagtaataataaaagtaattgtagtaggatgactatgtatttatagggagcatggatcagcttcccacgtacatcttgtttgagaatgcaactgcagttgctcgttttccagattttgttttggagcacaaaggttatcatcctaccataacaaaggtatgagtacaaactacgtattaaatactagcacttgtttttgcctttgttaatattaatttttgtttatgctgcagagatttctttccagatattttgaacttgatcggcgcctacttgaatatgtaaatggtaaatagataactggccttgaagctcattgtgtaagtcgagattcttttcctttagtttaattctttgtacttcagagttgtattcagttttgttagatgactagtttgttgttgtttaatttttttttatatttaaatatgaaagaaaactgtggctggaacatccagttatttaagttgatctagatattataaatggctggttttgaacgctactaaatatttcattaaggacccgtaaacattttattaaggactcgtttagaaggattctaaacgtgtaagggtcgtttattaaataagaaagaacactatgtttggataaaattttctattgtattaattattacaactataaattttatacagtgtgaattttattatttaatacttaacaaatgatcagtattagtttgtattataatatatataaagggtacggggttggggacctgccccaaacacggacttcgaattcaaacctgactctaaatcctagaccttgactcggcctcgggtccaatattggaacgcggcctcaaacttggggtcctagtccaaggtcggggttgaggtcgagtttatagtgaaaatagtataattattacataatcaattaataaaagtcaatacctaacgtaataatccaactcaatactataaatacaataaaatagtactaaacgagcccttagtcactgttcttaacttctcaaattctcataatattggcgtaaaagttatctataagaatgtattcatccaggtattacaatttttgtgtgtacgtattagaaccctttctaggtttttatcacggtttttaatcaatcgtcatcatgcagaaggtacagactttaaagatctcatctggtgatgtgatctttagaaccacattatgtttaaaaaccataaatgtcatagcaataacaccataatatttttaatattcatttttttggaattgttattattgaaattgcaaagatactataattcaatacaggaaattaactaacaatgattcaaatatttaaataatttattcttacaaaaaaaaaaatatttaaataattttatttatttataaattattttaattattattttattttacttagattaatattatattaattttattttgtatgaatagttaaattctataataatttttgttataatttttttgattaaatatatttttttaaaaaaaattatattaaattgcttttaaatttgtagttaatttaggtatcaggagagaaaatttcacttatcatacttaaatgttaaccccataacaaacaaatcccctcaaataatataataccaatatgcattaaaattttatatgttatactaattttacacttctaacagcaaacaccccaattaattctctctctatctctctctcatcaaccaaactccaaaacaccaccaccacgaagttgtcggagccatcagtaactttctcgtcgtcgaacattcgttgttccacgtggcccgttgcacatccattgtggttggtttacctacccacgtcagccattgcgcacatctactttcacactggtgacgtgacatcaatttttaacacgtggcaataaggataacatcacggagtagagtagatccgagtcatagtagtcggcctgggaggggaccctagccttacgcctaggttgactttgggagctccggaatggaagttcggactttaatatcttgtatctgactcgctatgttttagtattatgtaccatgaagacatgaaacaacctaatgcaagccccgtgagctgaaattacacgaacctacaacgcgaaagttaacttgggcatctagggtttcacccgccgcccaagttgacattcttaactagggtttcagttctcgggaccgtcttagtgtaaatagatcaaaacttgcattatgatatcaactagacatatcaactagcatactctccatttgttgcgaataaccattttcaaatccacaatcagctcgccatgtaggatttcgactcaactctagaaaggcactcgatcaaatgcaatatctgttctagggtccaataatgtttattttatctcttcctctttgatcaacattagagtttgaactcattctgtcattcatttaaaattctcattataaaaaataaaaatca

SEQ ID NO: 300616 - DNA, 549 bp, Cannabis indica
tttatttttttcgatgtaagaaaatgaattctcattaaatcaaataacactattacagctaaaattaagataagcttagaactaaaacactacgaattatttacaacattagcgataagcttatcctttaatgccatgtttaattaactcgctgttagtgacaagacaaaaattgtaaaaaaattaactctaggggctaattatcaataactgtacatatatatttttacatttttaatatatacaaaatagtatataattttttttcttaggaggattacataacaatgttcaagatacaaagatttttattaaccaaataaaattgaccataacaactataacaacaacaatgaaaacccaactttcgaatccaaactcttccttctaagtacacaatgggccaagctgtgaaactcacacaccagtttcacacacccgtgaaccatgcgcaacagcgcaatagaaaaaataaagggtaaatactattttagaccctgtgttttgcaaaaattaccgataggaccctatgttttgttaaatgacaaa

SEQ ID NO: 300617 - DNA, 1602 bp, Cannabis indica
ttgctataagtgcaatttaatatcacacctttacttattttatttaattaaaatataaaaaaatcgctaactaattatataacgtcatcccatagtaatactagacactttagtgtcgcataccaatactcatttgttttgatatgttgtcaagttattcaataaaaaatcaaaattattgattattcgaatttatgttcaatattttccttactctttgttaaataaaattcattaccctttaagcttaatgttcctaacacaatttttttttaaaaaaaaaataatttttgtgtggtacaaaaatatagataatacaatatatctggtcctccatacaagaatttgatggatggtgattgaattaatatataattttaaaaataataataatagtaataataaattgtaattaggtaataaggacatatagaatcacaagtagaatgtgacccatcctaacctccaatggtcccaagttcccaacccaacccctcttttctcccatgactcttcatcatctattctataccctataatcctttataccctatataatatgctttggagttcgcattatcattttcttttttaatgtgtgattatgctccttaattaaaatctaatctctttaattagcttgattaaggaggtttggatggatagtgatggtgatgtattgttttgcttgatggttatgttagcttttgtcaaagaaaaaagtgacttttttaataatggagggtcccaaaacccatccttaagcacaagcattagcgattaagcaaagattaagactaatgatgcaaagagataagagaaggaaaggaaagtcttagtagtgtgagtggtggtagggcaaaggggtaggatgcccttatcaactcaattcattttcccactttctttttatttatttatttgtttatttttaatattatttgcatttttcaaattttaaagttcccattgccattagtaatattttataattagttaacttatactagattagatatcaaagaaagttttgaccaaccatagagacatctccaagtccaatatctcgaaaataattctatacaacaaaaccatattggtttataaaaatgaaagactttttttaattaaattaaaaaaggaaaataatgaatgaaagtaatatagtttttatagccaagatggtcccaaaaaccgcgtttaataccaaattgttcatattcacaaagggaagagtctaaaatggacaaatgctattcatattttaggattaaggcattggaagtattctcatctccaaaacaagaacttgaaaaccttagtatagtaaataaataattaattactcactccattccacataacaaaaaataaaaatattaccaatatttattatcatcaaatatacataatcccgttgattaagatataaaggatatgacccccccacttttaattaattaaataattactaattcattaataataatggcttaaaaaccatactaagagaggttaagggtcaatggttgtatattataggatatctaaaagggaaccctttctcttttttttttcttctctctttctctctctcctcac

SEQ ID NO: 300618 - DNA, 2699 bp, Cannabis indica
gataatacatagcgaagcatcaacctcgcaatatgtagaaaggtgttggcgaggcgaattgactgttagaacacttagcgtataatatacattatactaactaagtataatagcttgaacaacatggataacgaatagcaagacatccatcttgctataggaaggcatactcctggtaaattccagctcgctgccaggattattattgctattgaaaacccccaagacatgattgtccagtctgcaaggccttatggtcaaagagtagttcttaaatttgctcagtacactagtgctcatgccattgctagaagacttattaataaactaagttattcatgtaccatgcgagatgccccggcgagatacactttgtaacgtgtcttaatccacgtcagcgttgaccctttaaaagtggcttaactcatagctgtgtgattttcaaataataattgcatttatttacatggaacataattaaggcccacaatttcagggaaatattattgtgagatttgaattttaatgtaattaattgccaacctatgttattataaatagggactgattatacagaaaaagggacggaaaatccttgagagaaaaaagaatacactgtttgtaaagaaccctagttctgtatcagaaaagtctgaataagattgactcgtggactatgcagacttaactgcaaaaccacataaaaaacttagtgttatttttgcttcttttattttcaataatttttgtgctaaacctatcacgaaattaggctcattatcgttaacaaaaatctgcgttaataattgtacaaataaataattaaaggaagtactttgatttctaattttaaaaaaaaaataaaacaaatttagtgtttatagttattgcaatgtgagtaattagttctctcatttttgtttcaggaaaaatagattgggttaggattgaaatggaaaatagagtaacttggaatgtaaaagcttatgttatggtcaagcctaaataacattttcatttacgcttacctaagcctaatgttataattcgttaaagttcttttaatttcaaaccatgagttactgacattagtggagaggttaaatgatgcaagtatattaaaaatcagtttgtggatctgtttggtttgagttgagcatatacaatggagtccaattattatgatcatttgtgaattatattgttaattttcctaattgaacattaagattaaagtttgaagaacttagactgaaattctggttaatgttgcaattgagatttcatgagtaatgacaaaatattgtagatatggtaatggtagcttaaattttccatgttgtgttatttttgtcagttgacttgatctttactcgaggatgagtaaatgttaagtttggaggaatttattaagtttatttttaggttgttttagagtatagtttttgggctatttttcatgttttattgtttgagtttacgcgtgtttttattttgtgttaatttcaggtttgagataaagagaggttcattttttagtgataatatgatatatcttgggtttcttggcgatggaaatgatcaaatttgcaaaaaggaacctcaaaattgaattttttggcatggtgcattccataggattaaaaattaagtttttaaagatttagcatcaaaggtcgcaaccttctatctaaggtcgcgactctctaatctttgtaggaggcagtttagagctgcgactttcgaagcaaggtcgcgatgcttggaagaactgaaaaattaagcctctgtaaaaatagccaagagtcgcgactctctaccaaaggtcgcaacgcctgactacttttggcaagtttcctgtttcaaccaaaaagaattgggtgctaagttttagggggtgttggactttggagagaaactataggcaaaggaggatgactggaagtggagaacaccattagaggctctattttgtgtcttattcaactatttttgctttttcatgtttgtaattgaatcgttgaatgttagaatggatatcatgagctaaactctcttttagagttgttttgtgattctcttgaacctcttttacgaattaatgcaatatttgatttcttcttcgtcttgtgtacaattccttgcaacttgttttacttctgtaattatttattgactacttataattgttatttatgaatttaatcaaaatttgaaaaaatgacatgtgatgttatgattgtttggatgcaaatttaatttagaacgagggtgtcaatattatttgtttgatttttttaagtttttgtgttcaattatttacttgaacaaccagcacatatttaactcagcactcccacatctttgtgcccaaggagaacgactccgaagaagagaatcacagtacgaaagagaagtcagaatagcgtggcccaacaatcataatggctcttgacacgcccatggccataaatggccggcaagccctgatcagacatagaatggctaaagaggaacatagcaaactctagcatagccaaggatatttttttttggaattttttctataataaactgaaaatggaaaaaatttacatttatgacctacatagagaaaataaacaaaaatagaaactaaaagttgttatttacaaaaatacctgcaaaaaaaaaacagagggaatcctccttcttcgtga

SEQ ID NO: 300619 - DNA, 1226 bp, Cannabis indica
gaatacggtctgtacccacgtcaatgaacatgtatgcttcaaatatggattcaaagttaagatcttattcattacacttctagatagagagccattaatttgcttctttttttttaatgtgtgagccatctgcttaatgacttgaaattgagcgtttttattatatataacaaaaatgaaactaattggggtataatgttttcagctgacgacttgcatatttgcatattgcacatttcataattaatttgaatcgttagttttgtacctctataaagaaacgcaagtagttaaccaaaaaaaaaaaagaaagaaatgaaagtgttaatttcaaatatcaaatatttaagcgagaaatgaaaagtgggactatgcaatttttcaattgtttcttaattatttggttgattacaaagatggcatttataaaaatacctttgtttcttctcatttaagttatgtcatattaattagtacaactacaatatatctacaatataacaagaatatgcatgcatacaactattagataagcctgatctcacattttttctagtagtgaagtgaatctgcaaagtatattaatggtcgtaaaggatacagtgatttttgatatatacgtaatagtgcaatgctctctctctctcttacatataatattttagaaaataacattgaggaaacagtcaactaatgtaggttactaacaaaataaatataaacgtagcactacgtacatatatatataataaataattataaaattaaaataaaatccctcacttacacacggtgtaagaaagtgttagatacattgtatcaagtgaccaaagtatatattttatatttcgagccgctttgtcgtgaacaatttatgttatatcaaattacgttgttttgtcatgtacttagattgaaaaaaaatatatatcccacctattaaaataaacctctattattataagacacacacactaaaaaatcgacattctactcactacctaggaattgtttactaaattcaatactaccttattagtagctgtggattaagaaaaattaaatgatgtaattaacaaatagctaagcaaggataaacaagttactataatcaagacatgaggttgaagtagttaggggtggagaagatctaatccagttcaattgaattgaactaattcaatccaatattttaattacaaaaaattaaatatttaattataatt

SEQ ID NO: 300620 - DNA, 3191 bp, Cannabis indica
ttagcccaaattccagtatttttgtaagttttcctaaatataagtatttatatcttaaattcaaaatataaagaatatgattgaacttagtcacacaaaattcactaaattattttagcttaactttagttatgaaatagattcactttggagataacttgtataagaaagctcatttaatactcttctctttttccttttctttcttccttgtattatatttcagctcttttttattcttttcaacaagatttttaattttggtactttcttatactgtgtcaccaacttcaaaaataaaaaaaaataaaaattcttgaaattgatcttcaagaccttctaaataatatgtaataatatgttagtttaagtaacgacttaaacaagtttctaccattaaaaattttctaatatccaattatatgttcattgaccatatatagttctttctttgacttagaccagcaactaatataaatttttatatcaacattgaacatagaactcaaaatacatatattttattagctacgttattttagtttttttttaagaagtacacatattttaagtaaagtgtccaaccattataaatcctcaattattaaaataaaatatgtgaaatagtttttcttctttaaaagtatttaactcaagcttgagtgatagtgatatgagaataaaataaatataattaaacaccaataaactttcccatgttgaacttaaactaatatatattcttaacaaattatatggtatcatattcatatctaaccatatcctatgattcatatcagcttttatatgtatacaggaattaatggctaatacaacagcaaagaaccgaagcttcttttactaataaaaacaaaaatagaaaatgttcatttcttttacactatgtttggttgggaagaaatatgagtgaaaggatagagagagatggaatcctttatttggtagaaagaaagggatggagacatttttccttttaagtcctaaaaattaaatccctcaacattttgaaaaaggatgaatagcagtataaatattgaaagttttaaatttgaaagcaacataaatttaatgtttatttttaacggcataaatatctattagttgtaaaactgtaattttttttcaattttatcagtacagattttgctttaaatttattaaaagaacatttagaagtaattgatgccatatatctttttgtctatactcaatgatcttgaatcagagcattttctgtgtcatgtttaagataataacagaatttgtacaaaccaaattagagactaattacaatttgacaaacattaagtactacttataccggtgagtacttatgccgcttaacgaataaataaatatatcaaatatcaaaactatctcttaaaacaataattattattaatattaaaaaagatattatagcaattttaataattaataccaaacaatacaaaagagaaatagtattctctcactcatttctaaactctccctccatcttactctcatccattctaatctccttatttcctaccaaacatacccttatagccattaaaacaaacaaataaaataaaaaattaaactttacttaaaagactataaagtctactagaccatctagaagtgagaaattccaaacttttaccgcgtttagtgattgaatacacacgatatcatttctttttcatatctcttcatacattttccacactcatttcttttatatatatataaaacttattactctttcaccatatcatacaaacaagtcttttgtaataataaaaacagagtctttttccttttcttttcttttcaatggcagatcagaagaatcaacaacaagcttatcccttggccccagcaaatgggagtagaagaagcaatgaagagacaccaaattcagacaccaccaaagatgagctaaaacgaaagaagaggatcagattagcaatctacatagccatttttgcagtgtttcaagccattgttattggggtttttggtgctgttattatgagagctaaaaatcccaactttagaataaacaatatcgatccaataactttgaacaaagctaataataatggtggggtttcatcatttgatatgaaatttaatgcccaagtgagaattcaaaattccaactttgggccttacaagtttgacaacacaactttggtctttacctacggcggtggcgccgccgtgggacgggttaatattccgaagggaaaggttggtttgcagtccaagaaaaagattaaattggaagtgaatttgagctcttcaaatttggtaaacacttctattgctaataatcttaatagagatttgactgccggagctttgactttccggtgtacggcggcgttgaccgggaaagttgagcttatgtttatcatgaagaagaagaagtcaaccaatttggactgtactattgttgttgatgtcaaccaaacccagctcaggtctttagtatgcaagtgaataaatggtgttttgaaactttttattagtgattcttgtgaaatttttctttttttatatatatatatttttatatgtatcatgtagatgttaaagttgtttcaagtttcgactatgaaatcttgtttttctgtttggattgtgatgaaatacatgctttcgtcaattaatattacttctttgtgaaactaaagtgattaactactaactataactaactcttggagctcccctatttgcctttcaaaagagggaacctagagctaggtctaggtttggtccacctagagcatgttgcacttttatttttctatttaagcatttatatattacattattcaatttgagaatcgaaccgaggacctttaacacacacgcactcgtttatggccacttgagctaatttcgagtggttagaacatgttgcacttgaatttgcttgtgaaatactttgtctcggaaaaagtataaatataattgggctaaagttactctctctctctctcacccacaccattacaagtgtgtgtgagatgaaaatcctaatctcattacagtgccttatatggacacggccggccagagggtggggcagccggggcataggccccaggccccataatttttgaggcccgaaaaattaaaattaatatacataaattaaaattaaaattaaa

SEQ ID NO: 300621 - DNA, 5837 bp, Cannabis indica
attaactatgtgcctaatatttgttcactaccataatgggatggttaataatcatatattatattagaggcacatgagagcacccttaaaaactataattgacccattaaattatagtataccattattggatcacttaagcccaattagtaaataaccctttagggttagaggggcatgatatatatatatatatatatatgtgtatgtcttaagtgaagtggtattaggttaatggaataagttgaagaggggatagcttagctccacattgtgctcctctccaatcttgagtttgcattgcattggtggtgattcttggattcaaatggctcacatggatatctcaatgggaggtatgtgtgtatttgtttaattttctaaataaattattaatcttagttttatgattatgaacaatattgattaatgttgaatgtgtgaatgggagctcatactctacatgataatttaacattatcggctaatatcctttttatattttatcttttgttaatgaattagcattttaaaaagatttttttttttttagattaggtccttaaaccgcaatttaaggcaaatgtgaacctcatgagttgaggcaaaaagtggtctaatatgaaacgcttacattttaaaattaaaatatataaatataaagctttaaattggccaccaatatccgcttcattctctcacccactcaatctcattcccatttcccatgcaccatgcaatcccataattcccaaaaacaaataactctctctttctctctctcttcttcgtttggtttctctgataattttcccacgtaataagctttcctctctctgtgcccagattcttgaaatgaatgagtccacgactggggctaagaaatgggtttgcaaggatctcagcaagctggtaaggtccgcaggcgttttttatggcgacaatcctttcgatttttctactccgatcctttatgcacagctctctatatctgccttgctcaccgctcttcttcaattgattctcaacccacttggccaaagtgcttttatttctcagatgctcgtacgtactaatgctattttccttttttttttgggtattactttcgccacccaggtgtttgtttaaatgtctgaacggtttttcctgtacaaaaaatggctaaaggaaatgggcatgcataaaaacttgatcttgaacacttttttatgccttctttgattgaaaaatgttgttactcaaaactgcaggtgggtattattctaagtccatcaattataggcgatactacatttgcgaagacagttttccctgagaccagcttttatatcagtggaacctttgcctttttcgggtgcatgctctttatgttcctcgtgggagttaaaatggatttgggttcggtgtttacttcaggaaggaaagcagtggcaatcggcctctgttgtttcatctttccatttcttatgaacacatccgttgctgtaattttaaagcagatggtgaaaatggatgtagcattagataattctttgtttagcatagcatgctttcaatccatgagttctttttacgtcacggcatgtctcttaacagatttgaagctcctcaactcggaactcggctacttagcggtgtcttcttctatgatcagcgggacactgtcttggctcgtgattcttatggctttcactgttagacagagttcttttggaagtacacacccacttcctcttttggcagtaagtttgtgcgttatggtggttatcatactgggcatcctcaggcctattatgcgttccatggttaaaaatacaaacagaggaagagcagtcccagagcattacatcacttccgtttttttaatggtgttatgctgtgcgttcttgggggagtttgttgggcagcatttcatgttggggccaatgattttgggtctcgttgtaccagatggtccgccattgggatcggccttggtcgataagctagagtcttatgtttcttcaatattgttaccaagttactttatttacagcggtgcttccatcgatctatgttccgttgacatgaaaacgtttgggattgtttgggttttggttttttctagcttctttgcaaaactcgtagcagctatggtgccttcactcttgtgcaaaatgcctttggttgactccctagcacttggccttgtcttgagtacccaaggcatcactgacattctcatatggcaacatggcatgatgctccgggtaatcaactcatcaacttccttttgctagctaattattatatttagtttatctaattattatttttttttgaagaaaaagaacaaagtgctaaaaaatagaatctcaacttggttggtaatggtggtactctactaaaaagggagaatgcccccattctcaaaatagttttttagtaacgaaaaaggaacaattacagagtacgcaaaaaagttttaaggaaagaaaacgaacaaatcatatctgaaataaaattctaaaccataaaactatcattatttgctctgtttaagaattcatgtcagattaactaactttattatcatcaatgtactaagtagtttgatctctgaaaatacaaaccaaaaaactcgtcttctttttttctcttttattgtggagacctactagtggcgtcgaagtttttcagtctataaggatttgaaacttgtaacaaagcacgttcgaacactccttctataaggccagtcctagactaaggcagattaggcccgtgctttgacctcgaaactccagccccataaattttgattaaggttacagattaaaacataacaaaatataaattaatacataactatattaaagtatcaaaatgactttggtgacaactgacaacctacatctatactttgacttggtgatattttactatattttccaataataaaactgatgctaagagtttcaaaaattatttcattactacactgaaacacccgatttaatattaatttactaaaaggtatttgtataggcagcaaaattttattttgagcttaggaccggccctgccctgtacatacaactagaccattaaccaaaaaacttgtatgattagccaggagccaagatactcgcacttgcacagttgcacttgcactcgtacacgtacataataacatcatatctagtttttactgctctttggattaatctgaatatactttgtttctagctaattagcttgtgtgttttgtgtgcatatctttgatttttcagttggtcgaccaaaaatcatacacttgcatgattttatcaaccatctttataacaggaaccataaccccactaattaaactactctataacccatcgaagagatacgcatcaaccaaactgaggaccattgagcacgcctcagaaaacgactccgagctccggctgctagcctgcatccaccgccaagacaacactccttccatcatccatctccttcaactctccaaccccacaatcaagaaacccatctgcttctatgttgtccacctaatccgacttgttggccgatcctcagcccttctcataactcaccgtccaggcaaaagaaagtcttcccactccattcaatccagccgcataatcaacgctttccaacatttcgaggaggaaaatcatggcaaactcacaataaccgcagtcacggccatggcgccctctgccagcatgcataacgacgtgtgcactcttgctcttgagaaaagggttgccatggtgatcatcccttttcacaagttgtggacacgacacggctcagacgagacattgatgaacaaccctttaagaacagtgaaccttaacatcctcagaaatgcaccctgctcggttgggatccttgtcgaccgtggctccttaagtggcatcatgaatccacctgtttcctccacaaaaacaactcactcaatcggaatggtcttccttgaaggacctgacgaccgagaagcattggcatacgcaactcgaatggcagagcatccttcggttggcgtcacggttgttagactcagagatttgaacaaagcagcaacaggggttgatgcagaggacgttagaaacatagagcttgattctaagatgttggaaaagttcatggcggtggctaagggagccggggttgttgggaagaaaaggcatcacttcagagacaaaggtgttaagaacagcgtaggaaatgatcaatgtggttcggtcgatggagaagttatacgagttgattttagtggggagacgccattcgagcgagtcacctctgtttgctgggcttacggagtggagtgagtatcctgagctgggtttcattggagatgttttggcatcatcgagtaataattgtggggtctctcttttggtagttcaacaatccgacgagggcaaaaccagtaaggctaagtgccctggcgtcgttgttaccaccaataataataataacaacaataatattgcaggctcggttcgtgtggatataccacgtagtaataataactaataataatactaatactaataataataataataataacaaagtccaacccagtttctcacgaaacaaataataatataataataaatatgatatggtgagaaattgaagagggaacatgacgggtacgagggtacaaaatgtcattatatatgcgcactgcgcacccatgcctacttgcacggaaaccaccgtcaccgtcactcctctccttcaccttttaaaaagaatttacatacagatctctattcgttttagtatccgaaataattttttagtcaaatttattttcacggtcatgtaaattataattatttaagatatcttgtaaaattttaagattttcaaaaaaatttacacggcgaaaattgtgtttaaacagtgtgcacgcgtaacttttttattttatatgtgtataaaatagactgtttaaacattattttttatattataaattattctaaatttctcaaaattttgtaaaatattttaaatagctaatacgtacatgcatatgaaaaaaaaattagattaaaaaattattctaaatgctgaaataaataaaaagtgcatcaatacatcctttaaaagaggtacattgtagaatcactctctttcttcttagaatctctgaggcttgagactatgaatattatttagtagtatatattaaatttatatataaataatactaagtgatatatataatttacactaattattttaattttaaatgataaatgtaatattcactattaatcattcatatattatacataaaaaaaattgtatgattaatgttttttaattaatttaattgaagaatctagtgtaacattatcttgagttacaaaagaataaatattaaaaaaaaagatagtgaaataatgtgagcattaaaaaaattaaaattgtaagaaaccaatctgagattagtgtaattaaaatatataatatgtattacagtgaaatttttcttatttttttgtacccagcacgatatgattcgtatttttgcaagcttttatgtgagttgagccgacacgacaaacacgtatttatagtttaaaatagggaaacactataaaaaaaaaacaaactatctttagtgacaagcttttaatcacaacaaaattttcttgtgattaaatatagtatttaaatacaaattgtcactaatgtgccgtttggcaacacttatatttttaaattttttaatcacaaaatgaaagtaaaatttttgtttttaaaaaatttatttttgaaaaataaaaatgcattctgtaaccacttttgttttt

SEQ ID NO: 300622 - DNA, 3161 bp, Cannabis indica
cccgtgaatggtaccaaaatgaatcattcatacttgtatcccaagcaaatttattatcttacattactgacctgaagaatggagttgattggaatcttgtcaatgtttacacccctcgcaatgtctgggatttctcatatgaggatgatgatgagacaacgactatacaagaataaaactcttcaggaatcccgttagtcattcaacttgcacaattggatgatgtcgaatatatctgtgatgatgttgacccaattgaagtgactaacagggatcgtgagcagcctaatcgtgaagatttagattgtttcaatgtttttagtgatgatgaagacactagtgatagtgataatgaaaatcatgtacctgttaatgatgatgatgatgattatgatgacttgtagactttaaagtattgtaatatttaaaccgaccattaagtaatacaaatacaagtctcttttgttaatagtttgattaattaattatttgtagcttgtatgtgtagaattgttgatgcaggtgcaagtggaagtcagaaaaagagagttaggagaaagtagaagggaaaaatgaacaagaactagccaagcagcctgcaggtcaaaaattgaactttagatttcatatggagactggggccccagtagatgactatggcaacaagtttaataattatatcaagtttcatgttcgcaatacaattcctatgaaccagtttgagttcgaggacgttaaggatacgctcattcagactatatgggatagaatagcagtaacattctaatttttattataatagatcaaacaaaatcattataaaaagttaaatatatatgactttaattaatgttttttctagaccaagtttgagttgccaactaataatcatatgtttgcggattacgtcaccaaattgatgtcaaaaggattacgtgactatagagcagatacgaagaaggcttggaaaaagaatatttaaaaatattgggaggaagaagcaaccaggagatcacgtccagatatagtgacaccacaggaatgggcagagcttattgcatactagaaaaacccaaaatagcaggtatgtattgaaagttgtaatatttaatttttattaacttacgatttttttctcaatttgttaacaataatttaactttaaattacagagaagagctgaacaaaatgcaaaaaactgatgacagatgaagattcaaggtggatgaggatctgataccattgttggtcacattgtgagcggggtttatattttcaacatagtaatattttgttaataatgtttttcaaattttttatattgtttaaaaataggctgatattcagacgggggaacttcccagtgctgtggatacttttgcaaagttccactgcaaggacaacaaatggtgcgatgatcacacacaacaactgcatgtaattaagtaattttatatttttaataaatttgttgtatattttaatttctatttaactttaatagtttcataaaaaattttgaaggccaaaatggttgagattcgtgaaactcaaccagcatcaactaatgtcccgcgccaacacaatgtcgaccctatccaatttcctgcagatatgcatgttatgacacagttattgggtgaacggtcatgcaacttgagaggactgggccagttgccgagacttaagacgggggcaaaaagagcaactcccagggcaagtccctccaggcagcccactatcactcaagaggaatatgaggtacttaagcaaaaggtggaagagcaagaagcatggaacgagtggcaacaataaatgatgatgacacggaatcaaatcatgagtgcattccaacaacaaatgatccaattggccaatgtctttttaggatttaacatgcctgcgatgcctctgattctaccggttccaccatttcaacctcttagctatggtactaggtcctcgtcacagactgcccatcccggtgatgaaaacgatactgctgtggatgtgtaattttttagttttcagtgtacataatattactatttatgaactaaaaatatttttatttagtttacgatgttttatgtagttttgtaattacaatataaattttgatttcataatatttgttattatatttattctttataatttcaatttatgtttacttttagttttaaatttaattatatattataaatatttaaattaaaaaatacttttgccggcgtacattaactcgcttgcaaaagtgtataatattttaatattatttattttgcctgcgcattaactcgctagaaaaactatttatttttttattattaaataattttgccaacgacttaatgcgttggcaaaacatacgcagtaaattggataactggcgccaaatttgcgctaaaagttttgccagcgcattaaccctctggcaaaatgtcgacaaggacacctcatccgacaccaaattgccagcgatgaacttatgccggcaattgaattcgcttgtgtaaacacttttgtcggcgcagctactaatgtcgccggcaaatgttgatatgccaacgaaccattgctggcatcatttaccagcgaaaaaagtcactgacaaagctatgtcggcgatttcctctcacttttactggcaaacttagtcgctggcaaaagtatattttcttgttgtgagattagggatgtctacaacaactagtcttcccttattttataagttcccttgaacattattaactgtccaccgatttaactgctcatcatcgatgtatttgattctaaataagccttaatttttcatcttgtcactggcgttgcttaacttgttcaaatagtagcactagccactgcgttagatcatactctaccataacagtatattttgcatgtcccgttataaatggccccatgtctataatttatacacaaatatatatgcattcgtatttttgtttcccacaaaatacaccttgttctattttaatatttatatatatatatcttttaaggttcatttgtttgaacgtactgggagtctgaaattagttcattcagtacatagagccattaagaacatttatatatatagttttgttataaaataatataatgtagatgagaagaaagaagaagaagatgaagag

SEQ ID NO: 300623 - DNA, 1863 bp, Cannabis indica
gcctaactacccctactttaacctcaaccctcagatcatgcaacaacacaatcctatggctaatatacaatcacggattgtattcccttatttactatcacgggacaaaatcgggtccctacttttatatagttttcttgttgttttcatggaaatccgtaaaaatatataaaaaaattctttaaatgtaaaaatgtaattttttttttttaaaaaaaaaaagtatcttatctaattattcctttttttaaaattcccaactaaataagaattctcatatgacccaccttttttgttttcaaaaccataaaactgttattagagttctaagccaatgaagcccaaatatttgatccacttgacttgggccctctagtcatgttatgtgatacgatctttcagacttcaatcaaatatgggcttgggccttggacttgggcccttcattgtttctatacaaaattgctcgacctattttgcattagtttcataaattcatggtatattttctaaaaaaaatacttttcctaacattatattatttttctcaaaaagaaaaatcaagtaactactaaatgtgaatcgttcttagtggtattaatagtgaatgacattctagactaacatataaatatctagattctctacataattgtgcattacaacaataaaaattaaggtggagtttattaatatttttatttttaaattttttaattgcaaaaataaagtaaaatttttaatattttatgaaataaaaacaatttattttattattatttattggttttatttaaggcggatcgacttttgggttaggatctgggtcgggttcaggtccaagttccaaggtctaagttggggtgggagatggagagagatatgcaccctcaactctgatccgacaccacaaatgtgtaaaactgagaaaaagagagatagagaaatagaagagtaagaaggtgaaggagggaatacctagatctgtatattgaagaggaagaagaaggagagagatagatatatttttatttaaataataaataaataagattgtgatttttaggttttttgttttatcgtttaaaaaaaaaagaataatataaataagtttttgagttttggtaaatatgtccatgttagataatttttaagtgatctgtcattactacataggcaaaataagaattttacaaaacgtgtagacaacaccttaaaaatatgaatagaatagtactttggagggttattatcaaaatttgaggtcgaaaggttaattgtaagtgaattgagagttcaaaaatttaaccgtctataagggtgtacttaaaactttatgtataaaataaaaatatacctcctcaataaatatagcttttaagtgcttattatgtccccatcaatgtttcctattttccattttgagttaaaagtcacctaagtgtggaacaaaatgcatatttattgtaactataatataattataaatttataatgtacaatattatttttttgagtgaatcattaattttatatatataaaaaaattacacaaagtgtctaaaattatatgttttttatgtttttgtagactatatttgatttttgttacatatttttacgaaactttataaaaacaaagcataactaacatatataaaatgtaaagcaatatacacatggccggccagagggtggggcagccggggccttggccccaggccccacaatttcgaaggccccaaaaaaattaaaattaatattatatatataaaaaaataaaaatacaatatatgtatatataaattttggttcaataattacataaaatggcttatagcacagttggtaatagaggggttt

SEQ ID NO: 300624 - DNA, 3648 bp, Cannabis indica
agtttgatattttttcaaaaaataaaaatcttattaaatttaaattttagtgaaaaaattagacattttgtactctacctttagatagagagagaacttttgtgttcttcctaattaatttttgtatcctttatgtgctgttgaatttttgtgttcttcctaattaacttttgtgtcctttttaagtgtttttgaaatttttgtgttcttcctaattaactttttttcctttttaagtgtttttaaaatttttgtgttcttcctaattaacttttgtgttctccctaagtaaaatacgacacgttttgcaaaaagaaacaaaaatgaacacgtggattataatatggatttcattgtttgaagcttgggccacgtggcttccctaaggcccaactataaatagagaagaaatttggagctgagaacgacaacaaacccatttaactcaaaaactaaaaatggaaccagagccaccaccaccaccattctcctcttcctcatccaaaaacgacaccaaattggccaaaacgacagacttattcccattaacagacgatcttctccacaaaattctctccagactaccggcggtgtcgtttgcttcggctgcttgcgtcagtaagtcctggaatcacctctgtaaccaggtcctctctcgtcccaagctcgcctccgctctctctctcgatccttctccagaggtaattgctttcttcccatttgcattttctgggaaaatttcaaagatttgagaaaatttcttctttttttttttttttgttgggactataattattgattagatttgctgtgagttgaggttgttgataaagttcttgctgagccaattcgaccccatttcgttcttgcaagtattggaagtgggtttcgcttgtatgacgtttccagacttgtatgtaatctttcgcttttgttttgtttgtttagtatttttcatttgttattttttgaaattttgttttttttcattggtaatgtagatttcaaggaaattgggttcgaaaacaccattgattatatcaacttctcttggagttattggaagagatgctgttactgatgaagttacagaggttcatttctttgtatttcttatttttgcttttgttgtgagattgtttttgtttttgttttcaagcaagggagaagttaataatgtatttgtttcatttggggaaaaataaacgacaaattttaggttaagtggattagtttggctggagatttaagtgatgatgatggctcagtaactgcagaagatgacaactttggtatagttttaactgttggatttgtgccaggactagtagttgatgttgtcccattgttacggccaacaaaggtgacatattctgtgccttgaactcactgccaattttgttatttttatatttgaaactcgtggttgtagctttgttatatggattgttcattaactagctaaagaaaaaacatgtaagctctttgtgcatcttgaactgaaaatcaatgttattgtttggtgaaaatttgggctggcatcaggaacctcgaaatgcaatgcttgagaaatttgttacagacataaggggtttctgctcctctgtttcgggtggtcaatccccagtagcgattattgtcttcggagtaagttttttagttggttcattgtctgttcctgctaaacatatttggtattgattgtgttgctaaattctgacatcatagatggaacaggaagggcttgttgacatgaaaccaatagtcaacattttgggtgagtttcttgcagttttcaattaccttttgtttattttaaataagaattttcggaatatgcttatggttacatattgttaggaaagttttgttgaataatggcatctcaaaatcaaacctttcagattatgctatgcccaaggagactgttattgtgggtgatgagagaggtcgctttttgtacaagagtggaaatgagtcccgaaatttctgtggaagtgcaaaatactttactgatgcagtagctcttgtatttgccaaggatagaaacagggcttacggtattataattatgttcttctcgaattaaccatatggattgctgttaatatgttgttttgttaactatattcctgatccttatacattctggttcggttcggtggtaatgaacaggcaatggaaacattcaattccatgtcgcattatccaatggagtgacaccagttggcccacgatacaaggcagcttctgttaaaaggaattgttctgatcattcaacttggctgacggcgaaattagaagggcaacaggctgttctcgatgggcaaagaattttgaatgatatcaatgatgaggtattctagcatgattggttttaggtctcagctagtatttatgctgcactttttgaaaaattatgcacctgaagatagtaattatgagctttttccctgtctttttggggttcatttacacagttgggggatcatgctggttcttctgatctgtacattggagttacgacgaggagaaattgttctatccgatcagaaaagccaagattgctaacatctttagctttccatggagttgtagagtaagcttacttttccatctttacatgtcctctttctccttaccttttttcttcttatgtctttatatactttctgttgctgattcattttgcaaagcagcttacttgactgtaccatcattgaattttgacataatcttgttttataggggagatgaagagtatctttatgtaagcggtgaaggtatcagaacaggagattactttcaattctaccgttcggatcctgaagctgcattgagctcaatcattagtgtcactcaaaagatacaaaacttaaagttagatcaaaaccagaagaacagctgttctcaaatttttggaggtttgattttctcatgttacggccgcagtgaacccttctttgcaagcaacgtcgacagtgtcccatttcttgagaatttggccgaggttccattcggtggaatattttgtggaggggaaattgggcgtggccctttgagcttggttgacgaagatcggcaagaaagtcctgtcagctgctgtctgcatgtctatagcactgtttatcttgtgatgacatgtactcctccttagaattggtagttaccattttgaataataagggttgtgttgtgttgtgttgtgttgtgtgatgttggaaattaattagcacatgtccatgaaattgatattcatgctgtaatgtttcttctaattggaaatgaaataagtgtttttgttttgtaaagtgggactaagagactgagttttgtgttccaagggccatagaaaataatgctcagtggtcatacttcttagtcattgccaagtatgttgttgtactaaggttgattagtctaaagtactctttttttgttgtcatatcttctctacatttcaaaaaactagatgtatgtagaaaaaataaagtaggtgtaaatttgtttttgtttaatctgtttaaataactattactttaaaatgttcctgttatatataaaaaattgaaaaatgtatagtgcaaggggtgcattgatgcattttttttttgttgaaaaaagtaatcaaactttattaaccttcaa

SEQ ID NO: 300625 - DNA, 1046 bp, Cannabis indica
tttttttttttataaaaaataatttgatatagaggtattttgataaaaatgattacattttctatatttatctgtgctaaaaattgtttttaaattagttaaattaaaaaaaaaatatcaaaaattaagctcgattaaaaaatacaaaattaattttattatttaagaaaatagagagttgaatgaataattttacctaaacatttgatattaagcctatttttatatattatattaaaaaaatggaggagcatagattggccagaaagtgatagataatagggccccaagtggaaacgacagtaaagaaaatgccaaatccaacgtccacacacactctgaatctgcacattgatatctacaaatcatgtgttccttccataacatgtctcactttaatacaaacaaaattaacaactttatttaattaaacataccaactttatttaataacacattcaattttgagggaagggtattttgtcaataaattttatgaaccaatttaagtcacaagatctatgctttttgcttttatggcaattatcttcatttattttatcttcaatgccaagatttttgggtgatcataatgacatgaaaatggaaaatatttcaaataataaaaatattattatttggtacatgccaaacactataggtacaaggtcgggtttgtgaaaaaacagattagatctgcatttagaacccactcgacaaagaatccaaaaattatttgctaagagatcataaaaatactaataataataataataattgttgcccctgattttgcccaatgtacgtagaccaaccagataaggacacgtggacacaaaggttttagcacttaaattaatagctaagtctttgtaaagaaaggcattatcttgaatatgcctcctggagaaggcatgcaaggctttatatgctcccggagatcaagaaggcatcaaagcatctccgggaggtgtcaggcttcctctaagcagtcatctcgcatttaatgacgcatgggaggaggcgtgttggaactgccacacgca

SEQ ID NO: 300626 - DNA, 1356 bp, Cannabis indica
tattaaaaaaaaataataaatcgtctttccacctaccgacatagaattgttattttgataaaagtgacctaaactcttaaaaattaaatcacgtgaaattcttaaattggaattgaaattaacttaattattatattaatgagtgattaattagcttattgataaattttagatcatacttaaaagggtcctaccgatcgtggaagaaaaaaactgtggtccttaaatccttatggctatatatatccatatataaatatatatatatatatacatataattgataaattaaacaagtggcacaacgtgatggttcaacgttaattattcaaataatatattgtattataataagactatatatatacgtagttaattatagttcaatccaacaatatatagcccagcgcccaactaataccaaacccaatctatatatctaacctaatctaatctaataatcatatcatttatatttatatatatatatttatatatatatatttattataaacaaatttgacaattgaactcacatcacatacaatcggaacaaaattggataaaccctagtgattcaccttaaaaagtgacaaaaaaataaatgataaataaataaaaggaaggtatatatgtttgaatcaaaattaaattatagcatatatacacgtatatatatgaccataaaaataatgtatgtttttcagttatatcaattatctcgacaatgattaatttaaaaaaatattattattgaatttgtaataaaaattcccataaaattgtgtatatatacatgcaaaagtcataaaagattgatacatttgataaaaagcttgttaattaattaccttacaataagttctttgtttataattatatacaaaataaataatattggatattaaaattcttattttatattatatgggttttatatatttgtagctatattctactttttgtctttaatattattattaatatgtggtgaagtttcattgatcactttgtcatgttatttgaggagaccataaccaagttaagtgtcatataagatgagttagacgtcaattaatttccgttttttaattaatatattgaaattaaccatatgatacaaaattattaaggagctatgtacgtgtgatatatatatatatactagtatattgttacgtgcgatgcacgtatgctatgttttatattaagtattatattatgagttcggaaggaaataaatgaataaaaaataaataatatttaatttagagagatttgaataataaatttaaattaaagttttatgtccagtaaaaacatattggaaacaataataataaggttataatatat

SEQ ID NO: 300627 - DNA, 1634 bp, Cannabis indica
ttgtttttttttaagaaaaaaggtcgcaagttcaacgtaaaactacaaatgcaatataaaacttttataacgcaaaattgagcttcagctcctcactattcacacttttttaagcttcggaaactttaactcatcgacacactaaagttcatgtcgccttagtcttacacttacttgcaacacaaaaaaaaaactaactataagttgagttgacgcttataagaaagtttaacaagttacgactcactcgtcgtatcataataacataaatcaactaaatcatcctcgttcctttcaaatgcaacttgcaacgttaacccgcaaatcatattgggagattaagcaactttagtcaccttctatgtcgtcataactcaaatttataaccataaacgttacaatcaccatagagtgtcacaagccacgcaattacaattgtagcacgacgcacaatcttaaatataatcgaatcacttttttttaacaatgaacagtcgcgttaactggcgtgaatagtaaatttcgtagtggtcgatgtatagagtttcacacataaattgcttttagaatcccataaccaacttaaaagtaaatgcaactctaattgagctatttttgtcaaaaaaaaagaagaagaaaaaaataatttaatttcaaggataagtacatgaaacttctatcaactatataaggttaggctcatatatgtattggagaggtctgtttgagttgtagtagacaagttccataccatatgtattagaaaataaaaaaatggaactagtcttgtattttagctgaaattttttcaaattaaaagttaaaatttcatttagctaaatataaattaaaaccaaaagggaaaagaaaacgaaaaatctacgtttgcaaacgatgcacgtacaagttatccagttatggcacataatgctgagtactgaggttgtggacaactattggccaaccatttcactttaatttacattttcgaataacaatattattattattattattataaataaataataatcctatgtgtgtggctctctaatttctgttttgtaatatataaaaaaatatataatatatttatcttattttattttatgaaactaatttttaaaaattggtccttcttgctccttcttccaacgactcttcttcctcctcttccagacctgtacggcacacacaacactctcccttcctccttctgattcattaacccatcatcatcatcatcatcatcatcattatcatcgtctagggttcgaaatccatggacttggtctgtgtaaattgcagataccccattaatcataatcaattcaaatacagaggtcggccaatttcaagtcatcatcatcaagcgacattaacagctctatcttccctcaattcctccccaagtataatttatagtagaagaaggaaaagaactaaatgttccctgcggatttcaaattttgcggcttctacaaatggagctataacgaggatttccacgcccggaaagtctagctccgccatggagcagcttgatttcgagcgcggcgtttgtataccctttcgcaagtacactcccgagacagtatgaaaagaaaaaaaaactttaatttctctctctctct

SEQ ID NO: 300628 - DNA, 1101 bp, Cannabis indica
aactgacagaatcagagattaaagacaaaatctttcggctatctaaaactacttgcaaaccaggtacctcatttcatttttcttttctttttacacatttttattttttgcactttctccccgagtatatataagttgtatattattacacagtagcttaaaagaaaaggaaaaatgtcatctttttcttatcgaaattaatttaacaattggaatccttaacacgaattaaatcaaataatctatacaggctatgatctcaagattaccagataaaggagagaagatacaaatgcatattgtggaattgaatgctgaacttgacagaattaagatgggaaaagaatccgaaaagaaaataattagtttggatgatttaactgacgaatttcagaaggtgataaatgtatagcgtattgctggacaatgtatagtaactattttgttgagaattctcttctcaatccatgaatcaactcaattcttctccagttaagtcaatatgttggtttttctcctcgagttcaatgttttggagatctcgcctggatattcaatgctgtctggcacatgattgatgtgtttatcttttttactcgataaatgctgtttatggtttcatcgttttccaaaattcttccacagatttatgttcaactgtcaatcttacaagtttgtggtaattttttttgtcattaataataatcacaagggaaatttgctgcaaaaatttctcaaaggtttacttttatgcagattagtctttaatttttaaaaatagcggtaataatattcaagttatagattgttgtatgtccattagtcatttttctaacgattctttagttccaaaaaaaggccatgtgttgatattttattgtttcaaattaaattttcaattaaaaataattaaaaacacttgttaaaaattaaaaatgagcatttatcaatctcgattctcactccaagccatttgagcaaatttccaatgaatgcttgcctaaatgaaaccttgatgtgagattcctgcagcccaaagcttgaaggtacctgttcatattttttttctcttctttttgtttttggttctctctctctctc

SEQ ID NO: 300629 - DNA, 4066 bp, Cannabis indica
ccttggaaatacaaagaaaagaaattattgaatactgaagggagaaaaaatccaacaaaattctttcaaaaaaaaaagtaagcttttaattcttctttcaatgtagctgtacccaagttcacagaaacaataaaattgaatagccaatatatccacatgcatcatttttttttcggtatcttgcatagcatctctatttagggcatgccccaagcacaggaaacattaaaaaattgtgccaaccttcaataatttgtatttctattggagaatatagttaaacttaatttctttaacacggagaaaagaaaatataggaattacattataaaatgttattggaagtagtacatgttaaacttgcatgtttaaaagaatatataaattctatataaaataaaataactaaatgaaaaaagaatttaatttaccgttctttttcaatcattcttaaaaggccagtaacagttttgtgctctacttctggagacaaagaaagatgtttgcggaaaagctgcaatcccatatcccacagtgaacggacatttggtgtttgtttcacatatgttctatctaggtacagagctataccacggatcatcaacatttggttacatagatcctgccagcatctctcaacgagggatagaaaaaccaacaaatctgggctttgaccaaccaaggattgcaatgccgcagctatatgcgtttcacattctctttcaatccgctgataaagatttccccccatcttatgaaggcatagatcattgacggcctgagagcaacacaaatggtttacactcatctacatttgtaatgtttatttattcaaagaaagaagaaatcgtgtagaaaatacctgatatagcttctctagatcacaagaatcaggttgctttaagaatatagcacaaatagctgatttaagctttccccatgtttcctcttcaaaatttgtgggcaacataggttttcctaacataacgaaaagtgctatgtatcagccaacctttaaatacataattttactttaacacttgaaaaaccaattctatgagaaccttttcaaagatgactgtacagaccaatttccacaaaccacttggaattcagatatccatattcaagttcgagcctagaagtttactttcttttaatttatttttaccatttaacaactgtagtttatgtgaaacaagtacgcaaccataaaagaagaacataagggaaacaaatactaaaatcacatagaggtctgtaccaaaatcccttttaccaccttagttgagatgtaaacttaaattggaacttggaatctaccgcacaacgatatgtgccatttcagagagttggggacaaagaatagtcaattggatgttaaaaggataaacaatatcaaaggatcacacatcaaaagataaaaagattaaagaatggaatagaaatttaggaacttttgatgttacaatgctagaatagcaatcattgcactcttagtaacagtaaaaatttgcaaatatgcttaaagaccatagaaagaaagagagataagattgttagatataagtttaaagtttcacaacaaacaaggaaacacaaaactttaagaaatcttaagcccgggtgaaacttttcaggttggcactagagcacatttctgcaatggtaatatttgacaagcagaatttcgaaagtttagtgacataacctttatattttaccaggaccctaagttgagttttaattttaaatcaaagatttgaagataagcatttcgacagaaacaaagtaaccaacaaataataagcgcagagtcgacactaacaataaaaaaactatgaatcggaaacaattttgaagataagacattggatacgacatgtaagatctgctcatctcttactactttagaaaccattttatattagcaaaacacagctcccatatcagtaactaaccaaaatgatgatcactaaattagagtaacataacacccaaaaagggtagccaaattgtcaaacatgtggtttgctcctacaaggtttgaggttcgagtccccaaatattgtaggattaggcgggatcctagtttcaaaaactaaattagagtaacataacataacctgtcagtcaatcaaggtaagcagtgttcagtcataagaagaccctgaaagtccaaaagcacaaaactttcacagaacccaaacaccaatgctagctcaatagcatataagttccctgagtacgaaaatttcggatccaatttgatataaaatagtaatactagtgtcatttcttatcaatagaacagaagtaactcgtagaaaaattcctcatttccaacacaattgaattcataaaacctgtatgagaatctaattacccagccaagaactcatttccagctaaacccacaaccaaaattaaaaccccaataccgaactaagcttttcaatcccaaataatcaaacctatccacaaaaccccaaaagcacaaatcaaaaaagatcttcaagaaaggaaaaaagaaaaaattcggaaaaccccacaaagcaaaacaattcaaaaatcaatattgcgaactgaaaaatcgaagagcagaaacaaaccaaacctttgttgagcttgatgacgagcttcttagcgggctgcggcggcgtagccttcttccttgacaaattagcagctacggctcgaccagaggagtcttctggcttaagatcttcgtcgagggtcattgaagaagggtcgaaaacgacgtcgttatcagcaggtgaggcaaaatcatgagcagcagcagtaggaggaggaggatgttgatggtgtaagccattcttagctgggtcgagagagcaagacttggacttcttcatgggaggagctgaagaagaagaggaggaggaagaagaggtcggaggaggaggacggaaggtggtggcggccaaacgtttggtggggtgagacatgaaaagtgtgatcaacaacagagcattgtaagtgagaaatatacacaaagattgttgatttgattatgagacaaaccagaaacccaaacccaaaatcaccaaaccaaagccaaagccaaagagaaggagagaaaggagaaaggaagagatatccgtgtgtgttgttgttgttgttgtgattatttttgtgagaagagtgaagagagattttatttttattgttattattttattttattttattttattttttgaaaaatgagaatggctaattaggatttttgtttcgataaatttttattcatgttaagtgtttattagaaaaatttgatggaagtttttaaattcaataatctttgatggtgtttgaaaacacttcagttttttgaatttttaattacaaaaataaaagtagaatttttgtttttgaaaaactaaaatgtgttctgtagtttattaattttaaaaacaaaaaacaaatgtgtattctgtaaattttattttcatttgttgattttatttaatttagatctgaatctagtatcaggtctgaggctgggaccgggcttgggtccgggtttgggtccaacgttggggttagggtttaggtttggttcgggtttgggtctgggtccagggtcagggtccgagtctgagtccgagtttgagatccagagtttggatctgggatctagggtctgggatttggggtcgtgtttgagggtctgagtctagggttcgggtcgggtctaggtccaagtccaagtccgcattagggttgggtttggggtccaattctgagtccagggtccgggtcagggtctaggtcctggttcaggtccaggtctgagtttggggctgggtccatatttgaggtccaaggtctgggtctgagctcggggtctagggtctgaatctaggttcgggtttggggtaagggtttggggttcgagtccggggtctggattggggttttggtctaaaatcggggtccgggttccaaggtctagtttggggtcggagtctaaaatattgattaagaaaaaaaaaattgaaaataattttttttaattttaaaattttaaaattttgattct

SEQ ID NO: 300630 - DNA, 862 bp, Cannabis indica
ccaaaaaaggactttacagaattaaaaaatttagggatataaacttggtgttgatttcttaattggggtggttattagctaaggatttgaatagcttttgggcaaggttttctgtgcaaaatattgcaaatatggtgtatatgctagaatttgtctcttcctcaatcggcctttaaggttgctcaatggatcatgactgttaatgattttatttgtcgggagagttgttggctagttggtaatggtgtatccactgatatttggtctatctcatggatcccatggttggattgggattcgtattgcgttgctttcaatctaaaataccaatatccacgtgtttttcccttaaataattgattggactcctcaagtaatatgaattctcaactactcaactcctagttctccccatctatcattgaggggctataattagaaagtgattacacttccttggggcagaaaggataaactcatttggaaagactgtaacgggggagtttttagttaagactacctattcttccttgatcaagtagcgggtggggctgggcgataatttttggatgcaaatttggaagaccctgattcatgagaggtcaaagttctttctatgaaaaaatggctagggacattcttccatgtggacagagattgaactctattgtggtcactaatatgagatgttctctttgtgactttgatgaagattctttggcctatgtgttcttcaattgccctattgcccgcaaatgctagtttactactcaatggagaatcatgagtgatgctttggcttttagctctcccaaagatatatttttcagttttcagtttttagaattgtatttttaaaagt

SEQ ID NO: 300631 - DNA, 4997 bp, Cannabis indica
ctcctggtgagtatcggagactcttagaccagtcctccgtcgccgtcaacctgaaaagttcatctctttatcggaggaaccgatgattctccctcaaaactagttttttactgctagggtttctctactcgttcagatctctgaacaatcacaacctcagaccatcgatttcgttctaaaggtccttgatttcatcttgggtttttcttaattagagactcaagctcactctgttaggtttcctgaaaggaaaaaggggtaagcgaaattatggatgatgctcgagtttcttttggtttgtttcttacaattaaattttgagcttgtttttgttaaaattgttttgattagataccgaagggttgagcttgagagctgaaagtgttggctttgggtgtgggtttttgaggaatttggttatgaagtgaaaattagggttcttttgttatttgggggttttgaggaaatgaatgtgagccatgcttcggttcacccagtggaagatgctccaactacagaaggtggtaatgctccgagggtgaggatgaaggacttacagggcatgcctgggaccccagttgggcttgctttgcgtgttagccaattcgtttttgcagctgctgctcttgttgtcatggcctccactagtgactttccttctgtcactgccttttggtaacgcattctttgcctaattttcttattggggttttcttgtttttgattgatttgttgtttagctggtattatgttagcaatttcgtttttagaggaacaagcccaattggctgatcttaggattacattagagatttatcatttgtgtttatactgtttttgtataatacttaggctgtttgttgcttttggaaattttgtgcattgctcaactttgcgattttaatcattgttgttctctgaaaggtgttgtaatcagagtgttgtgtaaatagttcgatgcaagggtgttccattgatggttaattgaaaatttcatagttttcggtccagtaatagtatattcatgtgaattttcttggttttacagacgaacatattctaattttacgtatggcaataatttacctcagaaactgttccatttcgggtactttcatttgcaatttttgataccttggttccttttacacttggttaaaactacataagaattctgatccttgaaggtaatcattatatttttttagcagcatcagtatattacgtagctactactattggatcgaattggatgtatcatcaccaaaccatgattgtttctttaatggatcatgtttagaagttgcttataagatagtaactattaattgtaggagtttacttctgtgaaagatcaatccatctacgtctgtatttactttttcttcatgctacagtcctcctgctaaactcagtctttagaatgaatggcttatagtaatatgctaggtaggttcacatgaggcattgaacccaaacctcatgagagcagaccatggacttgatcactcaatctatgctccatgaatttctccgtctatatttattctaaaggtaaagggtgaaaaataaaaacagcttaccttcacatgcttggaaaggtttttgacctttagtcaagaaaacccctacactggaataatatatagttgcctgattgtatttgtttccttaacagaaaatagcgctcatcaaattattccaacggggttgaaagttttaatgttattaactttttgtggtaggagaatggagggtattagatatgttatttatttttctttgctctttggataaaaagtgttgtcaagataagtactggttgccgctgggttgcataacataaaataaaggataactctaagactgctgtcgtaggaaaacaaagaaattgatgaacacatctccctgttattttcgctattcactttatgtattatgaaactaaaaccaatgtacgtagacatgttatattgtgagtgtactcattttgttcatgtgatggtaaaggatatggaagatcagtttttcatatagtatctttggctgtcaatataagaatttccatctcagtgaaagtaggggcttattatgtatattctttaaatatgaaaagtctatttgtgatgtctttcttttcttgtgcttgttctgtatatcaaactttgtggatgctcataacctcttctgatgtttcctgtctcagctatcttgttgcggctgctggtttgcagtgtgtgtggagcctttcattggccatcgttgacatgtatgctcttttagtgagacgctctttacagaatcatcgggttgtgagctttttcactgttggtgatggggtaagattcttcatagcgaaaaatactctagcaaacagatagtttcgggagatgcagagcatgatccctgatctcttgaccaataggtttaacgtggtagattagattagaccatggggtgtgtttgccttgaaccagttattttatttatttctctcttcaaacttgcacttttcatggattacatatttcaatttcgcatgtgccctttctttagttacacggtgctcattttcatgttttaatcaggacccttctttctgctgcagatgacttcaactcttacattcgctgcagcatgtgcttctgctggtatcacagttctgatcgacaacgatcttggtagctgcgcacacaaccattgtgcacagttcgaaactgctacagccatggcttttataacttggttcacatcattaccatctttccttctaaacttctggtcactagcatctcggtgagtgtactacaagaatgagaaaacttgaatgaaatataagaacgaagagcagcttcggtttgaaaatgctatttttcttctttttcgtcgctgtgtccttgtgtgacctgttaccaaaatgcccttgaatgaaaaaaaaaaagttggttgtaattttgtgtatagtttgtgtgagtcagtctgtttcaacaatacaaaagatttcaagtggtggtgagatataatgggtggttaacatacataccctctcaacctgaatattgaatatattggacatttttgacatagtatcagatatatttgtatgcatataggtggtttttgatgatgttgttgtttatgcaaataggttttgagtgacatttttggcttattcttcttcttcttccaatggttttgtttagtcattttaggatggttttattttgtttcttagtcatgtgagcattggttaaagacaatatgaattataataacatagtagtgcatacttttcatgaaataagaatctcgtgctaggttgtcatcatgtaacttctcaaccctttttcttttcctttttgttttttaatacaaccactcacatttatatatattaatgagtaaatttgttggattgtaagtaacttgagtattttgaaagtagttttaagattattctaattttggaacaaatagtgcttagtaatatgagagagagcatacattatcataggatcacaagtgaatgaaacaagactaaaaagtcctaatttactaattttttttaaggctaattaagatttttgctccttaaattttgacatgtactaaatcatgtattcactgattgtttatgtactaaattatttttttcaaattatgatatttatcaaatcatgcctctcaaactttgatatgtaccaaattatgcatcttgaattttcattcatgttagactttttcattaaaattgaaaacaagtccttaaatccaacaatttcaataatttaggggtatttttaaagactttaaaagtttatgaggcatgatttggtacatattaaagttcggtagtaaaaatccgaattagtcttttttttgataatcttgatatgagcgagtaatgcttatttatacattaatggaatgattgagttgtatatatgtctcttacaatcaactatgattgcttgaacaaaaggagaaatgttaaaatgcactaaataatatcgatattttataccattaaatattaaattttatataagtgaatatattaatttttatagaatattattaatttattacaagatgtcacttgtggtgctaactgctaagtactattgatgttttgtggtactaagcactattagtgccttatagcaacccaccttccttgtgtcttacataaggaaacaattcccacttaactcaattgtgaagccaaaaatcacaacttatatatatataaagatattttataattattaattagttatgttttttcatgtaacaaatttgaatacgaagtattaattaatgggatattttttataaatactataaaaattaaaaaaaaattataaaaatatggttatatatattttttaacagtttatacgttttcatttacaaaaaatatggactattgatgtctttatgttattttttttattgtaatgtttttgttggttttttctattttatgtgattttcaatagaagattagaatataaaaaacttatctatataatatttttcagaaagtaattaaatatccaatattattattgatgattttagctaaatttattacttcatagttacacaatgatatgatttggattgttgagttaccaattgtatcaaaaattgaataatttaggatgctaaaattataattaattaatgaatatagaaaaagttagatgtttttaggattttgtagccaaaagttggaacataatttatggaatataattaatgtaagtacgtagtagtatagtacatatatataaacattctcattctcatcatgtattgtcctataaatatacccaccaaccccaactaccaaaactaattcattctctcattcgaatatcacacattcattttcatttcatatatataatcattccactgcatatatatatactaggtgattgttacgtgccaagccacgtagtgttagttttatttaatattttagtttt

SEQ ID NO: 300632 - DNA, 3608 bp, Cannabis indica
ttgtgaattttacctaaacaacatgaggaacaaacaaaaaagggatttttattattgatagtgatattacaagattgaaggacagatttaacaatcttttctgatggatggcaaggactattatgtcatatatcatactcagaaagtgtggatctgttacaatgagtacaaatggaagagtttgacgcagtgttggttgacacagtggctgttaaggcagatggggcagtagctagtgtggttggttgcaaatgaaattgagatggcttaaaaatatagaggccattctggtgtatcccagtgagaagggtggcttgtgtttcctggtccttaacaaaacacttgtcgcatgaaactcatagaagacatgattgtcatgagcaaatttagaaacactaaggaagttcttggtaatttcaggaacatgtgaaagattggccaatatgtttgatggacagacctgaaccatctccaacataatgttgatatgctccttcatactcagtgttgagattttgcacatcaggggtgcaatgattggatgcactagaatccggataccagttgctattatcaacctgagttgtagcagcaacatttgcttgagcattgggagggttgggagggagaaaactcctgtaaaactcttgtcaaatttgttaaaacaatcgagaaccgtgtgcccaagcttgtggcaaagctggcactgaactcgatttgaggagatggagaatctgccacctttggtgaaaccataaacaccacagccattagaattagggatagaggaaggattttggatagttacctccattattagcaccacgattattgaatcctcgactgtttcctcgagccaaaccagaagaggatgaaggaggaattcgattttgattggggaatctgctggtgcaattttgataattctgataggctatattagcttcagaatattgatccatcttacttgtagtaagattaatactcagatcattttcttgatcagaatcgatcttctcaattcgagattcggatgctaacaagagagcttcaatcttagcaaccgagtattcctcaattctagtgttggttgatatgattaaagtatcatatttaggtggtaatcctttgaatatagcagcaatgtgatcccttaaacttagaacttctccaactgaggcgaggagatccacatgttgcttgacttttagtagatagtcattcaaagacatagcttctttttgaagtttctataattttgttcgaaattccaagatcttggaggagacttgcaaggtgaagtgtttttcgagagcactctagatttgtctcgctgtattgcaaccaaccatgcgtgtaaggacactctctgtcattgaggagtgaaaccaagaaaccaagagcttgaacctcccattcaagaaaggttggattgaagttattcgaagcttgatcaacatcatcgagaaactgaggtggaggggcacgatcttgaatgaacatttttaatctgtttccacaaattgcagcaagaacctactatttctacaaaagaaaattgtgatcatttcgtctaatagacatattatgattgaagtaaataggattgaactcatcagaattgtttctcgatcgagttagattcgaagctccatttggttgatttgcaggtctgttagcattcaaattgctctgagtgttaggtccaatgttcgccatattagtcgacaatggaggaaatagctctgataccatgttgaatctctttgccattgatgaacaatcaacaaacacagtagcaagcgaaacaaagaagaagagaataagagaaagagaaagaaagatagtgaaagagaagattgaaaacaaagggcaatcttactattcaattaagacagttggcattatatagccaatgattacagctgtagttagttgaaaaaataatagtattagttaaaggaaatcaacaaacaataccgaacataactaaatctctctaaccaacagctaactgaatagacactcttaacactccccactcccttagaaggctgcaagaatttagaaaacgtcttctagctgtggaaatagtaaagccttccctacggtcatttttgacattaaacatctttaagactacctcgttgttgcactggaacaccacagtacaatagccaagctccaccgataagtttgcagccatgcaaagagcgtgcgccccacacaactttggatcagttatatgactcattgtagttttgatggataatttatcaccccattcattcctaatgaccattgccagcatagaattttctgcatttacagtcacatccgaattgccatagatccaggatgttggagggggactgcatgttacaatcggctgcacagagtttgagacaactaaggaatgatccttgattttccccttaattgtcaccattagatggtgcaacagtgttatctcctctcccaccaaactacttccacaatacacacaaagggttgctaccattaattcattgagtgatacgtttggtggtcgattaaaaccttcctataaccatttagtccattctctcaagttccccacttttaggtgccctgtcttgattcccgaacttgtactgtaccataaggcttttgcatagcaacattcgtctccatagaattatcatacaacatacacatattaaagccaatgtctatgaaggtggacaatttacctttggtgaggaaggcatcacggagtagctgccaccataatagcttaaggtgtggatgaagtgtagatttccaaattttcttccatatcggatcaaatcctctttctctaagggaccctttgataagcttacatgctgatcgaatggtgaactccccacttgtttttgcaagccatgtccaactatgatttctcgattcatctggcatatcaatgtccaagatagccttggtatcctcataagcaaaccaacccctcaccatcttcacattccattagttgttgtcaacaataaactgcttcacccaaaccacactagatgttgcactgtttagaggaactggacaacgattcctgtaagggacccaaggatcaaaccagatagaagtactagctccatcgctaatttttctacaaattccactttacgacaatttttggacatctagaattgttttctagatggctgaatgaccagaataattagtcaaaatgaccttaaaagttttttattaactaagtaacctactatttttaaaaatttagctaatctaattttctcttaaacttttatatctcagtgataccctttattattttatatgctttcatgctcttcatctattttttttttaaaaatctctaaaatcatataaaatctcttcaaatctgtagaaaagtaatttatattataagtacatatagataagataaatattgttttcaagagaacgattacattcaaggtaagtgaatgaaccctaattttttaatttcttattttgaatgtaaaaaaaacaataaaaaattgtatttttttttaactttaagattcttgttttttcttatctatatgtgatagaaacaacaataaaaa

SEQ ID NO: 300633 - DNA, 1144 bp, Cannabis indica
gaagcaaattgcgtatgatattagaagcaacgagccagctggagttgtcgtttatccaaatgacactgctgtctcaatcctcacaccacactacagtactacactacacgtcactttattctttttctcttagggtcaaacccgatcatttcgacccgacccgacccgaccgtaccaattaagtaccaacccgtgaggatttagagggttaacaaaaagtgtcatattgatcgagaagatcacaatagcgatcttagctttatcagttcattattatgttgcaccaaaaataaaggaaagcctatcatgcacaaactacttgtgacctggttttacctttttattcttcatttatttaagtcatcttaaaccgaagacaattcaaagaaaaaaaaaacttattaataataataaaagtaggtatgtcattttcattttatgtttgcattttgagactatattgtacatttgtactcaccaatatgaatttgctaccacattaactactatatttatctagccttgttgaccaaaatttccaatacttttggatagattttctatttattattttattgttttaagtactgcaaatgaaattgtatactttctttgtgttggattaaaatcctcaatatgggctcatatgtatattagtgtattgctatttgaagtttggcccaaaataaagtgatcattttagtaattgtgggtcattgggtattaaagtgtcatgggctaaatgtgtagataccctaagcgatatttctaatttattgaggggctaaattagaaatacttaaaattaataacctagctatgaggttataaattggtagtggtccccaagaaacaagagccaatttctattctcatcttcccccatcaagagagaaaattagaaaacctaagtcttgttttcttggaagatcattacccaaaatcaccacaaagattatctctacaagatggattaagatcatcactatctatgaattaaggtacgcttccgccatttgaattcttctctttgaatcaacaaaggtattctttagatctatagttatacacttataattatatgtaatatgtttatctatagaattgaattttgttgttgcatattttatgagtgatatagaaa

SEQ ID NO: 300634 - DNA, 1430 bp, Cannabis indica
catatccctatatatataataaaactattaacaattgagaaaactatttttatcaaagaatataagagggctttatctttatttattttgtagagaggaagctcttcattatatttacagctaggtgttggttggctttctgagatacttttctcgtgaaaaaaacatgcacgcccactttttattattattattatgtttactttatcactaattaatatgaaaaggttccatttttatatttgttaaacttcactcgagggtactcaactaactctcgtagtaatacaattcacttttgcaagggcacaatctttagtttttagtcacatttgagctaaaatattatataaagtagagttatttttcataatcttactttaattaagcataagatattgattattttaatatgtttttacaattcaaatttattaaatataaattaatttaataaaataataaataagtagtacgtaatgcatttgagtaaaatactattaaaaaaatttgtcacaaaagtaaggaaatccttatccattctttattatagggatatatttttaagacttactctctattattttagttaaaaattgtgtttagagagtatattcagatatgctcgctactatacaataatgtatttatgccagttaacgcttatgactgatgcaattacttagttggtaaatttattattgattttacacttgcattgcgctttgcattgggtttaaattaacgcaaaactcttttgcatcggttgtaaattgacgataggtcgcgaaaaaaaaagaaaaaaaaagaatgagcctgaagcccatttaattaaccaaaaccctaaattgatataataggtacattattttaagccaactttgtagaaatgttaataaaatctgtaaacatcattcgaaaactgaccaatcgagatagcaactatatatcgatctcagcctaaaaatcattgtggttattattattttacaataattgtgtatatttaatttacatatatatattgctcaatatctgcgacagttgaaatatgtgcatatcatctgtgtctcaactgcaaattgcaaatatggatggtgacagtgcggtccaacacatctgtcgttagattttgaatcttaacaaaaatcgaaacatgcattaattattaaaaattgtgtattaattgatatatcagccttatcaggcatcgatagctaccatgcatattcataccacaagattttgatttatttaaatgctttttgttccaaatgagttaattagctatagctctatatttatatttatttaatttctacatgatatatagttgtaacgtccccgcttcaagcttccattgggtccttacacccacggactaatggctcttatactctggctgcttcctggattgatgactgacccta

SEQ ID NO: 300635 - DNA, 3252 bp, Cannabis indica
cttatgtaattattcctaatttttaattatgtgggccaatttttggtgggtctggtttacaactgggtttcaaaatgttaaatttcttaaactgaacttggccgagtatgataccgggttacacccaaactggcctggtatgatatctttacactagatttcacccattattttttgaaaccattgagttttttaggtttggattggtcgagtttgtcgagtaagtgaattttcgggtgcaaatattcagccttacttttagaaactcctcttgagaaaattactgccaaaactaacttctcttaaaagagtttagagctaaaagctcttcattaaatatatatatatatatatatatataaatctccttctcaaaaaacaatattatttactacataattattatgttattattaattaacaagttggtttgccaatgtgatattttattagattttttttttcatatatttattagggatttcaaatggcatgtacgtagccaagttagcttataggaatttatagatttttttatcttttttatgtaaggttaatcttgaaatacattatatataatattaaggcgggctaaattcaagcttaaagcccacctaatttaataatattaatagttgccaatttaataattaattttacagctaaagttggtgtgagatcaacatgagacatctaattaaattcattttgaaacgaattattggttattagatttatatcataaataaataaagatttatttaaatgtgaatggtgatggatgtacaggatgtaatgccaaatagcagcagtagtggagtaagtacagcagatcactcaattttctactctcaaaatgggactcccactacaaatcccagcatctcagccaccatcgattcccagtcatcaatttgtggtatacacatatatataattatatcatcaaaatatcacatatatctatcttgtttaaaaaaaaaatcacatatatctatcatatcataattcgtacaatactatgggtccctttagtatactatttcgaaaaattaaaaattattttctgaaaaagttgtactagaaagatgttcacttattaaaaaatttatagtgaaactacaattaaaattaaaaattaaagttgatagaacccaatttttagagcatctttattggagatacaaataagtgatacaaatgtaaaataattcaatttgttaaaaatctactccaatagtatgttaaattaaaatgcaaatatcttacacaagagcatctctaatatgcaaataagtgatgctaatgcaaaatataatttattttattaaaaatctattctaatagtatgctaaattataattgaaaaatttcacataatcaaaagttatccaaatttgcacctagaacgaatttttttttcaaaaatattatgtttttttccgtactttttttattgggtactatattaaattttttctgttgttgtattgttgtttcaatgttgtttttaattgttatgttttgtgttttacggttattttataaaaagacagtaattttgtaaaagttaatttaaattccagtgtggtaaagtgaaatcaattacaaaataattaagagtggtaataactaataactaatttgattatactattattagtgattcttgtatggatgaaattaagatttgaattgagagaatttcagttgggaggcgaagcattaataagggaatcaaagaagatgatgatgagcaagcaataggaggaggaggaggaacaagtggttcctctcatgaacaatcagatgatgatgatattgacattgaagctggtccatgtgaacagagcacagacgccattgttattaatcatgacgttaaacgtattaggaggtctttttctccatcctttttatttatataaaatataatattaactaatcttattataaccaaccattaagtttttatatatataggatggtgtcgaatcgggagtctgctcggcgatcaagaagaagaaaacaggctcatttggcagatcttgaaatacaggttaaagttattaattattatgatgatactaatcttaattaattaaacttaattaatagtaatttatatggatgatgcaggttgagcaattgagaggagaaaattcatgtttgtacaaacaacttactaatgcttctcaacaataccgagaagctgatacagataacagagtccttaaatctgatgtggaagcaatgagagccagggtacatatatatatatatacataactactttataattaatttcatatttgatatttcatttcttaattaatttaattatattatataatacaggtgaagttagcagaagacatggttgctcgtggatcattaacatcaagcttaaatcaattgattcaaacccatctaaacactagtactactactgctaatacaacacatttcaataataatagtaataatgtgtcaccaacaatcacactagtccaagcaccgccaatgatgaatagtgactctgttagctgtgtctctgaaatttggccttaatttattaatatgctattttcttacatatatgtgtgttttgtattgtaatttctataattatgtaacctctgatcttcttaaagattctattctattctaattagcaagtacttttaattttataacaaaaacattttggggtttggccatatgattcatcatcagatctacactatacaaccttggtggtcaccttttcttgatacaagtttagatattttgtatttaacaatcaatattaataattaattaagtataggaagtaggtaaatcgtgattggataccccaattaaattagtaccaaaaccgcgtcttatatttatataattggcccttgatgatgagatgatacgatctgtatttagttagtatgatcttactagttttatatatattataaatatgttgctgacttggtgtcacatatatatatataactaaattattagttaaataagtcgtctctatctaatatcgttggaaatgaaaatataaaatgagagacctaggctaacagcaaaggagtgtgtgcattaatattttttaattaagcatcatgaaattattctcagctcagggaaaggaggagatagattaaagtaccatcttgatttatatagaagtagaacaccaagtcaaaaaaaaacccttttttcagaaaccaactcaaatttttgatt

SEQ ID NO: 300636 - DNA, 2642 bp, Cannabis indica
gaatcttattcttgaaagttcgagtttgattcttgaaatgttgaagataagtcttgattggttgaatgtgattcttgaactctaaaccttgagctctgacaccatttgtggtgaatcctcaccctcaaaacagtttgttatagcagtaacaatgtccaagaaacacaattcaaaactaaaactaatcacaaaatcaaaacttgaacttaattgaaaaatagacaaagaaaacttagcttgataatgaatgaatgatggatctttattcaataggaataatcagtagtacacaatagaatgagcccaagattacaacttaacatagtaaagtattacaaagaaatgtcacattgagggaattcacttcaagagtgatactcccttttacatccctccacacacactcattatgatcttagactctctctctaaactgaatctaaagtatgagcttggagattagagaacggatattaaaactcaaaactcctttaaaagagtagagacacatttatttataattattggtggggtcccctttaagttggtattaaagccaacagttataaataacaacaactttcttcagattcatctaatgagcatatagatggacctactcacttgataggttaaatgagtttaatcccaacaagggagtttaggtgttgttggagtggtggtttaggatgactttaatggtatcctggctttgtttgcttcttagttaccattcctttttgtgcttcatggtgaattgtttgcggccttttgtgttttagagatgttgatgagattgggaatcaatgatgctgaccttgtcactgattgccaaagggtggttgttgctgttgagtcttctatagctcttcactggagtttgtccatgttattttctaagttcttaggtctgttgtctgttacttctgttctacctttttgggtgcctagatctcagaattattcggttcatgctctggctagatggggtttagatcactattgtaaaagcttccttaatttttgagaggtgagtccccatgtgttcactaacatcttatcgtcttttggataaaatgtttttgtctttttagcagaaaaaaaaaattgagtaattgtttaaactttatttttcggtactataaactattaagaattttctaaaaatttacaaatagctctaaataactacaatatatacgatcataaaaaaattaaactaacaatttgttctctctacaacaaaaattttcaaaacacatatcatagttacaataaataaatatttttaataatttacaatgtcaaaatcaaagtttaaatattatatttttcatctttatttttttccattctctcaaaaaaaaaatatatattcttcataaatataaaaataaataaatatgcatacaatttagtttaaattctaattttaacactaaattatttaaaagtgccatcgtggtagtacataaaaaagttaaaaaaatgccctactatacctcatcctataaaataaatataactattttttttttttttaaaaaaaaaatatatcattgagtaaaagaaataagagttttttcattttaatactttaaaataatttatttttatacttttacagaattttacatgaaaatcccatagaaattaacgaagtaacataaatcgcaactaaaaatttatataacaatccacatataaactattaaaaaactcaccggagcaacccaaactataaatttaaaaaaaatgtatagaataatttcttaaagaaatataaccaattttttacaaaataataattaaattccagtgatattgagaggagtttaatgactttattaaatgacacataaaataaaataaagtgaaaaataaaaaatcaacattggccggccacttatgcttttatcttttcctaatttatatttacttttggtatggtgggagtgcccaaatgaaataataataaatattttatgggacactctttgtttatttatttagtttgaaatgtctctttatttatttccaatattaataaatgacaatagaaattttgttatttctttttccatgcagaaaaggagatatataataactatgaaagagaaaaataaaaatacataaagttttaaatgaaaaaatggttgcttttttagtataacttgtcttttagtatggcgtgcgaatgttggaagcatggaagcaaagcaaagaggtttgagtatggcggcaaacccatcactcttatcataaaaatcccatatcaaacccatattcactcacttactccaaaaacaacagagactcaaaaaattaaaaataaaaactaagatatgggttttaacgtgtcctaaaatctgagaaaacccacctaaaaagaaatcatttttattatgtttggagaatcaaaaagtttgtctgtagatttggggtgtgttttgggtttttgggtttatgtctgaatcccaaataaggaaagtgagttggttttagttataaagtttgagtctttacttgtttttatcattgttattacgggttttaatgtaagataattaataatggataactttggcttcacaaacaaggaagaagacaacaacaacaacaacaattattattattattat

SEQ ID NO: 300637 - DNA, 8363 bp, Cannabis indica
acacaataatacatgattttttttgtgttattgtgatatttgaattattagtcgaagtaaataagaatgtcagcaaaaatatctatactactataccacacaataacactgatttttttgtattttttttttattttaagcgtttatatattacaactatgttttacctgaaactcgaactcaagacctccaacacacacacctacctatggccacttgagctagcctcaagtggttgatttttttgtaatattataatgacttgcaaccaaacccaaaaatgaaaccgttgtagtcaaatcttttatgtttagatttcatatcatttaaatgctttcatttcatagctcattggtgacatgcatgtagtagtgttgtaattctaaatttggttttttttttttccctatcttttgttggataaattataaaattatgactttttcttttattacaaaaattaaaatatattttttttccttagtggatcgtggtgttgtgactttttcttttatcatatacataaatcatcacttacaaaagaaaataaaaatgaatttgataaatattaccacaattcaatggttacatatagaggtttttataaactaattaatccaatctaattcatatcatccaatctaatttaatttataaagtgtgaatatttatactttacagattagattagattcaaaaatttaaaatctatacttatacaaattgacaagtaaaagtagaagtttgatgtgtgttaatttacaagtgaaagaacactaataaatattaatcaataatttgcaagactaatcagtaaattgattttggatttctaaagtttcaaaaatatttttgctgctgattaagtaattaataaatttcaacttttagctctaaattatcagttctattagttttcttagccaaacaaggcctaagttaagtagtttaatgtttaactaattaaaaccaagataatccttcaaacaagctgtctaatattattggtgttcaaatagaatttttaataccaaatataatacacagatatctatatatataattatctgaaaattatctttatttaacaatttacttcttatccatttaatattaagaaaacgagaataactaacctaactcctctagaatctccaattcagctcatttgtttccggataatttttcttttttaataactaatcctttatccattattttatatacataaaaataaagtaaaataatagccaattaaaatatttttacagtcatcataagtataatttagtaattttatacttcttttcataaaaaagaggttttaaattcaaatctctcgcaatattaattcatgaaagtaaaatttaattgcttgtgattgtacattcaaatttttgttaaattactttaattgaagtaaattatttagttgaacacaaaactcaaataaaaaatggtgaaaagttagtttaaagttattaatatataaattcatattattaaatgttgaaagtatgtaagattaatcattaatcttattagaaaattttatggtgtaatcaccgatatgttcttatttgtttcagtatttaagaaaatattttaatctattttttttttcatagttatatattgtagttatttaaaaatatcttacaaaattttaaaaaatttatggtatgttcggtaaatttgttttttttttttcagtttagattaacaaaattttgtagtttgttttttggtttttgttaattaatcaaaaaacttgtttttcaattgctcccaacaatatcttaatgcacaaaaaataagatttaagcagtctactatacacatatttttattatatgaaataaattatttaaataatataatttatattataaattatttaaaattttacaaattggttataaaataaatacaatatacacaactataaaaaatatataaaaaaaaattctgataaatatccaaaaaaattacttccaaattccaaacttatttttattaaagggataaatttgttataccaaacaggtcctaaatccaaaacgtcatatgaccctgtctctgatctgtcacttggggccatttaaataaataaataaataaataaaagtcaattattttatttttattattcctttcatattcatattaatattatttctccatatttagtggttgccttttgccaccttcattcttttttttttttttttcttcacagaaaactcttcttactttccgtcactttctcgggaatgtaatgtgtttttctcccaactgatatttttttcttacctgtttttaatttatttcttcttcttctctctgtagtaaagaaaaggtcttttctgttctatctcgttaaaaaaaaaaattgatcttgctgagaatggacgttgacctctgccaatacagcgatttacacccaccgagagcgtgggtattgattgacttgaaagtttagggttcatcaattattggtctttcggcatttttggtgaattgggttttttttttaagtaactaacagcgattttggtatctgggtctgaagtgtgtgtgagagaattgaggggtttaagattgttgatggatacgcatggtaaggattcaaatggctgcaaagatagcccttcagtagattctaaggctgagaaactccttaatggagtagatgatgatagtgattgcaactctttgttgcctccccggagaggtgggatgtctagaaaatcagataaagtacgacgaaaagttcagtggaatgataggaatggggataagcttgctgaggtggtcgaatttgaaccaaggtaatcgatcaatcataaatctttcattcaatttcttcattatgtgcttgttttgtttttacttatttctaattttattatgagctgacttaattgtttgaaacatgattttggggatcgaattgggtatttttttctctaaatagtgcatctatgatgaagttttatactttcagttttattgttttctctttcaaaattaagaaaaaatgaaaattgtaaggactgaataaatgtgcatttaaagatcttgtatggcaggtaaagctttggacaaactgctaatgtggtttactttgtttttatttacaaatagtatgtttttgagtaatgttgatttaccaaattatagtccttttttacttgatctggtttacaattgtaagcttttttcaatgatttttaagctataaatgataacagtccaatttgctttgtgcttacacaatagtatgtggattgattgctcaaatcacttattaggtgaaaaaaaaatagtgggagtagttttcattctgttcaagtttgaaatttgattcactttcctaatacctggctttccatttttgggttctttgtttgagaggcaatttctaatattctgataaagtggttgtagttggtatatttgtggtgaaaagtggcccaaaaaaagtttctaggaatttagtggtgaaattaagggcagcctatggtttcataaggcatgggtctttcaaagggcatcagaagaatttggaatggtatctggttttggatgttggatgttggaattgaagaaagtgcctatgtcagatttttgacttggtgctggtttaggttcaaggttttgaaactttctaataagaatgtgggtggacacaagatcattttagagtcctggcttgtaaatttgctggataatactgataaacttataattggttatggagatggggttaatggcaagtatcaaaatttgaaggcttttgctcagctgaatgccttttaattttccctttgaactagaaagaaataagctattaccatctcctttctagaaagctttctgcttcccctgaatatataatgaatatcttatgtttatagcttttagataattgtgactatactgaagaatatgctcatagaatcttagagttacaattgcactctgacccacttaactaattttctagataggctacttagatagaatttaacatacactggacttgtacttcagtctttttgtgaaattttattactttggtagaaagtatcgtatgataaatagtaaatgacatgtttcaggagtttattattaatgacatgactagttatgttactgtcttagcaaaaaaaagagacagtcacataactatatacaattctaatagtttccatcactatggtggaataggtattccttaaaaaaaattagaggaaagaccattccaatacacaaatatatatttgtttatgttaaatttaattcactctatttctgtttttattctcattaccattctattctattgatttcattactcaaccaaacattacatgttgaaaagttgagagttgtgtacacattcttcatgaaatgcaaaaatgtggactgctaatgaaaattttgaaaaaatggatatattatgttatatatatacatgctggtgtgcataggaaactggtgagaaaattttattctgatatgtctagaaatcatttatcttgataaatgtaggaggtgattattccctggcatgatttagcttaagtattgaaacattctattgatcttatgtcagattatgatttggctctcaccactattgttctcttggtgtattgcagcgatgtaagtgactctgaggacgaggaatcggattcttgcatatgcatcataatgtagataacatttcacttcaatacaccagtttatcaggaaattcagcttatcaaacaatcaggcatgctctacaatctacaatctgtttcgacgagtttttttgttttaattatacatagtggcctctcgaagtatagacaacaaagacccgaataggaagacaacattgttcagatttgcatccaatttcagttatattcttgcagggagattcttccaaggtatcaaaacagacaaggaagaagacaagaatgtcttccctccatgtgtaacatatttactgataatgagctctttccctgtttcttttactacttatctcggtatgtattttagtatactataagctcgttcgccataatacttcgatatatatgtttccctccctttcctccattgcctcagcaccagaaaacacaaaatgtctatatatatatttcactgtatatgagtttcaattttgtgtaccaattattgttgtgttcccagttgagactgtttggccatttaagtaatatattcaatccaacagattatttatgccatatagtttggtgtagaaagtcaattatttatgtttggacactactgaaaaagaaaaatagtactttgtttgtttccatctttgcaatacacaaattttataattacacatgtagtaaaaaacttgttcaatattcttcagtctcttatccaagcaataagtctccaaaagacagtgaaaaatgctctctttcacacagacaacttcacaaccaaccaaaacctatcattcacgagacaatcagaagatcattaaagacaaaaacacagaaaaataaaagcacaaaacacaagcaatccaaacccataattctcactcccctgttggaaagttgttccaacaatatgacaaaatatcaaactcaacttgctcttttccaaagattctttctttcctttttgtatctgaattagctagctgtctttctttgtcctttgaaaaaattcacactagatttaggctaagtagtgagtacctagataacaaacaacactatgcagaccccccaaccccaagaacttgagctttgtagtgcctgtttctttttctttttctatttttgtgtaagataaaatgtccagaaagaaattcttgaagaagggtttatattgtatcaatcaaactgattgaatagttttagaagttaaccaacttgaaaggctggaatcaacagcaatttcttgcaaaagaggcttggattggtaatcgaaaggctgcttctgctgctgctgcgataaacaagaagaacttgattgtcgaaataattgaatgttctccttcctttgttgcttaagtggtgctgtttttgccttggcttctctccattgattgatattctcaactggttttagaacagaatgaagtgatgtagtagtactattgattttctcaccatctgtattttcacaagaaataactttcttctctgaacttgtatggcttactctttcgatatcaatatcatcatcgccatcataatcatcgtcttcctcatcatcatcattgtaataatcatcatcataaagatcactgtcctcaaaagccatatccatatcctcctcttcctcttcatcataaaagtcactgcagtttcggtatctgtagtttaagttaaaagaaccctttgaagtagacaagatttccattttctcatcatgaatctcttcttctttctccaagaaattatcataagatgttgagactggttcataagtctgcacatttagattaaatctaactttctttctgattttcgagctcggtttttgttcttgttgttgctccttagtcttgtgcctataaaaacaacaaaacacaatttataacaaaagagagaaagaaagaatctcacatctttttcacattataatcttcataaacaaccattaacctcaccttggttcaaaatctcctacagtaatagggttcttatgagaagaactaagtctaactatagttatggatgatgaatcaagtggcttgtaactcccatatctctgcaacaacaacaaaagagattatattcaataaaataaataaagggtttaaattcaatatgggaattaactaagaaaaacacaaactttacttgaattgagttgagttagtattactaccttatgagctggttttctaatctttcttttatgggaaaacccaaaacaagcaaggaaacaccccattggaacacaacacacaaagaaagagagaaagacagagacaagtatctcttatggttcaaatttcaaaggttgttgttgttgtacattttcatggtggtggtagagagacttgaagaaataattatagtttaatagaaaagtaatattatatggcttaaaaattacatttaaagcaaaaagagagtaaaagagaaaatgggttttgtcatgaagaaatttaaacccgttttggctccaacggttgttaaaattagagagtgacgttgggactttatttatttatttatttttattataattatgattgtatatatattaaataaataaaaaataaagggtagggacaacataaacagctttgtctgtcaactgaatttttgcaaaattgcggctctgtcttattttaatttttattattttttttgttggaatttatgtaagacagagaagttaatttttgattccatactaaatttatccgttgggttggccagctcataagtttagttataagttcattatttatatatttaagtgttgatggttacattaaatgttcattaaaaataataatttgaaagtttatggaagagtgtctatgacccaaatgggatatttagtgggacagctttattagaggacaacatttaaaagtattttaaggtcacatgcaaaaatatattaactaaaacataacttacttccactcaattggttttgtcaagttaattattataaaaataaaacatttacagatcaataattaaattggattttttacagctgtaataatttttgaatgatataagaaaaccgctcctcaaaaaagtgaaaaatggaaaggcaacatataaatgattgagtaatttaaaagtgaggatgtggtgacactaaaacatgaattttgagtaacaaacaataactatatcaaaatgaggtttactatttgaaatagtctcaccttgttattgtaagaaaagataatattttacataagataagatgcatttttcaatttgatagttaattagttttgaaataaaatttcatatttgttatcaaatacttactttattttacttttgtctagcgcacttttaaattctaacgtggtatcaaagcaattaaaaagcttctattttttcacatttgagatattttagtcaatgtgcctcaccttttagtagaattctttcaaatgtcatgtttagtcttgtggtctcttaaatgtcgttcattacacttacacttttcaagaccaaacgttaagagagtgtatttaaaatagtctcacattgctactgtatataaatataatattatatataagatgaaagggatacttctcacattgtcaattagttttggaaaaataattgagacacacttcatacacacaatgatgtgtaattaat

SEQ ID NO: 300638 - DNA, 1876 bp, Cannabis indica
catatgacgacttggtcgtcatttcccacatgataatacgcaggtgatatcaaaagaaaaacgcgtgctttcataccccaagatgaatgaatgaatgaatgagagtcatttatttgttttttttaagtttattttcttctccaaactagtcaaagtcaaataatcatatgtagagagaaatatgattaaagtattttattttcttcatcacctcttttagtttgataatcctggggtatttaaaaaaaataataataacaaattcattagaatggtattctagcttgtatatcatcatatatcagcagtttcttttattgaatgtgtctttttttttcctcagtcctctcaattccagctcctcatttgtggtttatctggaaatccactcatatcttttttttatgaattagttgtattaatgttttgatcagttaattcggtgttaattaacatgagaatgggatatttatatcggtttgggtggagagagatatgataaaattaagagagcattaattatattttagtgaaaagaaaagaaaaggtgatgtggagaagaaaagaaagttggagttggagagggttctctttcaccatctctgtctttcctttccttttcacaactttatttcaattttgcattgttaatgggaatattgaagattgaaagacaggcatttaggaccacagaataataagtcatctattttcgggaaaacttctcatattaacatttatcactgtttaagggaatttttaccatttatagtaatattccaaacacttcataatctaaattggattcgatgtagaaatccaatataactttttatttacacaggtcggtccctcttctttttcacacaaattaatttagcctcaagtcaagcaatagtaaatgaaacaagagtactagagccacacacatcgatctgcctgtaaagagaaggacagattgtgatatataaatatatatacaaaaaaatattgatcgaatttcatggaacaaaacatgctttttcactttgttttttgttagattggattctcctaataaaccaaaccaaaccaagtgtaataccaatctcagacaagttaccattaatcctcaaaacatgcgtggtcggcctgtcttgccaaacctcattttcaaatcttgttcatcatcaagattctagggtcacaaattaccaaggttttattattttcaattcactactgaatactgatcatcatcctatgcaataagatttggcaacccatcattagagtatcttgacacttgtccatagttgaccttttttattattttaattagattcaattattaaggaaatgttttatagttgtggaaaatgttacgtaataatattagatattattcttataattaactcaagagaatacttaagcttgcttgagttgtaagtttgactgccattctttaattatgtatattttatacacatcacatgtattctccaacttctttaaataattaattaatattttttttttgaaagttgaaaagagttttaagtacttctttagatgattacttaattagctaggtttcaaattattaaaagttaatttgcaattagtggatatatatatctaagcatgtgaaaggaaaaatcgtagaattatatatagagggattattggtgtagttctcatgacttttcatatatatacaaacaggagtggttatgtgtttgtttacatgtaataatttggtattaatcatgaactcacttcttttcgtcttggcaagacaatataataccaccaagaacaggggcggacccacattgtagcgagggagggcagtcgccccccctgaaaaaaaaaatcgagaaaaaaatgtata

SEQ ID NO: 300639 - DNA, 1397 bp, Cannabis indica
aaataaataaaaagaaaaaaagagattcccttctttagctttttgagtctttataagcaacgctaaaccacttgagatctcccccttttcttcttccttcttcttcttctttcttcctccattgttgacttgcttgagcttagttttctttctcaaaaatgggtttgtttgcggatgatctaacttcaagcgcaattgttactcatatgttatacaaagcagctctgataattgcagtaacgagatggattttagcttgggcaatcagcatcagaaacaaaattcaggaatattcttccagaaaccctaatttcttaggaactgaaaattcacgatttccatctccgcctccgtgttctccttcgattgaattgatcagagatagtctgactctgaccacgttcggcgaaatgacggagagattcccgaaccaggaaggccattgggacacgtgcgccgtgtgcttgaaccaattgaacacgaacgacgaggtgagagagctgaggaactgccgccatgtcttccaccgagaatgcctcgaccggtggctagatcacgaccagcaccaccaccaagagtctcatcggaagtcgtgcccgctttgccgtgcgccgttcctgactcaggaacagtcgcagagattgaccatgggcgtcgcacctcagcccagctgggccgtcgagcgcctcctctacctttttggggatgatttgctgttgtgactcgttcatggatttcatcgagtcgttctctactctactactgaattttctctttcttaaacctttttttttttctttttaaggatcgttttagtgtaaaatctgtgaatattattatttaatattaaatattttattggattgatctgtttctctgctcagttttattatgactcgatctactgtaattttgcactctgtgttgttgttcttatctagacttaattagcttagagagttttcttaatttgtgtatttatttcagttattgtaagactaatcattatttcttttaaataaattgactattatttatatactccttttctgtgcacatgggtgtagaagctactatcaatctttgaaaaattcaattaaaggaaaatagcttacggcataattttataattttatttttgaaagggaaaaaaatactaactatacattgattaatgctaatcaaaacttgcactgggtttccagaaagtcatcaaatcctaaccgtcccgatctaataaaatcggacatctaattataattggattggatactgtaagtgtcatgttttgtgtggcaaattagatattgcttttgttcagtatttgttgtctctaacatctgttctggagttagttgcatctgtttttcactaatatcattttagtgccatgtcag

SEQ ID NO: 300640 - DNA, 1309 bp, Cannabis indica
aaaggcatagatatattaaaattaaattagagttagttattacataaaaggtgtactggtatggaagaatgatctaccatttacattactcgcaaaagcctactttatcacattttgaactgtaaaattacacaatttagaaataaacgaaaaattagaacaatttaaaaggtttgagacatttatattgaatagaaaataaaaacaccatttacaaatatatctctcctcttgtttcttcttcttttagaatgtaattgtcattttttattttattaatttatttattttaatttagaattattgaataagttttttttaatttccccttgaagctaccttggattctcattctaccatttatcaccagatggtaagtggttccctttagacaagtcattatccacatgataaatctagagggaaaacaaagcttcctaagtaaatcttccacaaactctcagtcaaccgtatcataagccttgctaagatcaattttcatgatgcatcttacagagacattcttcctaatataaccctttagcagatcctaaaaaatcatgatgttatgggccaacagtctattcttaatgaacgcactttggttatgcactgacaatcgagggaagcacttctgaaagtctagaatagatcctcttcgaaatgcatttgtagacagtgttacaataggcaataggtctgcaatccttagctgaagtaggattagcgactttggggaaaagaaataacagtctcgtttaaggttttaggcaacttgccattaacaaataaattcaagaccgctgtaaagacattattgtcaattttactccataaatccttgtaaaacccagactcgaacccatccaatcctgggctcttagtagagtgaatgctgaaaagagctttcttgacatctcctttattaaaaggcttaatcaagtaaataatataaatcatttgcaagcaaaacaataaattaaaataaaatacatgttattacccaataaatcaggaaagatgattcttgtacaacggtaaacaacaacgaaatttcatattttataattatcaatttatgatttaattaatcaactaattaaatacaatataataagggaatttttcaattttatacagaaattataaaataattatacaaatattatcaaccaaattaatacgtatataaagttatctctaccgaattataaaaaataaacccaccgaataaaatagaacaaattgtgggctggttgcatgtagacagggttggtacattagtcggtttagtcggtttatactacat

SEQ ID NO: 300641 - DNA, 1749 bp, Cannabis indica
ttattgcaatttttttttctttctttttttttttttttttcttggaagcaattattgcaattgaaaaatcatcatacaaagttgtagaaaagataaaagttgaaataaatttaccgtcaaaagataaaatagaaaaaaaagaaagaatatgttgtcgaagaaaaaagtatttgcagtgaaaagaattaagtttgaaaagacttggttgattgtatatcctctttcactgtatgtataatcccatctaatctattattaatccaagtaatgatgaagcacatagtccaaagcaaactatatagtatgtatacatatttttctactacttctacttgtttgtctagtgaccatttttgtacaaactccaaagctacctagctagcagacacctcatgctctatctcatctttcgtactctgtcttgtctttttcaacttcaagttggtcactgccgacggcttgtcgcacgtgtgtgtgctcgatcttcccacgtgtgcatgaccccctttttaatgacacacttcattatctacactactagtatctatcctctattattaccttttccgccgttcattttgaaatcctactgcatagatcatgtgatccgatgtagctaggaaaactcgatcaatggtcacaattgctccatgtgtcggcaagactttaatttgtgaatttgaaacgtggtctcatgactcttcgcttgcttagatcaaatgagagaatagaaatgagtattcagattgaatatatgaacctgttattgatcaatagagagacaactctcgatgtgctatacaagaatgaccgatgaaacacttagataatatttaataacgaagatagtataaaccattcaaattacactgcattacatcatatttttgccgtgtaatttttacagtttcaaaatctcgcagttagattatagtttgagaaattacaaaaattgcacgtacaatttgatttgaaaaaaagattataacccgtaccacctgcactactgcaaatactcttaattctgaattattatgaacctgccactttgcttagccagtagagcttagttgaacaaggttcgattaattacgaaatcccattccattatcactcttatgtaagtacaatttatcccaacaacacccatgctttttacgtttatcattatcacctccccaccaaaacttattagcacaaacgatttctttaatcaatgcggcgggaagactatggatttctttaaggaattattaaatggaaagtacacattaatactttatttacaaaattacttttataaggtgtggacaatatttatatatcttttatgtattatttttaattatcaaaatacctcttacactatcacttacacaattagacgatggttgctgggtggttggccaaaagttgtatcagatgaaagtttcaatcaaacaaagaatgctgggtggttgcaaggtggttggccgaaggttgcatcaggcgaaagttactgggtggttggtcgaaagttgcatcagacgaaggtttcaatcagacaaaaataactgttagcaaaatattcatgcaactgtaatgaaactgttatgaaacattaaagatcaaaacagtgtttctacttacgtaactctatctacatgcctcttcatgatttaatatgaacaaattcaccattagaaatttgaaaaacaacaaaaatacaccaggataaacattttacgatagtattgatgtaattttttt

SEQ ID NO: 300642 - DNA, 1668 bp, Cannabis indica
aaatcaagcaatttgcaccaagcttggtttaaaaataactaggagaagaaaaataccggtgcagaaaactctaaagagtttcttgttctgtgctgcagttttaagaacttccagaacaactcttgagaaaccatgaaccaaaatagtacaaccatcaaagataaagtcttgactaagcatcgcaatgattctacgtgcctgaacattggaaaaattgcatacacattgaatattttaaaaaacaaaaaaataagcctcgacttcaaagagctgaaactgacaaacataccttacaggatatctccccaaacttctcagcacgctcaattaaacgagacttagctgaattgaattcctcatattccagagctgaagttcgagttacatatctcatgaaaagatcacagcctgctgtcagggagatagaggtcgtgtctgatgactgtaaacacatatgcaacaaaagattacttaggacaaaaatactactaactgacaagaatcatagagttccatctaaaaattaattggtgatgagtgaagtagtccatcttcttatgtatggcttaacatttttacacttaatctaagtgggaggatgctaaccaatactaactactacatcacaaaatatgtatactatatctatagatatacaaatgtattgtgtatatgtagatcatcaacatgatatactacatgggttgatccctgcattcgttttctggcttctgatagatcatcaagcatctatagccacgttccatggtgtaaaacttttcctttaaacttaaatttcaagtgcaggattggatacagagtccttttcttttccatctttaacttctgaaatacatagtttggcgtttaacttatctaacccaaaggcttccctcaatctattttgatatcggcatactgccaaagcaatcaatttattcaagatcactaacaagctttcaaccaaatcatctttctcaatattcatcgagaaaaattcttctaatgctcaaatgtcctacaccttttcgcaacacatccgagtgtgaccaaaattttgcaaagggcttcttgtagaggaaacccaagaggcaattgtacttcgtagccgacatttttaatatggttaccaaataatagtgtatgtatataaacatcagtaagttcaatactcagctcaacacaatcacagttgaagttgatcctaatacccaattccaataaaactaaccctaaaaaaaattaaccttcagaaaaacaaatttaagaaagttagagcgaggagattagaaatgtactgactttaagagagtcggaggccttcttcagctcaatttcaagttccatcatggtggtagcctcgctagccctgatgacagccgccaaggctcgaatcgccgcaacagcctcagccaaatccggctgcttccgccaattgttaaactcgtcgataacactgaaggtctttccgggattggaggcaatcgggagttcgggctccttaggggcttggtcatcggataagcggccaacagctgcttgtgcttgggccagccaatcgctagtgacaactgcgtgatgggcagccctggtctggtagtaggcggaaatcttggggttagagttagggttttggaagttgtcagccatggatgaagggggaggcgg

SEQ ID NO: 300643 - DNA, 3371 bp, Cannabis indica
tatatatatatttatataaatgtcttccttatgatggttttgagaaataccacaaaacacaatagggtgtccaagagctttgtatcaatattggtgtaaaataacttatgggtgttgtttaaatgtcataattaattaatcaaaatttgagttattattattagatcacattattcttttgattattatgaattaatattaattaattaattttataaatatttcagttggtggatcatggagtgagccctttactaatggagaatgtaaaatcaagaattaaagaatttttcaatatgccaatagaagagaaaaataagtttaggcaacaaagtggggaattggagggattagggcaagcttttgtagtgtgtgaagagcaaaagcttgattgggcagatatgttctatattgtcactcaaccaaatcacttgagaaaatctcatttgttacccaacttacctctccctttcaggtatacctaaaccctaattcaattattgattttattgacttaagtactttcaatataaatatattatcacaaaaatgttaatcaatcaagtaaatatattagttatttttcaatgatttggaatcactatttactacccatgaaacagctacatttagtgacaattttttagctacaatataaattttttgtgactaaatgtgacttttaatcacaacaaaaaattatttatgactaaaatatagtatttaaatacaagttgtcactaatttagttttaatcagaacaagtattgtgattaaaaatattttagtcacaataaactgtaatttctataactaatactttttgtcctatttttttatttttaatcacaagttttgttgatgactaaaagtaagattaatttttgtagtgattttacatcgtattacatgttgttaattatataattttaattcctatggtttctttgataatattcattatatggtgaagaataaatagtatttttgtctcttgaactttgacacttgtataattttgctccatggattagatttttgcaaaaacaatgtccaagtttagaagtaattgtaaatttgtccatttggttgcatgtcatgataaagcaatcatgtagtgagtagaaagcttacctatatttaaaataaaataataataatggaaaaaaaatatttaaccatgtagcaaaatattttaataatttcatattaaaattcgtgacatttaatcacgtaaaaaaattatacatgattaaaaaattatcagaaagaaaataattacactattctaagttcgttcctagacataggcggtttaggtttgtatctaggagctacttattttagtggcttaattttttttttcaaattacataattttttattaattttgagaaattatatttttttttttaaaataaagggtctaaaaatatttttttttctatagcccactaaaattcagaccgacttagtatactgaaaatctaatatggatctctaaaaaaaaaaatataatatatatataattcatttgtgatttggccccactacaataagttaaatatgtcccccatataattaagataagatataatatgttaaatttttatgtccatattagacccaccataatatatattttattcttaaagataacaaattgaacaacacatgcattatgcatgtacataaatcttgattaaaatcaaatgagtggttgttttagactataagaagatcactaaagaaaaccctacctttaagtaataattgctactaaaaaataatattttattactaatttttacaaattttattgtaatataataagtacttattatgtctaaaaaagatatgaataatagtgtatcttaccgatattaattgaacgttgctaaattgtgaaaataaaaataaattttaatgtttagcaatttgactattaattaacatttatttatttagttatatttttttggaaattaaactacattactcgaaactcatcaaaaaaatactttagtatatgattttgatgtgatctttggtcaagttatttacctttattattgttattattttgataaatcagaaaattcattcaactcatcaaaatactacatcttagcagcatgcctaaatatacattttctttctatacaacttgtattaaattattatatcaaactttttgtatagagaaaccctagaagcttactcaacggagctagagaatgttgccaagaaagtgtttgatttcatgggaaaagccctaggaatggagccaaatgaaatgaatgaggtacttggagaagggtggcaatctatgaggatgaactactaccctccatgtcctcagccggagcttgtgatcggcctgaaccctcattcagaccccgtaggtctcaccattcttcttcaaatcaacgaaacggaaggtctacaaataaaaaaagatggggtttggatccctattaaaccacttcctaatgcttttattgtcaatattggagacatgatagaggtacaaaattttatgtttgcctattttaattaggtcatttgagaaggaaaaaaatatatatttttgcactcattatcattttgtgtatggctgtgtgtagattataacaaatggaatttatcgtagtattgagcatcgagcaacagttaatgcagaaaaagagaggctttctatagctacattttatggtccgagcttgtatggtgacctaggtccaacaccaagtcttgtgacaccaaagacaccagtgcaatttaagagagttaatgttgtggactactttaagggtgtgtttgcacgcgaacttcgcggtaaatcctatattgatttaatgagagttgattccagagaagaaggtaaaaatgatcttgtataggtcgacgaaaagcttataaagatgtcgaataagggaatgttttgtgtttttatatggaaaattattaatcacgtttggaaagtcacaatgtaattgaaagtaattagacaatttaaatgtttgtttgaccatgtaattatattgtaagtgtgtaatttgaggtaattaaaagattctcgttagactcttccaatgagaattgggcgtaagtactaaaaggtcactatgtaactggaattaagtataattcgaagtaactacaagatttggcatatttgtacagttaggtaattatacagtaaccatataattgaaagtaattgaagttatctatgaaaattttatgtaattacactgtgaagttacaaaatattactattttttagcttggtaagttattagaggaaattacactctataccctttttataatgtcctcttttatttttaccctcttttttaaagtct

SEQ ID NO: 300644 - DNA, 4613 bp, Cannabis indica
aaaataaataaataaaggacccaatatattttttctttaatgcctttaattttttttttttgaggaaattacacaatatatgagaaaattataagagtttatttttatagcataaataaataataccatggggttatgagtttttttattttttttttacatttctatgaggttttttatgccatatttttgtaaaaaaaaaatggaaatcttatatttgtaaaacaataaataaatttgataaaaattgtaataataagtttcatcgaaaaagttactagcgttggatttcaccagaaaagtcaccggtgctggaaaagttattgtcgccagaaaagtcatcgttgtcggaaaagtcaccgtccccgaaaaaattactggaaaagtcaccagatgtagatgtctcaggtataaataaaaataaaacccgttctataacataatgaataaaaaaaataacacaaaataactcaaaccagttataatttaaatataactagttctttgacataatgaataaaaacaaataacagaaagtaactcaaaccatttataattaaaatagaatagattctataacagtgttatatgaataaaaataaataacacgaaataactcaaacttgttataactaaaatagaaccggttgaatagttttattaaagcatacatataaaattaaagaaaaattctaaattaatacataaaattaaaaaggcaatacttctgaaacatagaaggcatttataagcagagaagaaattgataacaacaatgaataaaaaaaaaatgcaaattagaagtagcaattcatctatatcactaaaccatttctcatcatcagaacaaataacataaaaaaatagtaataaaaaaattatgatgctttcactagaacatttccattctttgaggaactggagtctttataacttgtagaatttggacaacttctgccattgaaggcctacttgaaggcacctgagaagtacatactaaagccaatttaagaacaggtaagacctcatcttcagggtaatgtccaatacttgcatcaacacaatccaaaacattcccttcttcaagcaaaactcttgcatgatcactcaatatcaccacattgtcttctccatactcaaccggccttcgccccgttacaagctcaagaattagtactccaaagccataaacatcacacttctcgttcaccctcaggctcctgcaagccagctctggcgccacataccctaatgcactttgaaaccggttgcttatcacgtgcttgtccagctttgtcagcagcctagccagcccgaaatcagagatttttggattcatgttttggtcaagcagtatgttacttggcttcaaattgtagtgaactatgggaggtgtaattgagtggtggagatgagccaaccctttggccgttccaaccaaaatcttgaatctttgaggccatgtaagaggctcaactgaagagattctttcgtggagtttggattgtaggctgccattggatgcgtactcagttacaaggagttgaacttgtggagtccagtaatacccttttaaggatactaaattgggatgttttgcttttcccaagtttctgacttcgcggtcaaaatcttcagggtactgaattatgtttgaggtaagtttcttgatggctaactctgttctttcttggtgatcacataaggcaactttgtagacagttccaaacactccttctcctatctcagaggccttattgagtagagacacaagatctccaatctcttcagacaatcttgaatcgaaaagaacaagtttccctaccgctagacttgccccggatctagaagaactagagcacatactttccaaggcttcttccacaaaagccagtctttttctggcagatacgttgagaagactaatgacaattaccccaacaaggatcagagaagcagccgaaattgcgatgatcgcagatacactgaggaacatatggctgttattcgaatttgatatgatctgtgagggttcagatggattctgcttctgatgttcaccaccaccaatttgattgtcgtatgcatttgggtcaaggactagaggtttagacacattcattttacatggaccttttaacaatggtgagcaaattcccaagttaccttccaaagagctttggtctaggctctgaaatattcccccaactggaagcctcccaattagcctgttgtaagagacattaactgctagaagatatggtagttttccaagctccattgggatctctccacttagttggttgaactccaaatttagcatcttcagtttttttatctctgtaatggacataggaattggaccacttatgttgttgtgggacaagctcctgtgacaaaattaattgaaacccaagtaagtacatgttatgaaaacattaaattctatagaaaatgttgtctgaactctcaaaaaactggcaatattataggcaacataggattgcatgacttttttctaatagattactacatgacatttcagaaaattaatgaacaaaacttgaacaaataaagaattaatttgcaattttgaatattttatgactaaatctttcaatagtagaaaacaaaattggaagtgggaaagaagaagattagaggttgatactcacaataaggaaagagacgaacaatttccaatctcattaggaatctgaccacttagtgagtttccatctagttgaagaatgtccaagcttcctgaatcacagatatcttctgggatagaaccaagcaggccactacttcttagatccaatactgtaaggtttctaaacaatccaagctcaggaggtatcctggattcaagattgttccaagacaaattcaagtactccaaccgggagaaaagacccatttcagctggtatagttccttgtatgttgttcattgacaaatccagaaaatgaagactttcaaatactctagtactagaagttgaacctgttggaattggacctgtgagttgattttctgaaaaatcaacttcttccaaagctagattgaacaaaccctctggtatactcccattgaagttgtttcccttcaagttgattactaataatttggtcatgccaccaattgtggttggaattgttccaatgagcttgttattagataaactcaagaaattaagtgagttcatttcaccaattgaggaaggcaagcttccggtaaactcattattggacaaatctagtgactccagatttctcaattcaccaatccactgagggaaatcaccactcaccatgttgtcagctaagttaagaagggtcaataagtttagcctccggaatgattccggtaatgccccggaaagttgattgttgctcaaatcgattcttgttaagtgtggacagagtcctatatctgatggtaatgagcccgaaaagtggttttcttgaactgaaaactgtttcaagtaatgcaaagctgatatcccttgtggcaaagaccctgagaagaaattttttgagagatctaaagttctaatcctccttaacagccaaaacccggaaacgaattccgggtttccagaaaatcgattagtggaaatgttgagagtgttcaaagagagacatttgaacagagtttgaggtattggtccctcaagcaaattctcagccaaagaaagatgatgcagagagagacagggaccaaacatgttatcaggaagaggtcctgagattgaattctgggaaatatcaataactctgatagatttcatgtccagaaacgaagctgggattcgaccggaaagcttgtttcggctaaggttaagtacttgaagactatcataaggaagagaaaactttgagctaatatcaccactgagattgtttcctgataaggacagtacctttagaaactgtaacttttcaaggcctcttccaaccttaccagataagcctaagccgtctagcgaaagctcagaaactctgccggttttcgggttgcaatggacgaacttccatgaacacggtgagtcatcatcttcgttccatgaagagagatgtgaagaagggtcctgtacgtctgatttaaagacaatgaggcctaaaacgtcgtcgttgagttgaacaccaattttgttattgttattattatttccattgatgttttgaatcagtatacttgaaataaagcaggccaagaaagagaaaaccaacctgggaaacttcgtcatcatcaaaaggaaaatattgtcaagatttctttgtggatatataatatattgttatatacttatgggtgtgtcggcatatcatatatatgtagtagaattattataaatccacacagaatatcatttatatatatatatatatatattatatccgtagcatcttctctaatcttactatcctaattaacatttttagatgaacacggcacactgtacaagtgagcagtatgtattatattgatacattatgggcaatattgatatatattgtctgtaaataaatgagcatatagatacagagatacgacaaaaaagatgaaaaaaaggccaaaatatgagttgtgttgagtcacggacaaaa

SEQ ID NO: 300645 - DNA, 4404 bp, Cannabis indica
ctctctctctctctctccactctaggtgaatctcacatagttgcttgtaggtattccagctttgctcgaatactctcgatttttagtgttgtctaaattccttcaacaacacttgtattttttaaaatagtacaaaataataactatgaatttaattttcatcaaaataaaatttaataataacctaacttagaatagggatgtaaacggggcggggcgggtgcggggattgctcccccacccccatacccgttttttaaattcaccccatacccgccccaatacccgtttaaattaaagcgggggcggggcgggaattaaaagcctaaagcatgaagttattttaattgtagtagttatgattttaaaacttaaatatatacatatatcatataggggcgggttcggagcgggtatctattcccccgccccgtttccgactcgggtatgaatccttaaacccatacccgccccgccccgaaagtcaaccctcggggtgggtacccgaacctgcgggtataattgccatccctaacttagaaatatatgacaagaatggttacattttttacatttgttcgtgctagaaactactttcaaattgattttgtttttaaaaaaaatttagaaaatacaaggtctaattttttattgaacaaacaaaggattcaatcaataatttgtgcaaaatataaaatttaaaatggtatttaacattttataatctaaaaaaatattctcgagggctgaattgcacagaataaaactaaagaggacatttatgctaaaaaagaaattctcttctcccatagtagaacaccccaaagacgacgtcgtttcgtgtatcctctcttctgaactccacaggttcacagctctcattcagagcaaggttcatctctctctctctgaattcccagagaagaaatgaatatgcgcgtagattgtagcatgagagcttctttggtttcattttcaccaatcataaccacaacttcctcttcccactcgaggactaggagaccaccttctctctcactgggcagctcttctttctcattctggggatacccttttcctcgtatactccaaaacaacttccatgtccaccatgcccgcaaaaaacgctcggagcccccgcaaccagaaccggtgctcagcccaactatagtcgaagaagtttcactggacgatgatgaagaagaccttctctttgacgatttcgaaaatggtcagcactcaattcttttcttttcttttcttcttttgtttggttgctgtgaacatttggcctgggttgtactttgtacatattattggaggaagacttcttagtgtttgatacaatgcttaattcaataaagttactagtgagagaagttgttatctctaaacacaaattattggctaggttgtgtattacaaagagttttggacaaggaactagtttggtaaagagttgtgtagaagttgttagcatagaatttagatgaatgtacattcgaaaacaattgtagcatcaatgataagtgattctttttaacatcaaacttctaatttaaccttttcatgtgttgaatgcttgagtgaataaaatatagtttagtgagttgaattgggtagcatatgaaaggattatttgttaaaatgggatgaagagaaaaaaagaagttgaaaattttgacaaaagaaaagagatataaatagttcatcaactataaacacacacacacacacacatatatatatatatatatttagatagagagggagaggactgagtaatctaggaggtgaaagtcagtggcaagattaaccattacaagtagtagttgtttaaggcactttgaatgacgaatatgatttgtgtttgtcaataaattttagcaattgggtaccaactatttttaatttccaaatttctgagcatttaacgaaaagcttttgagtgcttcatgtctgaatgaaactctcaatcatttgtagaagatattatagatgatgatgaggattatggtgaagatgagtatgagtcggatgatgctgaaacctatgtaagttccatgatgaagatattcatgagctgacctcgctttaaatttgaattaagaaatcgaagattgactgtacgctgtcaatttttttgttttgttttgtctaggttggagatggaggtgcagggggtggaatttctcttgcaggaacatggtgggataaaaaggcattagagattgctgaagaagtttctctttccttcgatggtgaactgaaaatatatgccttcaagacattgttaaattctaccattcgagtgcgcattgagacacttgcaaataagtaagcatcatttgaaactattaatggataatggtattgaagattatatatttttaagtgaacagagagaaaacttatattttatgtacttttttcatgataatgatagtagcatggcatatattgatactgcaagcaacaaacgttgcatggtgtcaaccattctcacaattacaagttaatcctgttgcaatgttgtgatggtgtattcaataattcaaaacatacttcttttttttaacttatttattccttgtaggtatttttatccaaattattttgatattactttgttcttgacatttctctttggttactagttaatttttattgggtgtccatacaaatttatttattcctattgagccataatcatatgtcacagatctggttcccccactatggaagacatagaagcttttaccacaacatatcgagcacggttagatgaagcagagctggctaaatcaatacctgagaatgtgtctttagaggtaatttcctcgtttctaattattctatgttatgtttcattttctttgtatttttttttatttctagtttagcactctatgatagagaaatacatactttggaagactgacacactcgatcgaattcatgctgaggttaaggataaacatatagcattgcagtgtacactttgtccagattagccataaaaaccttcaatcaaagcccaaatgcccatgttggtggttgttttatctagtttaggcgttgtctaagccaaaaatgttgtgtttgtgcttttaaatatattgactagtttgaataaaaccttggccgaaatgacatgggaagtggtcagttcacttttatctcagtgtttccttaacagatgctagctagcattgcaatgaatcactttctttatagctgatatttgaataaaatggttctgttcaaggtgtcatcgccgggtgttgaaagggtagttcggattccacaagaccttgaccggttcaaagatcgagctatgtacgtgaagtactatgcgagtgagataactccatctccatctggttcgtcatcctcagaaagtgatggtgtttttaggcttgtttcatttgatatggagacaaagtgttgcacatggggcatagcagatgtgagaataaatagagagaaaacaggtaaagggagaccactcaataaaaaacaaagagaatggcgtttggagacaccctttgattccctgtgtttggtccggttgtattctgaactttgactatagtaagcattgttttcccaactcaacaaaattaagatatagcagagagtttagattaaaaggctaatatacttatacaaaatgtcatgttttcctatgtctttccatttttgacattgtaatttgtaaaagaaatatatttttatttatatataatatcaatatcatacttattgtatagagtatgtaacatgtcttgggcaacctcttttgttaggtatggcttacttttaggaaaatgttaagagccagggcgggctctatccttatactatgtttggtataagggaaaaaatcaagagccattcttatatgaaatttacaattttatttacacatttttaattataatttacagtgagatttctttttcttccattttctctcaaaaaaaaaaaagggataattttttgggactttttcaattttacacttctaaacagttttttttttttctttcgtatttttacgaaattctacattaaaatccctcttgcaattagcgctgcaacttatattgcaacaaaaaatcgtgtggaaacccctattgcaactagtgttgcaactagttttgcactgcggaccgcctcgttgtaatacttggcattaaacaattctcggaactcttcccaggtcattctagttacatctctggtgagggataccatttcccaccagatcagggcatcctcttgaaattggaacgtggcacatgccaccctatcatttccagctactcccataaaaattcaatattttctcaataacggtcaaccactgctcagcctttaaaacatcagggcctcccagaa

SEQ ID NO: 300646 - DNA, 1103 bp, Cannabis indica
tttttttttggcgataaaaattgaatgaatatgtcattgtggaggctaaattgagaactttgttttgtgcttaaaaaatggcggtggaaagtgaatctgtttgttctctaatgtataataattgtggtcgtttgctatatgagattgattgactatcatagtttacaaaggcttgcaaccaagatttatatattttcttttttattagaatttcgaggatgcctttggtaatgcaacgtgatatatataacatacaaagtgattagaggggagaaaaagaggagtatttgtgtgggtgtgttttcttttgtcggtaaattttaaccaactgataatgttatttagattaaattaataacttatgatcaaaattattggggagattgggataatgtatgggagaggtttaatagctatgttcttcaagtgtttccaaatttaggtactgcaatctgtttttcagcttatggtttcacatatgttgtgcgtggtgcgatcaaatgattcagaacaataaatgttgggtttgatttagctttccttttgttgagtactataacattggaagatggcttccatgatctcttctcatatattttttgttctgaatttgatctttagcaccctcagctgtaagggctaactcaaccatttgagcatcagatcgaacaatccctggttgtttagcagctacaattacttctcgagtaatatgtcttaaaagcctcaaataaacttggcctttctagcagcttcagtgaccacttcatcagaagtaaacttagccaaccaatcaaatttggtggcatattcagtcaccgtcatatttctctaaaccagttgtataaactcttccatcataccagcacggatagattcagtatagtacttcttgtagaacaaggtctggaatgtatcccaagtcatattactcaggttatgaccttgggacataatctcccaccatatgcgagcatcctttgaaattctgtattttaatattcccggtttaattatttaattaagtgattaattaaatgcggaataatgaaattggtacagaaaacagtttttccgtagttacagaatacaactctgtaact

SEQ ID NO: 300647 - DNA, 4241 bp, Cannabis indica
tcttgtaataataattaagattattaaggtactcttagttcagtttggtagaacacgggtctccaaaacccgatgttgtaggttcaagtcctgcagagcgtgcttcgattctttttatttgttaggtcgaaaataatacaaaaataatcgaacaacagtctgaatttgagattaaaacaagtaggaggtcaatcaaaagagatgttaataaaagggtcagctgaacttgatgtgcttaccattagagttttgtcctatctatcatttgttttctcatgtttaatttttcggtcatgattacccgttttcttttggactttatgcaatgtaagaatgttactaattcagctggaatgataaaggaaaaacttgttaccatggggccatttattgcgttgaagatttcccagaagtataccctttaaccgtggtattaattattaaaatggaagttaattattccaagaatatgatagcaatgtacagtaatctatttattgtagattctcactctttctttaactatagcttgtgacactgattttgtaatattcacttttacagcacaggtctgctgatggcatgtttatgggttctagttttcgtagtcctgttggggatgtacctgcagcgtcccccaagtactctgatagactttctccggcaatcaacaattatctgtctgaggcatcaaaacaagaggtcagagtgagttggtttattgtggtcttaaatcaagaaattgatgcttccagtgttttgtctttgattatgcttttcttagttacttatttgttgttttaaggtcatctgctcatcataatattgttaagcgtttggtagttactcatttttatgcataacacttatgttgaatctctctcatgcagcctcaaggaacacccgaaaatggatatttgtggcaaagagtaaattctcagttaagttctccgagcccattgagagaagatctctctcaggcacaatcttctccaattgaagcttctgcccaggctcttagacaatccttgcacccattattgaggcaaaaactggtatgtttacttcatcatatattatttttgattgctgcaatggcagattgtgtaagtagcacagtatttaaccccgttctgaatttgttcagtcgtgtattacttttaggttgctaataactttaccattttcaggagctctgggaagaaaacttgagtgcttctgttagtcttcaggttttagaaattactgagaaattttccactatggctgcttcccatagtgttgctaccgactacagcaaactcgattgtgtcacagctatatttatgagcttcatctctcgaaatcaaccacttgctttctggaaagcttatgtacctattttcaacagtgtattcaaccttcatggtgcgactctgatggcgagagagaacgatggtttcttaaaacaagttgttttccatcttcttcgacttgcagttttcctgaacgacaacattagaataagggctgttgttgggctccaaatacttgttagggtaggttcttcacattggagcacttcttatgatcagctttttggacaaaattaacttccgccacctttttttttttttttttgcagagttctttctattactctatgcaaacagccaggttgagagttatgcttatcattacattgtcagaacttatgtctgatgtgcaagtgactcagatgaatcctgatgggacactagaagagagcagtgaaactcggcgtcttagaaaatcattggaagaaatgtcagatgaagataagagccccggtctgttgagggagtgtggtctttctgagagtgctctattggctctcccagaaaagatgacagagagtaagtggtcctggccaaatgtgaaatatctgtcagaaagtcttcctcttgtccttgattgtaatttggaacattcacttttggtaagtacacttagcgacgtctgcattgattgaggcatgtgtttgtagttggatttgctttaaatttagttatacaattccaccctttatgatgtatcattgaataaaccttttatgaactattcctgtagaactaaattggtttcaacctttttcagggatctatgatcactatggacagatatgcagctgctgaaagcttttataaatttgctatggcatttgcctctgttcctgatcttcacataaagtggttacttcgtttatgcgttgcacatcaggagattcaatcttgggccgaagctgcccaatgtgctgtggctgttgctggggttgtaatgaaggtaaggacacattatatcttgtaatgttagatcttgtatgttgctagcttaggctctaatggtgattttttacaaataacttgaattttgttacttagggagaaaatgaagggaacaactttttagctatttggtatttgcatggtccagtcatttttaccgttcctagtagtttgatatttgaactttgagctatattgttattcttttcaatggggattgatctcttgccttctgattaatttggtcatgtcatatttctaaattaacttttaatttttttaggcccttgtggctagaaatgatggtgtgtggagcaaggatcatataactgctctttgtaaaatatgcccaatgattagtagtgagatctcttccgaggccactgcagctgagttagacggatatggtacttcaaagctcacagttgactctgccgtgaaatatctacaacttgcgagtaagcttttctctcgagctgagctctttcatttcagtgcaagcatttgggaactggtcattccttttcataaaagcaggagggcgtatggtcagcttgccaattgtctcaatgtacttgcgagtatctataaatcgattcccgagcaggaatcaagtccaattgcattcgctgatgctacctactatagggtgggattttatggtgatagatttgggaagctggacagaaaggaatatgtatgcagagagcctcgtgatgtgcggttaggtgacatgatgaagaagctaagccgtatttatgagtctaggatggatgggaaccacaccctgcatataatttcagattctaggcaagttaaggccaatgagttgcagcctggaatttgctatcttcaaataactgctgttgatgcagtttcggaggatgaagatttggctagcagaagggagagaatcttctctctttctacagcaagtgtccgagatcgtgtctttgatcgtttcttgtttgacacgccatttaccaaaaatggaaagactcaaggtgggttgaaagaccagtggaagaggcgaactgttctgcagacagaaggctctttccctgcacttgttaataggctcttggtgaccaaatcagagttgctcgagttctccccagtagaaattgctattggaatgattgaaactcgaacagctgcattaaggaatgaactcaacaagcctcgtggttctgaagaggaccgactcccacgtctgcaaagccttcagagaattcttcaaggcagtatgcctgtccaggttagttgcgctcaattcatgtaatctagtttcttagccaacaattgtgctgataagtttgtgtctatgcacaggttaacagtggggtattaagtgtatgcactgcattcttgtccggtgagcctacaacgaagctgcagtctgaggaactagagcagctcagtgctgcggtccttgaattcaagactgtttgtgagcgtgccatcagtatacattttagattgattggagaggaggaccaagaattccacacacagcttgtgaatggatttcaatcattaactgccgagttgtcccattaccaattcccaccattttgtcagagctgtgatgtgtgagtgtatggcagcttgaaatgtgttcataccttttgtatttcatatttccaagtatgttttttggtgttatgtttggtcattaacattttaaccaaaattcttctaatcaccatttgtttatattaaatttttcacccacttcatcaatgttgatattgatgaatactcattttatgagaatgaaatgagctgacaacaaatctcaatgtctttaacaattactttagggttcatttagcacaccgcattacaatacaatttgtattgtttagtgtaatattaatttgtatgatatgtcatatttttatagggatatgattttgtcccgttattgtactttca

SEQ ID NO: 300648 - DNA, 2990 bp, Cannabis indica
ataaaaatccttaaattcaacaatctcaatagttcggagggcatttttaaccttaaaagttcaggggcatgatttggtacatgtcaaggttcatgggacaaaaatcctaattagcctaagaattaatatataaacttaaaatttaatacacaatttattttactagctcaacattattaaaaaactaaaaactcaaaaaaaaaaaaaaaatctaactataatactgtaaaattttattgtacgctcaacactgtaaaaaatttgtaataaaagtttattatacgctcaacattataataccattacagaaaaatattgactttgttgttgttactttcataacatgattttgaagattcaattactgaattgaatgaaagatcaatagatgaatcataaccctatctcatttcctttttggaaggaacgtatctactaattttttagtaagagagatcttgaactaaaaaataggttctaaaagctaaaaaatctatcttgagcaatttcactaatcaagttattgatattcctcaagaaaattataatctttgttattttaagtatttttatgttattttacataaagatatgtaacaatatttagtcactaaatatattaatttttagctaataatatttgtttaaccccactctggctatgttggtaggaaggaaagaaggaaagagagggagatcaatggagagactaaaaaagagggagaggagaagggaaaaattttaaggatgtgcaaaaagtcatccgatctaattaaaattgactgatacaatagaattggacatctaatcatagatcagattgaatgtaaatttaaaaattcaattgagatcagatcggttgttggatgggacatccgatccaataaataaccgaaccgcaccaattcaattatcattcaagggtcatttagttatatttatatatttttaaaataaataataattttttatatttaaaatttttttttaaaaaaaaattagatctgaaatatttatttttatcttcctaaatattaataaaattgtcaatgcgtattgaataaattttatttttttgcagttttatatgagttcatgagaattaagttcgacttaactaatgtttattatgtatattggataattaggttttaaattatgtttttttttttatatatatatttatcttataaggaaatcaacttaagtagtaactaaaatagattagatggatctaatctaatctaatagaaaaccagttaaaagctaaagcgacaatccaaaaaggtgcctgcaatatggaatctgatggtaaagacactgggaggatccctagattcctcatgaactagacttctatccccactccaatggtaatcattcccttgggctcaatttagtcgcggatcttctcacagtaagtggtaattgagacctccaaaagcttcattccttattcgatcaggaaacaatccaagctatattaaaaggaagaaaaccttcgggtaaggggagggattcttgggtttggatgaaggaaagcagtggtaagttctcttgtaagtctgcatacttaattcagactcttcaacaagcccccctttgtgatgtctcgccctccttttggaacaagttttggaatagtaaaatactagagcgccaaaagattctgtggtggagtatcctttctaatgcgatttcagttcgttctatccttaataggaggttctagttagaaaatccactctgccctatttgtggggttgaggaagaatcaatggagcatctcttccttcattgtaaattggcttatcatttatggaggtctttcttgtagagtattttccttgttctcgacactagtattcgtatgtgagatggggtaaagtttctttggaatttaaaagacaagggcattgatgtgatgaagtttttcagtatgcgtccattatggtggacaccatttggcgggcacggaacgataagattcataataataatctgggtagcattaagttttacattgactctatctatttttgttatactaagtatcgagtttctttctcagttgcctaacctgcagtgcgtagagatatttggtgccccatccaattgactggatcaaactgaactgtgatgtcagagtaggtttggagcacatatgtattgctgtggtcgctagaaatcatttgggtgcagtctgttgggtgactacgtcaaggcttgacttttcaaatgctcttagtggtgaagttgttgcttgttgcttgttgctttgctctagatgcgacggctgagaaagggtgcaattttgtaattgttgaaagtgactttaaggtggtgatcaactcttttattgggctgagtttagatgagagattgaaaactattcgcgtaactgctgatacacttcttctatttttgttagttgtaatttttctaatatcaatcgatcttgtaattttgttgcccataacatgactaagtgggtgtttattcacaataggcacagttgttggaatgttgaagacttactgtcaaacttattttgtaatgatcacgagatctaattttattattctatatattacacttttctttaaaaaaaaaaagttaatagtaaacatgaatacaaggaagggtaatctagtaaagtagggtaccttaataataaattattattattattattattgaataagaaagtaataaattattagttgagtatcatatgatatgatatctattatctaccgaagtcaccaacctataaaataatataaatataagttaaaaagagtcacgatattatataatatctaattaatttaatcagttaaaatgagttccaaaaatgattcttttccaaaaggttatgagaaaatattattaaaaaactccaatagtaattccaaaagatacacagtacaattcagtgatgcagaaggtacaatctcttaaaagcacaaagtttttttttttttttt

SEQ ID NO: 300649 - DNA, 3576 bp, Cannabis indica
ttttttaataaaataaaaatactatttaatggtcctatctttccaaaataagaccttaaattttcaaaaatataaatacgatatcttcgttagcaactacaaattaattgacatcaatccattacacattaatacacgtgaaacgaaaaccttaaaataactaaatatgattgattgaaaaattgctactgtgtaattttgttgtgtgtacatattcaacaattcaacaacaattgctgctgaatgctagttaggaagaaagaaaaatagtacacaattctttccaaaactcaacataattctttctgattgccttttgagtttttcagtggatggatagtgtaatggtacacactttgaaaatacattttcaactatttttgttgtcatatgatgaagttattgcaatggtcaatactgaaatcatatcgaagagcttgatattgcttcatgttgataaaagcactttttgtacatccttctatatatttttgcaccttcaaattcagcatgtatttctctctcagttctaatccccattggattcttcaacagccatccctcactatcacataacacactcgactctacttcatcaatgtgttttagagtatttgactcaccatcaaattgaaacctcatgtccactgccacttcatacacatctgactgtatcaacacctaattgccaacaaaacagcatacacatatttattattataacaatatagataagaatgaatacaagattatggcatgaaaagatgaagaaaagtgtttatctacctcccctccgctcattaaacttgcagctatggaatctactaatggcttttgcaccaccctcctcttatgatgtcttttcttaaaatgaggatctgggcactgcccattaaagaaaataaacatgaccaaacaaagaattgtctaacctctgactgtattagaaagtacaggagaagggggtacactgaccaggattgaaaccagcatcaaaggtccaggatagttagagactacttgtttgaaagaatttgtggcatttgcatagatgaaatgtctgtaattatatatatatataatatcagttccttggtacaagacctttcacgaactaatatgaattcatcaacccttacacattatcaagatttatctccttaacccagtactgagcacggttcaccagctgtatgaaaaaacaagtgaattaatacctcatgatttagatgagagaaaggaaaaaaataagaagagaagggccaaagatgatttatcaaattacacagatgaagctttctactacaataaaactaaaccaaagagtttttccttactttctctcttatttccaatcccaaataatttcttacaccagcattttttttgcccaaccacatgagaaatctgccgctacctgaaatattcatcctttagattatgactgcaatttatagcttgcaaaaactatgacttgggataattagcaaaggttgtctttttgttttttctgttttaatagaataatggcaagttgatttgaactgaatgcaggaagaacaaaaaccaattattctgatcataaaagataaattaaattacaacataacaaagaattgaatagtgcaaagaaaataccaaacaaagtaattctagtattctattgcaaactcaattgttcgatttgatttgtgcatatccaaataaagatgttttaagtgttgatcataccacttccaatatccaccattagtggcaatgttggatctctaaagacttgattccaatggggcacttgtactggcacctacaaaaagaaacatgaaaatggtttctactaaatgtttaggtattaaatgttgtagaaatgaaagaaaaaggaaaagggaacatacagaaaaagtggtcttgagaggattgacatgttgcctgattctgacattacccagttcctacatacatagaaagaaaattaaaattgagaactgaagtggacaatgaatgaatatgaaagagtgagataatttaataaaggagggaccttgtcaggaagaggaaggttaaggtcagcatattccaaggctacaagttccggactacttaattgcttgtcttggagttggagttggagttggtcagagcaagaagcagaggtaaccattcttgtatagccgttacaagcccaatgcttaaacctgaagctaaatccctttaaacccattgagggaaaactggtttgtctaaatgtgggagataaacccaccataatcccactcctactcatgctatcaccccgcgaattcccaacaacccaattaaactaatccatcttccctgaaatattgagaccaagcacttgaagttgaaggaaggaaataaaaaggcttcctttacaggtcttgcgtctacagtgttcagttgccctgagaagtatcagggtgggtgcagttatggataaagtaaaagggccgtaaagacaaaatgaataaatttacaataataaccctcaaccattaaacccttcatttctcactctcactcagtacctcatctcactacagaacgcactcaccttggtctctgcagcaccacgcccagcctcacacaggtcagtattttcatgcttctctctacggatatttttatttttttcaaattttttggttcttgggttatttagttgcaagaagtttcgtttcaattaaatgaaagttttgtttgcttttctcatgtaaagtaattgagtgaaaatcgtaagtttcaagttatattcgcatacttgaacttcaattgcagctatgagttcaatatgtggtttcctatctataatttgagcctgtggtatatctgaggtaatattgtttaaagggggtggtaaaaatttgatgaccgtactgttcttaaactcaactagtcaatgatataagaattttatgctaactttctggagtcaagagatggtaaatgttttgtaagaaagaaaatggtacccattacttttgaagttgaagaagatgcgttttgagttaatgaattttgatcatctgtatttagttggattttgttcaaacgatctttactaagggagcccggtttacttttaatgagaatgacaatgagaatttgttcttttgtcaacttaatagagttgccaaagcttgagtttgccaacgccagtttatacccctctgctcatttctctgatattcaaatggatcacatttaactggtttatgcaataatggaaggaaaaaccattgatgtgggtcgagttattcttcgtagttttattgagagggtgaatgctagtatcactagtggtttggggggcatggattgttcataactacctttccaaagtttggtagtgatgtagagaggaaagccaaatagccaataacttgctctagagaatcaaatcatgaattatacattacccatgacaacaaaagaagccgctgcccaagcttgagctcgccgcaataggcatcaccctgcatctaatgataactcagatcaagataatgccaatgctgtctagataatatccattacccatttgtttttttttttttt

SEQ ID NO: 300650 - DNA, 1061 bp, Cannabis indica
attttattttaattttttaatttttttaatataattatttacgtggaccaataaaattgtgccacgtgtatattgtgtccacgtggacaagctaacgtggcacttaacagctaaatttaggcggaaagggtaaattgctaacagaatagtagttttgggggtttacccgcagaaatttgagttgtgggggtttaatgaaaccaaaacgaaagtattgaagttttaccgccatttatcctaggtttttttttgaaagagacccctacttataggttatcgcatccacgatattggtagcgtaccctttgtttgctattcaaattattttgattttgattatgattttgtatttttgtggtatgagagaacaagtgattgtaccaatccacgtgcgtagacccatatgtgctgttccacagatacagagcaggtccaacggttcatggtccttttaaacaccgtctactataaaagcctgtctgtcatcattattttttatatatttatatattatatttatgaatcattattgtatgtattcacagcaatacaaattattttttttaagggaacaacgatatagaaatcaattttccattccacacgcacacaaattcataaattaacttatttgtcgtatctcttaaacaaatctcaaatcattgttttatcttaataacaattcatcttcttttcaaatattctctatcactaaattgaataactatcatcatacttaataattaatttataaaatggaaagaaaaaaatgtaaatttctagagtaatcctatgtttggtggagaaaaaaatgggaagaaagaaaggaaacgaaaaaaaaaaaatgtttgttagaaaaaaaaacagcgaaaagataatggaaaatggaaaattttcaataatattttgtttaagggtctaaatttttatttccataaatactcttgtaaagttttaaaattataaaaatctactttgtttaaaaaaaaaagtaaaaaaaaataagctaaaaattaacgtataatcaaccccacgacaaatattatttttttttttatttt

SEQ ID NO: 300651 - DNA, 609 bp, Cannabis indica
actatataactcttctttttcttggtaagaccaaaataagcatgacaattattgtggtcaatatttcaatgttccataatagcaatatgataagttgttcatttttatagatttttaagaaaaaaaattgtggaaagtggaaagtaaatttcccaatcgacataaccatgattgattatattgcacgatctttattggtcaataattcagctggaggagattctttgatgtgttgagtaatcgatttcccttgatagtagcaaaaacttgttgcttcgaaaggagaaaattatggtcattcaagcgactagaaatgacatgctatgtgtatgtgtataataatatgatataatttgaaggtgtgcacctattattaattaatatttagtttaactgaacaattcacttatttttcttttttattaacaaactctttatacaataatatataaagctaattaagaatgttgtcctgaactttgacatgtactaaatcatgactcctgaacttttaaggtcgttaaaaatatctcttgaactattaagattgttggatttaaggattttttttccaattttagtaaaaaatctaacatagatgaaagttca

SEQ ID NO: 300652 - DNA, 2721 bp, Cannabis indica
attagtcataatttttttttttttagtcacaaattttgtcgtgactaaaattaagatttttttaatggtgtcgtgtcgtgcgtaaactcgtattttttcgtacctaatcgtgctcgtactcttcggactcgtgatttcgtgtcgtgtcaaacaacccgcccctatttacaacactatattgtgtatctatgtatatatatccatgcaggggcatttactaactgcattacatgcatgatcatatatcaacgtactataaagtctaaccccattgcacaagtcacaacctatatgagtcatagtaaagaccatttcattagtacactaaaaaaaagtaaaaatattgatacatgtcatttttttgtgtcgacaaagaaaatgcctcttttaattataagtagctgactttagctaagttgagtacgtactgaacgaatcgccttgtgaaaacacattcctatgtttttttcttttctttttatataattagctagggcttcaatatctaaacgattccaccaataataatattcatatttgtaacttttcttttaggcagtactataaattaaaggtgttaattaagatttttgtcttttgaatttttacatgtattaaattatattgtttttgaattttttaaatcgttaaaaattctttttaaaatattgagattttagatttaaagatttttgtttaattttattcaattttgctaatgtggtgattgtctataagttgcgccctcactttgatatttacaaattcatgttttttaaactttaacatatatcaaattacgccttttaaatttttatcaactacaaactttctttagtaaaattgaaaataagttcttaaattttaacaatctcaataattttaaaagaatttttaataatttgaaaaattcaaaaaatataacttagtttatatcaaaattcaagaatatagcccaaatctaaattagcttaaataaaaacacaaactatctaaattattataattagcctcaataaacgttacaagtgtaatataatctcactgattaaatacatttgtactttcgacatcaagagaaatggtgtaagttaatactggattaattaataatttgaattaaattatatttttgtttagagaagtttttatgatattttgtaagagaaaatattctcaattagagatatcctgaactattctaattattgtataagcctcgtctttcccatcaagggtcacttcaattttatatagaattaaggaatttttacattatatattgaaatttttaatattttacttttttatggcggggcaaaatttttttaaaaaatgttgtgtaaattttatattgtgtatatcgttaagtttttacggttgttccacagttgctttttagttgttccactattattttaattgttctgttttgctgttttacggttataattttatatatataaaaaaaaatatttttataaaaagaaaaaattatgtatgacagtcaaattaaattgtaaactttcacttaaaatctaatatttttataaaatcccctaaaattagctcacattttatttgaaataataaattagtggagttgacaaataataatgagaaatttaaatagagtactattactagctagaatggaaagttgtgggagagcctgtttcagataagtcatgatatatatgaaagattttttagtttttaccgtcttttttagtttaaattgtatatgtatctattaactaataaactactattgtttctagcttctagtaatccatcattttggaccttttacaactcaaatgttgtctctatctctttctctcattattttttgaagtaatttatagcgtaaatattaagtgtaattctagttcaaataaatatttaagttataatttttaacggtataataatacttaaattatatttctagaacttatgtaggtatctcgccattaagtgtcaaattattatctatattattttcttattggtatatttaaattttataatacataaaaaaataaaaatttaatgagttatcattttttctctctatttatcttttttatttttttcttttccaattctctctctcccactaattattttttttatctttatattaataaatatatatatagaatatgaatatttctagttccatatatatgtgttggcaaaagttggtattgcgctggcaaaatagaatttacccatgatgtgttggcaaaaaggagttggcaaatcaatgttggtattagaacttttgctagcataaaatgaaaagtgctggcaaaaaagacttttcccagcacgtaaatgtgctggtaaaagttagattttagccactgcaaatgtacgctggtaaaactttgatctttttgccagcgcagtttgcgaaatgcgctggtaaaagttacttttaccagcgcagtaacaaactgtgctggtaaaagtgacatttcttgtagtgtacccattcatgggtaatacccattaaaaagtattccatatatataagtgtataaattttttctaacactttttcactctcacaaagttttattttaaaaaatacaaacagtacttattatatttttttttctctctttatattttcttatgattcgcaatgaaactatttcttactattttctttaattaatcacattttataaaaaaaaaatcttaattaat

SEQ ID NO: 300653 - DNA, 5709 bp, Cannabis indica
tgattaatcttcgtttattttctctttaatttctgagttatttacttttaaaattgcagacttattattttaccaaatagaatcataagtatagtttagtagtacttaattcaattccctgtggttcgacctcacttgcgtgagatactacttgatacgtacacttgcgtgataaacagaattttcgtaacacccaaccaacaatttactaagctcaaagaaaaaaaatgtaaaatcatcaaataaaaaaaactcaaatttgtaattaaacatattaattagtaataaattgtatctttaatgtataaaatggaataatcatgtctcacaagtcacaacaacaatatggcttcattgctttccctttccttatgagactttttcttttcttttttcttaaagacagtttacagttacaaactacaaagtaggcactagcaaaaatgataagaagagaagagattactgaaaattttgatttttttttaacttctgttattctttgtcttcattcttagaacatgttgatctgcaatagaagagttatgtatcgattatcgaacatggaaaacccgagatggatttttactcttgtatgaaacatatttcaccaaacgtgtattagcagaattgataaaacgcatgttcataagtattcaatgagtttgtaaacagcataaatcgaataatattttttaacggaataagtactgaatgttagtagaattgtaactttcatctagtttcatccgtacagacttttttagtgtcttaaattgtctgtgaaagaagacttggaagtaactaatattatacattatacaattctgaacatatgtttagaatctgggccacacatttgtcttgtttaaagaactaacgaagtctgtattgatgaaactggaggaaaattacagttttactaacattgaattgagtacttattttgctaaacaaatcattgaatttatgcagtctacaaacttaaaactttgagtacttatgctgcaaatctactagaagttagaacaaaatattgtgtttcattcaaatatttggtttttagagtacaaaagaaagtaagaaaatcaatgcagggattatataaacctgtatgttgctaaggaatggagacaagaggaatgagattgttgtgatcagattggagaagtaccctcactgctagtctgtgattctcctcctcgccacgcgtcctgaacttgagctgcatactgcaagttccacagcacatcttcgatcgaaggtctctcttcggggttttggagtaaacatctcacacaaacttccatcattgtcttcaaagattgatccaaacatgtcctattaactgctggatcaaccatgctccgccgagctgctctatcagttgcaatagccaattgtatcaataaattgtcaaaggatttgatatgttacgtactttttgtatgatttagcaatgtatttactctcttcaatgttcatgggacaaaccataactattataactaggactggacctaagctaagacgagttaagcctgcacttaagggtaaagaagacatattttccttttaataatataaatatattttgtagtcgttgacccactcaatttcgggaccgaccctgattatagattgtttttcaagagaagaaaaaacatggattacctgatctctaagagcatcaacttgtttttcagactttactggcctacccttgattatttcaaccaaaatcactccaaagtcataaacatcactctgttcatcatctttcatcctgtggaaaaatcaattgcattttctgattcagtataatgtcaatctacacatgatattaagttcaagaacactataatctttacaacagaccttgtattaataatgatctctttggatccactagaattgacctgcaatataatgcagaactatgtaatcaaattaccaattcagactgattttgtcaacaaattaaacaatggaaagataataatctttggcttaccttctttcctgtattattgactagtaaagggatgttataactgctgatttttgcaacaaagttgtaatctagtaatatatcagttattttaagattgtttctgtatacaccgggcgcgatccaggtgtgaagaaattgaatccctttcgctatccctatcgccactgatatccgttgactccaacttagcgatcgctttgaatgtggctctgtgcaaatcaaactcaaaacataattcagggaaaatatttaacataattcaggaaggacgatcttattagtgtcaaagttcagggaacaaaatacttgttaaacttacccgaaatccagcttctcaatgtaccatttggtacatattcaaagataagaaatattctgctaacactagaatcttccaagtaacattcaaagcaatgtccaagagcactgaccaaatttcgatgcctcagtttcgaaataagctcaatatgatgcataaagttttgagttccatgccttcttttcatttttaggcatctaatggcaacataggaaccatccttaagcaggcctctgtacatctattaacacatttttatttaaccaaaacttagcttctcaaacttatatgtataagagttcatatgttaatgtaaaagttatacctgcccattagagccttttcccataaaagcagatgtatcaaagttgtttgtagcctcctcaagctcttccaacgaaaaggttctgtaaccaggaagaccgaatgttcctgacttcattgtatgagatatgtacccttaatgcaacacacacaagaatagtaagcataacaatacacagctcaagatgacactttcattttctttgataaggatttgaaagagatgaaaggcttacttacttgcatcagagattaactttgaggtgtaaccagttgcagttgatgcattttctgttatggatcttgttggagatttgctaagcacctttgaatttactcttctatatattaagaaaataatacaaacaatggcaagacctactaaagttcctccaacaatgcctatggcgagaactgttttagaagtttggttttgtttccttttctcaggtaagattcccacagccaatgcttcagttcgacaagactgcaacgggcgctgattttgtttactagttgacaaacaatttttgtcaaacctcacaaccttgtcattagaattcgaattaaggcattcgggtacatttccagtgataagatttgaggacaaatccacaaatttaagatcaagattacaagattggttaccaaacaacatgcctgtgaatttgtttcctgcaacatttagataagtgattgaaggtaatgctagcaatgctgaagggaatggccccacgaacgagttcaatgacaaatccaatcgtccgagctgatagtatgagctaacttcagcaggaagaccagatctaaatctgttcttgctgagtacaagagtaactaacttgtttccaagtttgggaaactttggtccaaaagcattatcttccaaatcaagaacttgaagatttgtcaaacgactaaaatcgggtacctcaccatagaaatggttatgtgacaaagcaagaatcctaagattttcaaggtatgcaaatgaagaaggcaaagatccattgaaggaattgttcttcaaactcaaaacagtcaaaagaggtaatgaagtaagcgaatcgggtaacttaccagctaacatgttgttatcaagtatgagtgtcctaagacttgttagagatgaaacctgtcttggaattcctccatacagaaaatttgaactcatgttaactatctccaatgatgtcaaacttgctaaacttgttgtaccagacaaaggaccccataatccaagtgaaacaaaggtaacaactttcaaatttggtagcctagcaagagttgaaaagaaggaatctatcgaaaaatttcgaggtaagagtggtgctcccttttcaccaatcatatggagctgagttatggtaccttcataacacacaacagtaacatatggatttggttcatagttacaaaatctgttttgttgttccaatcacttaaaattgttgggtagttgagaagtctcttaactcttaaaagggtatgagtttgagaagattgtagttgctctgaatggcagatcaaaagaaaaatagtaataacagtaacaagtacagaatgtctcactattttctccattaagtaagtgaggaagaatttaatgaggcctcatatcaaacactttccaaacacacttacacaacaagtcctacaaaatcatattaatgaagaattaattgaattacaaacaatttacattcaaccattctaatgaaatgaacaccaaattcataaaaatcaatgctttatgacttacctcaaaaggagttgttgcagtgaaactcagtcaatacaggtcactttttctctctcactcacccaaaactgataaaatttaacaatttaaactccagaggttttttcaaaagaaaaataaaaatgaggccttgagtggttagttaaataaaaacaagtaaaagggtatgatgatagtgacttgtgaggaaaggaaaatgtcacccacccagaaaagaaaatcttaaaaaacccaaatgacccttctcttgtttagatcagaaaacaagaaaaataaggaagaaaatttcaatttcacaaaaaagacactctcccaagtctcaaaaacatgactttgaaaataaaaacacaaacttgatacaaaacaacacttcaaaatctattctttactttcctttcctttcaattgaataatattataatttgtgctttatgggtaagtctaaaagagaagccatggctacacagaaagcaaaaaaagattcttggaaggaaccctttattccactgtggtaggaaactttaagaagaccagaatgtggtgtcctacagattgagttttggtatgttggattttactaattcttttttatttaaaaaaaaaacatttttttttttttttgagatttgctcaactattataaaaatgaagaaattgtaaagaaggaaggtgggatttttggttggcaactggagatgagatgatacagttgaggcataggaggcatagccataatagacagagtgtaataatgtaagcctttggcttttctcttctctctttttctacttaatgtatagtatatagtatgtagtatattatagtgtgatttagactgtgtggtccctcttttgccgcctttttttctcaactaaaacaaccacatttatttatttcatctttatttataagagcattattattggcagaagatcttcggtaatttttataagtagtgttttacaattggttagagatatttcttaaaagttatttttttaagttatatgagactcgatacataattacactaatagtaatatgatacaaaggaagatgctaaatactaataatacattttaacaatttatttaagcaaattaaagtagacaaagtatcttaatcttcttcagcattgctttgtggctgagatttaagtagcgtttggttaaaaataatgaaatagaatggaatcaagtttcatttcatatttttatttttttgtttagtattatattttaaagtattaaaatatcattccaataaaatgacttttttactattttgata

SEQ ID NO: 300654 - DNA, 3769 bp, Cannabis indica
ttttttttaatatatattgatttataaaatttgtagttgtttatgtgataattcgttgttgtgcatttattttcttaattttatttgtaaatttaggaagcaagagaaactttggggatcttgaggacgatgaagacgatttttttggctccaagaaggtatgtcagtatagcaatctgtttggcaatatacaaatctcaatcggtgttctctttcaatttgtttgaagtgagttattcttctgcatatttctgttcgtatttataggactgggttttgctgttactttaacattgttgtagaagttggaaacaaacaatattaaaaccacaagcctatctcattcctttttttatttctttgtatactgccgtactgatattaagagggcttgaagtcgattaatatggggaatgttcttttgtttcaacgtgattgtaatatagttgagacttgagtgatgacaatagaggatggaaaatcttacttgtgttaagggatttgagtaatgcatgtttttaaaacatgctaatgagagatagttgaattctggatgtgcacatgggagtgaatatgctcatatgcttttcttctttctttttttttttcgcgtgcaggctaactcaacagttgaagagactgcccctggtgttgcaacaggaatgattttggctcttcgtgaaaggtattagactttttagaaattctggatggccatacatacaagtgataaaacaattgctaggtactttgtggtttatttctttgaatctgatgtttatacacgttcttttatcttctatgtgcagtcttcaaacttgtaaagatacacttgcaacataccaagtatgtattagtatttggaataatctttgctggtcagttcgatttgcctggattaggatttaattatttgtaattccttaatttgcagacggaacttgaagctgctaaaactgagattcaaaagtggcattcctcctttcagaatgagtcctttatacctatggggactactcctggttcgtggcatattattgtgtacttcacatatacattctccaaaacttacaaatgttgattccaaggtttttttttcttttggtagaacctagacaagtgatcaattaccttcagacattgaagaattctgaggagtcattgagggaacaggtgtaattctagaatcctctctctctctctctctatatatatatatgtgtgtgtgtgtatattttccattctgtttaacaaaagatttaacattttcatgaacaattccttacattaatatttttcttgaattatcagttagaaaaagcaaaaaagaaggaaggtgcatttatagtgacttttgcaaaacgagagcaagagatagcagagctgaaggtgagcttttctcttttattgaaaatgatatctgcacttgatatgatacgctgcatattcacttgatagaacttagaatgtgttttgactctttatctatctatttactggtaagaattttctatttaaagcaaaagaatgaatgtggttatttccttaagtagcaagaacattaattatgcatatgctagacagagtgggtgaaactagatattctctaaaaacagtttgtagcatattagagaagaatgagacttgaagtttactctaatttaggaattacgaataggaatatttgattcagcttggttgttgaatggtatgttacttgctcaaaagacattgttctgtgtttgtttaatggcaattgaataaacagtctgcagttcgagatttgaaatcacagctcaagccaccatcaatgcaagtaagttttaattctgtaggaaaatcacacagttaatttcatgtgtttaccattttagttttgaagtttttaaaaccttctagaattatggcagactcactagtaatttattgtggtggttaatttttataggcaaggagactattactagatccagcaatccatgaagagttcacacgtttaaaggtatacagttctagttgcatgccttgacttggacttccggtgatatttaaactgttatattccttaaatctgcttctaaataattctgaatgtacttgtgtaacataatggtgctagaatttggttgaggagaaagacaaaaaggtgaaggaattgcaggataatattgcggctgtccaatttactccccagagcaagatggggaagatgctgatggctaaatgccgaactttgcaagaggaaaatgaagagattggaaatcaagctgctgagggaaaggtgctgtgattgattttccattgtatatgtaatgagtattttttgttatactctctcaaccttttgaccccttcattgctatttttttcgtgtcacaaaagatgttgagaagatttatgcatatattcattttcaggctttcaataaatagagtttactctatttactctgtcgtgttagatgtattatgtatacatatgaacattcctacatatctctacttgatgtacttattaggtaaagaaacttctttagctagtggatggtaaggttgagaaagattatgagttattgggtatcgataatacaattttctgttgtgtaaggaatgttgtttttgtattctaacaacaaatttgctgattaccgtgtgagttttagtgcagtcatttgattaattttattcatatcatattattggtctgcagatgcatgaattagcaatgaagcttgctttgcaaaaatcccagaatgcagaactgagaagccaatttgaaggtcagagataatacaactttcttattataattttaaaaatctatcagtgagttggcaagatcaaacacattttgaaaccttgcatgatcttatttgtctaacaggactgtacactcagatggacgggttatctaatgatgtggaaagatcaaatgaaatggtattatgcttcttttcaacttctttttttgtttctttttcaattctaacatttgctaatttggttttgcaatagctcatctaattcttaactagttatttattgtatgaacattgtagattatgatttggtttcagttcagactaataatatttccatggcaggtggttgtattggaagagaagctagaagagaaagacgtagagatccaaaggctgaaacaagagctgctgctgcagcagaaaagttcgatagaggagaaaactactgattcaccaacttctaataaaaaaactagcactgaaatgagtccgggccaagatgacaactgaaatgaaacttttgattcgatcaaattttgtagaatattattcttttatctccttgtttgtacatttaacatttattttaaatttcatagcactcttttcttttttacttttcaataagtgattcttaatgtgatcaaatctataacaccataaggtaggtataggatagaatgcctcatctcttttgagctggtggtattggtaatggtagatcatgtgccgtgcagttactgttcatccacatagtttagatatgggcattgggcagctgtccggaaatctaccccacattttatatactttgattgaaatttaaaattttgcatttcattttaattttttttaacacattttattttaatatttgatatattggtttcagtgataaattattagggtttttacactacatactgaaatttcaaaaaaaaaaaaaaaattcttttttaactgtgggtaagttttttaaaaaaattattgtgtaagttccatactgtg

SEQ ID NO: 300655 - DNA, 4239 bp, Cannabis indica
gctcatgtgtcaaaaagtgaaattattataaatttgcaaaataaaataaataaaaaaagaacaaaagttcttatgagtcaaacttgtcaaccacataattggtaagaccgcattcaaggactaatagtctaatacaagaaagattaaatgggctttattatcttttctatgcataattaggagtgagacaatgatccaaagaagaaaaattaatgtatttattgtactcgtacaaccatctttttctttttggtccttaatgtaaataatctaattgcaagaaaaaatcttctaaagatgggtgtatttataaccatcattctttcaatttttagttttatttcattggcctgatcattgtgactaagagctttcattttccacctaaaggcatataaaatgctttaacactcccccaccaaaaaaaaaaacaagacatgtacaccgtgtataaatatacgtctctacagtaaatctacagtaactcaggaccacaaactcaatctttgtagatcacaaataatacatgagattgtgacagataaagctttacttacaattcatatatgttagatcaccaaatgctagaagaaaattttgtttggttgcttttgtagtaggggtaaacatcaaatagcttgagttggtctaccaaaacccatctaatagtattaagtgttaaaactcaggttgtttgggtagatttttaatattattcgggtggttaattttgcggagtaattttctgggcacctagacctggagtttcctcaatggtcaatctgaatttaagaatcttatgaaggctggtcaacggttttacctgtttcgtcggaggttcacttggatctataatgcatttgcctgagaaaaggttttcctctgatggtcctgtttcttcatgaaccaaaggttcagcatctagaaaaaaaaaagaaaataaaagaacatcgtattaaaaatagttgaagcaaaagtgtcaactttgtcaacgatagcgtcgaaatgtgcaaaggaaatcaaattggtttaaccagcaaacaagttcactgtccttataaagaactcaaatgatataaacaatgaaagaggagtatgaagaagaacacacttaagtatgacagagaaatacttgcaaatatgcaagtgcttcagaaaaaaaattacaggcttttcatttgtaagagcccgaagagggttctccctctaaacataagaacagatcattcaaggagcagacactgaacataaggatttagaatattgtctcaaactctcagggaacaagaaattaattagaagacaccattcttataacattgatttgtttacaagtattttaaagcagaagaaaatactgtatggtatacctttttcagtgaaaataaggcatgtgcccactgtttcttcatattctccaatctgtgaacaaaaagtactttgagtcaggtccaaactctcaaaaccagagccaatatactaaaccaagtgtttcgactgaattctagttaagaaattatacagcaagggagggtagagaaaaatgaaagcagaagagatgtataaagggaaaaagaacataaaacttcactttcaacaagatagactgtaacttgtcataatcaaagataatagaggcatgtcttagacaaatgattaactcaccaacttcaatccacctatggttaacatgggattcatcgtatccaaaccctacagtttaatacaaaatagttgtattagaaggacaaacaaactggccatgtaaagagctgaaggcaaagaaacataacgatacaattgattgcattgcatatacaagacatattttagaggacacgacactgaccatctttagtttgttaaaatcaacggagaaagtgaggaaaagcacaaaaatgatattctaacaggtgaactacttacaagttacacctacttaacgccaaaaagaacaaaaagagtccttaagaaaaaacaaaggaatttaatcatcaataaacataaaaactaacaaaccctctacaagaccatttggaacaattcccagtacagaaactttgtttgaagttgaagacaatattcggtagttgctgtcttatatttttcctgtatacactgtgtatgtattgagtacaaagtttcctatgaagggaaatgaataattacattaaataagagaataaacctattaactactctcctaatatctctgaatggaattcaaatatacagctatacaagaataattcccaaacagagaaaagatttttccacactccccctcaagctggctgaaaaatattttccatagccggcttgctagttagaaaatcaaactgtcttttacataatccttttgtaaagatggctacctcttgttctttggtaggaatataggacatacacacttggccattctcaatcttttccttgataaagtgcttgtgaacttcaacatgcttggtgcgatgatgaagcactagattatgaacaattgcaatcaaagtcttattgtcacaatacaacttcataggagatgaatttgatgacttcagctcttcaagaagtctttttatccatatgatttcacacatgccgtgagcaacaactctatgttctgcttccacgctgctctagcccccacatttcgtttcttacttctctaagtaactacattactgccaatgaacgagcaatagcctaaggtagatcttctatcaactatacttccagccaagtcagcatcggtataataagcttcgatttctaagtgcgctcgtgatttgaacaagagccttttccaggtgttccctttaaataccatagaattctgtaaactccatcaaagtgcttagaaccaggtaagtgtatgaactaacttaccataattacagaaaaggctatacctggctgtgtatgtgacagataaatcagcctaccaactagtctttgataaagctctcgatccttcatattctccaagtctacaggttgtaatttaaccataggctcacttggtgtttctgcaggtttacaacccatcattcctgtctcattgaataatcaagcacatacttacgttgacttacaaagataccttctttggatctcacaaattccattccaagaaagtacttcaaaacacccaagtccttaatttcgaattcttcaccaagtcttcctttcaatttttctagttcaacagaatcatctccaattagcacaatatcatcagcatacacaattagaattgccattttacctccttctgaatgtttatagaacattgtgcgatcaacttgactttcagtgtacccataacacttaaaacaccataccaaaatgctcaaaccaaattctaagggtttgctttagaccgtacaatgacttcctcaatttacaaactttccttgctccaaagtggcctttgaaacctggaggaatactcttgaacacttcttctagatcactattaagaaaagcattttttacgtctaattggtgtaaaggccaattagaattaactgctagagacaacaaaacaagaatagagttaattttagcaacaggagcaaatgtttcttggtagtctattacataagtttgagtaaaacccttagccacaagcctagctttgtacctttccacacgtccatcagctttgtattttattgtaaatactcatttacgccctacaatttttttctccttttgtaacttcacaatttcccaagtaccattcttttttaaagcattcttttcttcaaatactgttggcctccaatttagatcatctagtgctcccagaacattcctaggcacaacacgttcaaaaattttaatggtaaaggctttataggagtcaaataagtgtttgtaggatatgtatttagccatggggtgcttggtacaggtacgggtgcctttcctaagggcaatggaaagattgtctaagtcaatctttcttggggctgattcaggaggagtaggtttaggagcaaaattcgaatcatgttgagatagttgagtaatatgtggagatgaatcaacaataggaatagaagaagaattacctagaatacttgaagaaccatcgtctagggatgcgcagggatgactaaaggatccttacttttttcagtgaaatttttccatgaataaaccacaggctcaagattattacgattttctatcaattgtagcatttctttatctgacaaaccaatttcaaattcg

SEQ ID NO: 300656 - DNA, 1977 bp, Cannabis indica
atgaagtagtagtgaaacagagaaggtgaaagctggttgtggtgtggtcatcatgatcattcattgggtctgggctgatacaaagtgtagtgtgtgttttagtgctcgaaaatggacctattatattcgaattttttttttttttttggttagtattgttattgatgatgaagaatgaacatactgattttattggtagtgtgcgtttggctcttttgttattttatctgatttgtgttttatgtcagcagaatatcctaatcttaatctaataagctgtttaaactaaaatagatgaaacagaattccaataacaaaaaaaaaaaatgaatgaaacagagaggagcactctttatgaatatagattaataaagaaagaaaaattattttaattttaagttaggaggaattttcatctaatgtattatgtcaaactaggttaaaaataatcaaaattagattaattaaacaataaaattgaaaaagaaaatgatcggtatagttgcagtagtagcgtgctctaaattcaaatattattagattgtttttttaattatataattgaaatttaaaagttagtgatttgtaataaaagttgactatcccctaaggatgaataaataaaagaaagttatcaatggtatagaattctaaatttctagtataattaatgttgaatatttacagtaagcctaaatgagataatggtatgataaattttcataatctaagtaaacaatgtcgacaaagcgggcaagtgggatttttcttaagccaatttccaatgcagatggaatggaaaatgtggttgcaaactgggaaaacctgacaggaatcccctttttcaaaatcctctaagcaaattacacattcatcaataccattctcaccagaacaagagaaagatgatgaaggtgaagaacaagtaggttgtttcaattctgtactattattatggctcccgtaaatgacacacggcggcagtttctccaaggctcgccggtgccgcctcctcccttctcgcccttcccctaaatgtctaaggattctttctaacatttccaagacatgtacgttgttttccagatcatcatggtttccacgttcagcaccactcgttcgatgaaaatcctgagtggattcattggacgtattattattattattattattattattccctgcttcaaggtcgttctgacgtgactcgttgaaaaattcaaaacaactgtgcacaacggcgacgatgatcaaggaaatcatgatggcaaaagcaacaatgcaagcgaagaccacgagtagaatgagtaatcctgtgagaatatagaaaagggtagtggaaattgatggcgaaataaagattaaaggaggaggattttgtgtcgatggggaagacattataattgatgttcgaatgttttgattgagctttgcaaagctgctgaggtttgggtttggctactgccctttgcttggtatttgtccatgtaagttgttgccataagtagttatatccatctaagagttcttgcattattgttcgaattaaacaacctttattttatttttattgttttttaaacatgttatttgagataggaagcaaaactgttttttttttcacttgtgtgacagtaggcaataaaaaataaaaatcggttacatttgattcctcattatagaagtttaggtaaaacaccataacaaaattttaggtaagtagatattgggtatcgaatattaatcaaaaaaaactaatataaaaaagaaatgggataaaaagagttgggtttattgcatggtagtttgacacacgaagcaattattagttatgaccataacaaattactaatatttactatcatttgcctttctaattccttatagttttgataaggttctaattcctttagagttatatatcatatgtctttacaatgtataaaacgtgattaactttttttttttttaaattaa

SEQ ID NO: 300657 - DNA, 1113 bp, Cannabis indica
aaaaaaacacaaacgcatagatcatgattgatgtcgttcagttatatttttaattgtaacgacaacgacaacttatgaggtttcttgcaacaagatgtttctaaaacaagaaacgtttctaatttattttcattccatctgcctccgactgactcagtggcatttcccgggaacgttttgatttctgacaattttctgtttttgttttgaaaattacatccaatcaaaaagccatatgaagctcaaacgattcctttcaattccaatcctcggggtgtttctgctgttgggttttgtgtattacatcacgattttcattttcattgaagattggattgggttacagaactcttctggctctttaaacgctttgatcttcactttccttactgctttcagtattttctctttctctgtttgtgttctcactgacccaggtcaggtcccatcttcttatgcgcctgatgttgagcaaagtgggatctcagatgaagaaaccaagagaaaagtatgttctttttaatagttttttttttaaaaaaagaattatgtctcttctatttggttgatgagatgattggggttaataaaaagaatttaaagttggtaattttaattgaaagtactgaaaattgattctttgattggtttgcatatgaatctttgtttgatattttgatggagaattgttttaatagtttgaattctgaggccccaacatgttactgatgaaagtatgtgaaaggataacagaattggaatattgaaaagatgctggttgttgaaattgagctggaagacctatttttggctctcagtggtttaattttgggattctttgctagctagtgtaatgtagtggacaatatgggtgatatagtgaggtaagtgagggaaaatattgagttatgaattatgattgattggtggaatgttgtaaagatttgtgatttaagcttgatctatttcaatgcataggagattgaaatgttgttgtttttctaaccttcaagactgtgaaattgagctcttcattatatggtttctttctgacaagactgtaccatcaaagatctgtgacaggtgcgcgacatacaaacctccgagggctca

SEQ ID NO: 300658 - DNA, 1854 bp, Cannabis indica
ctatattaatcagattctttttaataagtccctcactacactaccaacgtcttaagaatcgaaatttagataaattctctacttttgatcatgaaaaccttactcattttcatcattctcttatttctaatcagtatagtcaaagtttcaagcacctcaagagtagtaccccataattccaaactgaatatttctaaaaccaatcctcctattccttccaccacccaacaacccaaaaactgcaacaaggtcaaaacagtaaaattatataaacccatcgctcttgcttcctcagcaactctattagcaatattcttctttcttctgggttttactatgttctggagactaagaagaaaaactcatcatcagcagataataaaaaacgacgaagagaaagcatctctatctcctagagttttcgtaactgtgaagaatcaacaacactgccgtcgttttaccctcgacgagatccgatccgcaaccaacaacttcgatcccgatctcaaaatcggagacggcgggtacggaagagtttacaagggttacatagacaacgacaaagaaaatccagtagcgatcaaagtgttgaagttgaaatcaacctcaacttcaacgtcgttgatccaggaaattcatgcgttttggctcgaaatcgaaacgatttcgaaactccgtcactctcatttggtctctctgattggttactgtgatgatgaacggttcatgatcatagtttataaatacatggcacacggaacactccgcgatcatctttacggaaccggtggtcatgaatcgattttgacatggaaagagaggttagagatctgtataggcgcggctcgtggattggcttaccttcattcagcgactgagcgtgggatcatccaccgtgacgtaaagactaacaatattcttctagacgagaattgggttgcgaaggtttcggactttgggctttcgagaatgggcccaataagcccatcaaaaagtcatattactacaacagatgcgagtgggacttttgggtacttggatccagaatactttcgaactagacatctcaatgctaaatctgatgtgtatgggtttggggttgtgctttttgaagtattgtgtggtagagcagctgtggatatgagccttgatgaagaacaacagagcttggcccaatgggctcagtataatgtgaagaatgggacgcttgatcatatcgtggatgagaatttgaggggtgagattaggccagagtgtttgaaggtgtatggtaagatagctaatagatgcttgcgtagtgaaaggaagcgacggcccacgatggctgatgtgttgaaggctcttgagattgcacagagggtgcaggaaggtgatcctgcagccgcggaggaggggattaaaattagtgagtctaatagcattgaggaaaaaatttcatgttggggtggtggaaatcaggtggatctaagcccaccgtgtaaggatattgtggtgaattcttgtccaacagtactttgcgagaaaacaaagtctcagaaaatgttagtgagattttttagtgagaaggcggggtttaaatgggccttgcaaccaagttctcgtgctttgattaaggctttgtgtttcaagtgttcgtatacacttaaggatcgtagtgaaagaatatatgaccctgtgcaatgatttgcttattaattcctttgtaactgaataataaaaattaaattgttgatcttagaaattaaatacacgaaggatcaccagtgaaatggtcaatagctccatatactttgggacaactgtaaatggtcaatcaatgacaaacatttttattttattttatttgtttatatt

SEQ ID NO: 300659 - DNA, 1715 bp, Cannabis indica
actttttatgtcatatttatcataaccttaataatttttctcatattttaaaaaatagctcttatatatattatataatcaatatatatttcaaataggaaacgtgaccacttaaatttttgacttggtagtacatacatgccactttaatttttgacttggtaatatattggagttttattgtgttcctattaattaggatcaagatccacccttttactaaaagattaaaaacaaaaagcaaagatcaaaatgaacgttcatatgtactatattatatatatatataatacttaaaaaaaaaaaaaaaagcagaatatattgtttttggctgggttatgatatttttgctgtttctgttttctttgttcaatcattgtaatgagaagacctattgaatcctggagattactttgtaaattcttaaggacaatgtgcacgcctcaagcgttatcattttattattgtatttaatattttcgaacaattttattatgactaaaggtaagattttttgtagtaaaataatttataaatttataaaaaacttattatatttgaagtttcaacaaccatgctatagcacgtagctatattaaactacttttcttctctccttggtaacgttatgtcatgtacgtaattttcaactttatgttaagaagtgaagtccaaatattggaaaataaatatggcacctaaattttagtttgcattgatatgatggaataattagtgtccgatttcgttttcattaattttctgagtcaaaatttcacatatatattacaattgcacttttgttatttgaccgactccaactgatctagaaactcatcactttcagttccattatttgcgtgaagaacattctaagcacacaaaaaattcccatgcgcgtgtatacaaaatattatacattgacatatatagggacatgattttgtccgtgattgtactttcacggaatatattcggtgatatagggctgagggctgagattgatctaggtaaggttaaaaaatagtaacatatcctgacactctttaatgtactctgagactatctaatataccacagaatacattccgtaaaagtacatcacagaagaaaatcgtgcccttatatatgtatatatttagtacatatgcagttatgaagtactattgctaaagtagtctatatttgatgatcaaaggagaaaagaaatatattaagaggtttattactacatcccgactccattatatcatctgcatgtgtaacgtatgaggatatataactacgcatactataagtatatataatttatacacaacgtgattatatgaaatatttattattattccacacaaatttaaatttcgtgtcaattttgcataaattttatgatattttgatcagtcgtgtatagtaattaatttgttaataatgttttaaagaatgtatattttcaattgttaataagaattaatatatattttccattaattaatgtatattatcgcgtaaatatataattataataatcagtcgtgttagttttttttagaaaaataaaaaatggattgccttttaaagttcgtccatcgattctatataaaatatgtggttatctctcatttttcttagtgaatagattagtttagttagtttattgatttcactattataagtgaaatggcttggctattccacttagccgagccagaaaa

SEQ ID NO: 300660 - DNA, 3348 bp, Cannabis indica
gtagcctacaatttctgagtgaacaaaaagaaatggatatataataataatatcactccctttcaaaataataataattccctttcaaaataataataataataataataataataataataataatatcacctttttcaaaagattacttatatgtgttagttttttttaataaatgaattataaacactttattattattattattattagtatgttgtttgctttaattttttttttcttttcatattattaatttatttaatacaaaattatatgtatatatatgttacagtattcgataaatgtggctcgtataaaattaattatcatgaatattaattattaaatataagatatattatggtattgattaaaccatagatgggtatatataaaaatgaaacaaataacaaaataataagatagtgtatttctttctataaaataacattatcaataataattaatttaattaagtactgttatatttttattttatttttgcaaatattacttagaaatggacctgatttagtaatgtagggtcattaaacaattggatgcatatgcatgaattaaatatatatatatatttatttatttatatatatatatgtatgatcctaaaaatctttgctatattctattttatgccatagattgatatcttgtgttttgatccatacactgtttggattcttattattttcttataataccatttgtcatatacttaggtaactgacaagaatgaggtgcccatagggaactaagtacttaaattttcagattcaatttatatatatatatatatatgtatgtatgtgcatcttacatgtatatgaaatttgatataatataattgagaatattatatagagggagcaattatagtggagatggtattaataataataaaattttcaaatatatattaaagcttttcaacaaacatatgcatgaaccctttttgaacactctgaaaataaattaatattcctttgggttgatataagaaatggctaagttttttgttattttttctaatgaaagtatatatattgattagactagacttcattaattaatccgtacaactattattattgttattattattattatttgacagatgtagagtgatatttaacttactttattatcttatacatatatgtacgtgtagtttaggatgttgattttagtgtcgttttaagataaatgttattttcataccaataatataaagtaataaaatccctttaaggggagcatattatgtcatcttttgccacgtaataaacaaatcaatttgaaaaacgacaataatatatatttggttgcattatgcattattataataatgtactagtgaaaaattaacatgacaatatatttagttttgtcatttcttgatcacttagataaggaaatttagggttgagaaaaggtattgcaaagttttgtttttaaactttaattaactaagtatcatactaattatgtttgttgattatgttttgtctaataattaagattttctattttgggtattgcatccctagcaataataaggagaaatattagaatgtaggacttttatgaggtttgaatctctctagactcaaaaatttaaggttactaggaagcttctcgatcgaattactagcgctcgcaaggtttattttggagaatactctattttgtacttttttattagagtaccttaggtcaaacatgaccgactctgaaatttaatggatcattgaaaaaagaaaaacaaagtacttttgagtttttatttagataaaaaaaatataatatttttcaaaattaataaaaaaaattgtgtatttttaaaaaagaatttttttgaaggccttaagctaagtggacccgaagcacatgcctaacccgtctatatacttaaagccgggcctaatatcaaatttgttatagtatttggatatattattattattttgcaaaatattattttccgtacaatactctagttaatcattattattataaagattgcttggtaaaatttaattgattacttttgggaggtataaattataaacatgaacaaaaaagaaaggatttattagaacatatatattgtcaaaattaagtagttcatagaatcatatgtcttttaaagtagataacaataggctatatatatttagtacatgtgaagataattataaagtataagtgtagtcaatctcaaatgaataagtgatgtttttattatgtgggctaagtctttatataagacttgcacgtcacaataagtttgtggtgcaaaaaatatatagctttattttacaatctcattcactttttcttttttcttaaaaagaaaaacaatttcattttgaaatgataacgcaaagttaattgcttattacattaaattgcaataatttgtgttgatattgaagaaagaaaaaaaaaacactagagtttggccaaagatattggattttgaaatgattgaagaacaaccaataacgttgatttaatactttatagggcttaggctagacctatatttttacactttcttacatatattttgtcaaacttgtggggttgatcatgtttttaatttattttatgagaaatgttaaaatgtattagtggtgtttagtatttttttatgtgataatatagttattggtctaaatatgtatcaggtcccatataatttaatataataatttttagagtgtatcgctagccaattgcaaggtgacatatctaaaagtgttaggcatcagtaacactactagtggctaatagcaatactcttattttacttatttatttaaaaaagattaatagaattaatatcactttgatgatgtatggtcatatagcttcttcttcttttttcaaatttttcaacataaacttgttctttgaaaacaaggaattagatatttggggttatttttaaataataggttttaacaaaaataaataaataaaatatgacaattataagggaagggatgtttcacattcttttatgagtttaatttgattaattatatttgttgtaatttattttttcttgaatgcatacatgttaaaatttataagtacaaattgagtactctaaatagattgataatttttcaaatctatttaaattctatgaatgaaagaaaaaaaaatcacaattattttacgatgaggtgggacggatatgaaagaccaataacatcaccacttaaaatggaggaataatataggaataatatacttgttaaaatgtggtattttatattgtgttaaaccaatttaaatttgacatgtcagttaattttt

SEQ ID NO: 300661 - DNA, 1715 bp, Cannabis indica
aataaaaaaattattaattttttctcatcttcctatttcaaaataaaattactactacaaagttatttttggtctcggttcgagggtcacttaatttaaaaattcgacaccaatgatcaacatatttcttaagtctcggttataaactgacaccaatgaatactcaatggtgttggttagtagagcaacactaaaagaaaaactaacacttagaaaataaaaaaaaaaataaagaaaagaaaaaacacaaacaacctctttggggttgtttctaaatcgacgcttcagaggttaaaaaacatcgatatgccagggaagaaggccaagaataaagctgtccaaaaactgactccccaacatctagcatagccttgccgcagagggctgaaaggagaaggtagaaagggagaatgccgagaaggtcaggttagaaaagagaaactcttggacctagaaggagtcgagatccacaagtttccaggaatcgaggcctacgaacccaagcatactctcgaagccccagctaagggggtagtttctaaaatgttgatgctccaacaactctttccctttcgattaagcctcccaagacagacgaagaatacatgaccatcaatgaattaactgcaagtgttacttcgtgatacacatatgtagttgtcaaatttaaagaatccagaaccgtaggtggagtaaacatatagataggagttctaaaaaattatagaatttgtgactacagtgaatgtaatggtggagaaggttgatactaaagacaacctatcaaattctattacaaagataatgtcatatgttacatttgatcaggacatcaagaacatgagattaattgaattgtacttttagttttgtattagtacaagtgagagtttgttggtgttttatgatcttatttactatcaatgaagatcaaaaatcatatcttgaacttgtcatatgctttgttcacatgtttaatcatgattatatgtttaatatataagttctattaaatattgaacatatatttattcacaattatagtgatgtcatcacagtataaaataattgtgattatatgcttcaaactatttagtcttgagatttatcagtacacagggtttacactgacatgataatcgtgtaacgtaccaaaaactcatagacataaaaaaatctttttaaacataaattcaaagataagtatctaaaactccatataaatttaaactttttttgaagtatgcatatacttaaaatcattaaaaattacatgtcccaaaattattattcagggtgaacctaaaagtttgagtaattgaactttaaataaaaccactcgatctgaaagacattgatagctccacagtcgggccacatgtacatttcagcaggtagacttcagcactcactggtctattttatttttcagcttattgatgcgtgtcatttaccacaagaaatttactattttttattatttcaatactactagttacttcagtatataataattacaggtcgaacccacggaacctactatcaatttattattcaagaattagaaataagaattaaaaaattggtttttaatataaagtaaataatataaactagaaagcaaataaaaatagataatacactattaagaaatagttaagagtcaatctctaccctcaacaatcattcaagatcaataataataaaaaatattc

SEQ ID NO: 300662 - DNA, 2119 bp, Cannabis indica
gacctactcactgccccgatgaccaatctccctcccaaacccagatcatcgcctacaagtcattagaatgaaccaactcctaaaccgtatatggagtttgccaaaaccatatttgaagagcaaatgaccatctgaacccacaaagaagaccacatcctagcgaccatgccctaccaaaatagctacatttagtgatagcattttagtcacaacataaatttttcgtgattaaatgtgacttttagtcacaacaaaaaaattatttgtacttaaacatagtatttaaatacaagttgtcactaatttagttttagtcacaacacgcattgtgactaaaaaatacatttagtcacaacatattgtgatttttgtgactaatacctttagccacacaccttttagtcataacatagaaatgttaatttataattagttacaatttttttcatatttcgtcataagtattgttgtgactaaacataagattttttgtagtgatatgaaaccccacacccagagagcaaaacgtcgaaaaggaaaatacatacatgaaagacaggagatcaccacatcgtggaattgaattagtgaaggcagtcccgactagagccacgcccaaggccaatgaaggtggatgcagttgggaaaaaaaaaataagagtggcaactagagagaattaataggaaaccctagcaaaccaaatatgtttaatagacaattaccacaagtctcaattgctatcaataatatttacaaaatacaaaataaaaaatacatctttcacaatttagtacaaaattattcactaataaataataatatatatatatatataatttattctctaaaaacatttaagcattttgtaagttttatgagaaaaaaaaataataacaattattaaatgtaaaataataataataatatataaataaattaattttttaaatataaaatttagttaggttattatttttttaattattattaattataagtccatcgttcttgtttttttaatttgttttataatactctttgtagtatttttaaagacatctcaaacttttattcatctcaaatcagtcaccaaaacagaggttaataactccgaggtagcatcaacaccagaaaaaaaaatacaatcaacaataaaaagagcggttctaacaacaatacgagcgactcatttcacaaatcgctttacaaagaacaaactaataaaagataactctaagagaagtaatttacaaaccgtagtttatactctttatagttaatattttattcaaataatttcgatcatcacatgataaaagagagcaaagaaagatgaaaaaaagataaaaataaaatttgtatattaaattttgttgaatgaattaatgtgcaattgaatagaataccaaaagactttaaagtaaactcctataattaacagctttaactaccccaactaattactcttaccaaacaagtaatgcttaataatcccaacccttaaataaaatgtccttaaagaaaatttagttacaaaacatattttagcatactctaagcttgtcttagcttctttgtcttcggttctcgatacgacttttcttcttcttgttctctttcttcttcttcatctttcttcaaaaataatcccaattttgttaacggcatcccagataatatgttagaagaagagtagatttgccatttggaatttcttccaacatatctacacgacggtttgtacccacataacttttcaagttctaagaaatccttaaggttttgaccagtatgatcaacttgtgtcacctgtgttgattatgatcataaaacaatattagttagtttataacttattagttattacataacaatcaatttaccaattaaacacaaaaatatgataacaaaccttttcaattagagctaagtgagcttttctttctctaattagtcgttgtaaattctccattttttctttttcttctctctccttttgtcgttgtacgttgagaaatttttctctttcttctctttctctctgtctttgtaagttgaccattttttctctttcttctctttctttctgtcgttgtaagttgacaattttttctcttt

SEQ ID NO: 300663 - DNA, 2151 bp, Cannabis indica
aatttcttgacttccatttgtttctgagacttattgagccctcagacattccatgccattattctatccattaccaagaggaggatctccccctcaattagtaatgtctccccctcgttccatctcgacaaccttgagtttccataagcattgaacactttccaacttttccaagaacttgaaaattatttccaagtttagttggtgtggctaccatactcttaacgtttcctcaatttcgtaccattaaattcctttcttgatctacttccacatttaaatccaccttaacttccttttctaattttttctcaggaacccatatagctcgaacatggtcattctccacattcttcttcatacaatcattcgtagagtgccccaatcctttgcaatgattgcaaagtatcagtttccattcattatgtaacttataaccatcaattcttcatcccattcattcttgaatgagacttcctcaagaaattcttgattcaatccaacttcaatcataatctgagaaaaattaaaaggctatttctttttcatgaagtcatctagcataatcagtttcccaacttgcccaatgattttgaaaagagctctctcactccaatccttaaatccaattcatgaatttggacccaagttggagcataattcacattctccttcttgaagttcactgaagcatcccatgctttcattacaatgggcttcttatctaggaaaataaaaccattagtcaaaattcaatctctggtttcctcatccacaaatcgcacaataaacacaccattagaaatcagtcaaaccttatccactttttctttccaaactcttcttataaaactagcaaaaacacatataggagggttagctctaagaacataacataccaaagtaaagctccaaaatttaatctcattagaaatatcatccatttcaatcttaactccattacctatattgtgtatattttcgtttcagttctaaaacatagaattcagattttgcaccatttttccagatatcaagattgggggaataacaaaggtacctaaaattaaagcatcctcacaacgagcagacgcttccatgaagtagaaaaagtcttttcaaatgttttcttctctttgaatctgccagaggaacgcgtgtggagtgagcaccaactcatcaaactcttcttcttcaacatccagatctagttctaaaatgttaggcaaatccacacctaaaagttttcttcataacgtctaacgacgtcaaaccttgcttcttggcactcggagccaccactttcttcaatcgccctttcttctttgcaccctacaccatagcatagcagtcctaatgagagagattgagaggagagagaaactctcttttgatttatttcgataaaaatgattattagtgcttgaaaactacgttttctctccatgtgtctgattgaaaagtgatagacaacggtcctggcttcttccctgtgaaatttcataatttttcgtgatgtgtagggtgatattttcagagaacactaacgattgtaagtgtaagaaaaaaacgtgttaaaatttaccctaaaaagaagaatatattcaatatttgaattagggggctatttgaaccaaatttaacgtgaaacctatctacttactcatgtcttagtagtatgaattcattatacctagcggagaaaaatattctgagatgggtccgaaccacatttcacaaaagggtatcactgttagaattgtgagatttttcctatgtcaataaaaattatcattagttcttaaaaactacattttctctccacgtgtcaaataaaaaagtgatagacaacagtcttagcttcctccatgtataatttcacgattgtttgagatgtgtatgctgagattttaagagaacactaacgagtgtaagaacaagaaaaatacttattaaattttatcatgaaaagaagaacatttttaaatttttttattaaggggtcattttaacaaaatttaacgtgaaacctatctacatattgatgtcttagtagtataaattcattgcgcctaacagagaaaaatattaggtccggacaacatttcacaaaggggtaccactataaaaaaaagtgagatttttactatt

SEQ ID NO: 300664 - DNA, 1334 bp, Cannabis indica
atttctaatttacattttcgtcttttgtctttttgttgaaaaaacgcctagttttcatcgcctaaagcctcaagcaaagactcacatagatacatataggtatattcttaatactttaccgaaaatacccctactcctcaatgagaaactccattagcggatctgagcaagaacacactgagttcttgacccgggcactcgtccgggttgatcaggtgaaacgactccgagtcagcattccccactacgtgctcgtaattagccctcatgtacattatctcctccgaatccgacgacccgaacccggacggcatcaccccagcaccgaccgttgtcgattgcatcgtcttcagcatcaaccgaatcctgtcgctcgccttccgccgcgccgcgaaccccagctttcggccgttgcagtacatggtccacacgggcaccgatcgcagcgggcagcgcccaagatccgacccgtctccctcgagagcgatccgaacgagtccgaatcgcatctcgttgacgagttggtgagttagaatgggaaactcgaggaggatggagggtttgaaggagagacgatcgtgttggatacagaaccagacgtggcctctgcggtggccgaagatcgttccgatcaccatcgatttggatggacgaggctgcgccgccatggcaggagatggagatggagaatcttgatcgtcttcgttgtcgtttggtgattgggaaatgtagttgtcgggtaagtcgtcgcgaagcgaggtgcttaagcgtttcttggtggtgtgggtggcgttagtgacggtggagacggcgtcggccggacagaagcaagggaggaggtaacgacggaggacgtcgatcttggtcatggctgcggggtaatatggtaatttgacataaagaaggaggattaggattaatgcattgtacagtaggagagtggagaagagtacagtccgtgaaatttatagttaaacaggttgcgcgggaagtaatatagccgttacgtttatacaatttttagctgggagaagagattacacgtgtgattattccttcttttagctctcggtgtgtctactgccacgtgtaaactttttttttcttttaggatatttatccattgattagatgagatgaaatgaaggttggattttttttatcttaatgtcgttgaaaatattcttaaaaaaaaaaaattatttacaccccaaaattttgtaaagactctcaattttaataatttttattttttatcaaatttatatttttaattgtacttgttttttttttaaattttttttcttctaattcatattcttaaaaaacatacc

SEQ ID NO: 300665 - DNA, 2166 bp, Cannabis indica
ttttttttttttgaaaattctttaggtctaggttgtgtgggctttgtgagaaaatatcttagtgttccccactgcacaggtagaatgaacaactctcatttccattatcttgtccagaaagttgcttctaaaatgaatgtttggaatgataaattcttttctagagcaggcaaagaaacccttattaaggttgttgtccaagctatcctatcctttgctatgtcctgttttaaactccccggagccacatgtcaaaccatgtagagactcatttctaggtttctagtggggatcttgcagtaacaagaataagatacattggaaaaattggtctaccctctgtactataaattttttcagggtcttggcttcaaatcccttgcaaaacacaatcaagctttaattaccaaacaagcttggagaatcttgaccagtccctctactatgattcactttctccttaaagccagatacttcaaaaacaatgacttccttattactcctaaaggtcactgcccctcgtatacctggagaagcctcttgtggtggagggaacttctcaagaaaggcctttttggaaagtgggaaatggcaggtccatctctttgctcgaccctaactggattccaagtttgcactccctttcttttttgaatgattttaatccaattttccacaatgtatcttttttcattgataataatagtacctgggatttttcaaaacttctacaatttctgcctcattatcaagtttaggagattcttaagattcccattgatccatccgtgaaggataacctcatctagggacatcatcactctagaatcttcacagtcaattctacctaccacttagccaactccaaccccatgtcgacattgccaacaccatccaaccctaattgttttaagcattggtgcaaaactgtctggaacaccaaaaccctcccaaaaataaacatttcacctagaaagcttttaaccacatccttctttgaagcctgaacctttttcaaaataaatctcttactaacccttactgcccagcttgtaaaagcaaagtcgagtctgtcacccatgcccttcttcactgtcccaggggcaagtctatgtgaaaacaatcttcactcaaaacgttttacactgaaaaccataattgtgacatcaaagaatattacttaatatgtttagatcatcttaataatgacaatatcactttgcttcttagtttaacttggcagatttggaacaggaggaacaatgctcttttcaaccgcaatactaacaatcttattgatgtgaaagactatgtttatcgtttattgcaggattatcaagcagcccaaactattactttccagattagctctctagatatcattgcctcggatcagaactacagtgctccagcaacacattctctccagcatggtcaatacaagctaaatgttgatgctgcccttgattttaagcagcttagaataagattcggggcttcaattatgaactggaaaaaaccaaacgattgtagggctttccatttctaaatggggcgtctcaacacccctctttgctgaagctcaagtcctcctagaagcccttaattggtgcgttacaattaagcttccccttggctccattaaatcagattgcttacaattggtctcaaagcttgagagctcttggaaggacaactcagccttgtctagccttgtctagggatgcattaaggcaggataaggatttagaggatttaatttctcctccttgttgtgtatttatgtcgttgtttgtttgcttcttttcctcttgttacaattacttcaaaaaaaaaaaaaactagattaatgtttagtgctagatcaacaaattatttaaaaaaagagtttttggcggctaaaccctcccaacggttgcttcacttgtatttaaccctctaagctcaagttttgaagataaaatcctccaacctactgaactggtagcaaatttaaggtgtcattcggtttagtatcactatgaattcttatgtatacactttggtacacttaatattattatttaaaaattattttcaaaattcattttgaaattaaataaaattataaaaataaaaatattataaattttgaaataattttatatttcttaaataataatatta

SEQ ID NO: 300666 - DNA, 3587 bp, Cannabis indica
accataaagtaaaaaatattttggcatataacttgccaaaaaacgactttacaaaaaccttgccatggcaccttggaggcgcaattagcgccacagtgcctgacacttttctgcttcaactgctctcagtaaaacacacataacttttgaatacaaactccaaatgagctgattcaagatgcgttcaaaagctgagaaagatctctaatactttcatgtttcgatattttttttacgttataaatcaatgtatttctaatatttgatcaatttatatattccaagtgtcaaaaactgaaacaaaaaaaataagcctagttatattctaaaaactagaatttaagaagaaattagatactaaaaatactctgaatatttggctaaaaatagcctaatattaggcccgtaacttttttgggtgattatcaaagaccatcttttcggtcagcggtttcttgtaaaaggacgacaagatagttagatgttggctcttcatcgatctctcgtcgttgttgggcactacatttagaggattttattaaggttaatattgatgcggccttagctaacaacggtggtttctgtggtatgggtatggtgatccaagatttcaatggttcggtaattgctcatgcaatttggccttcagttggtcactttcttactaaagttgctgaagtacttgtattgtgtaatgctagagttcaatgtcgtcttctcaactccgagaaggttcagtttgagtctgactgtcttaatgtggtgactaagtttaataatgtggctgcatacactcttactaaatttgctttgactgttgcttcttgcaaagtttgttggcccgagtctcctgacggtacgattcattattacattgttatagctaaggcttgttataatcaattatgatcttgtcccttctcccaaaaaacaaaaataaataaatagagtaatactctacaaaaatcattcttggagtggacagatactatgtattttaaaaaatacagattatattgaaacctcaaattgagaaattggactttaatcattacagtatacacaaatgaccacaacaataatatagaacgtacatatagtttatttttctgaaaaatttaacaaattatcgacaaatcaatggaggaaggtcaggtggaccatcataaacaatcatggaaccccagaacatccgacggtcgaaaaccagaaagccaagtgaatatccagcaatagcagcgattataatacctatattaaaggacatgactgaaagcattaccaaataagccaatccaactcgaaatccatacatgaaagtctgtaaaactccagctttgactacattgtcgtttatgattgacttgatcaaccttgcttgggaaatccactctataaccatacacacaaaaaacacacaactcaactttagaatatatgattcaatgctttggctttctgtgtttttcccccaaaagaatgttacttgggcttccatatattatttattattattatttctgtatcggaattgtactttctcggaataaagattttatgtgggctaacatttttctaagtacccatatatattatcatatatcttttattttgatctcttcaagttgaagaaaagtaaaaacttaaaagttcgtactaattagatttgttctcctgtactacaagcagtactactgccgtacttggaggctgtattcgtatatatgggtggaagtccaatttttctgatagtaccaatcgaatagactgataatcaaccatttttctacaaaagaaactgaaaccatattactgactctcaccaatattttctttgttggatgagaatgtgaaacttgattaacatctctgttctaatacttctatgtttcaacaacttttccttgcattagaaaattaaaagtgttgtataattatcacagaccgcaggaatagtttgtcgtactcctagaacaaaaaaagtcaaacagccttacaaaaaaaaataataataataatataaatagttgtgctatcttcttgtctttactttccctttggattcaaagtaagatacaaatacatatataattagaagtatacatgttaaatttttttttgacggtaaaagtatttaaattttattatttttaatattaaccataaaaattaaaattttaatggcaaaattattttgttttattctttatactttcgtctaaaaattcagttaagtggcacattaggttatccacgtgtacacaaatatacacgtgataaatttttattgattcacgtaatattaagagttaaaatattataaaatataattaatttttctttttgaaattaaactctaaaattaaaataaaaaatatatatcatttattttccttttattatttttcatttcttcttcgtctttcttatcctagaataccctaactccattaccacctccacctccatcaccattgccactacccaccactaaatccgtagagaaaataaaaaaaaaaaataaccatcgctaccaccaccacaactatactacaataccactaaaaacaaccaccgcaccaacaccacttctactatcacaactattatcgccatatcactgccaccaccaccattattgttacatttttaagatcaagaaattgacacctaaagccaaaattaaagaaacccaaaaataatgacaaataagatccaaaaaaataaatgagaaacaaatcaagatctacatggatcgttggcagataattaacatggtctaacaccatcgtcctcttcatcttttctttcacaatgacgatgtatttttagtggatgttccgtttaaggtcgccgacaatcagccaatgattttgagaaaaacagagggagaagaatattaaatctgagagagaggaggaggcatacgtgtgtgagacattttggaaatcaatgtacagtgaagctccttgaaccaccgaagacaaagaagaggaaaggctctcgagttggcaacgacctgtgtgcaacaaagtgagtaggaaagaggtcctcctaggccatttgtggtggaggaagcagattagagtcggggttgcattctgggcctctaacaatcttgaccctagtttcactcggagagaagaagcttcgagaaaaggatagaggagaagaaagagaaaaagaaaaagatgaaataaaagtaaaaaataaaatatttcattgtaaatatattttttttcaatttttaattatattttataatatattaatacttaatattacgtggaccaatgataatttgtcacgtgtatacaagtgtacacaagtgtacacgtgggcagtctactgtagtacttaagtcatgaagtttttgaacgagagtgtaaagagcaaaacataatgggggttcagttggttttgctgtcaaaatttttattttgtggggttaagtgttaaaaaatataaagttcagattgttttgccgccaatatccgttttgatttctattaaatatattatataaggtaatgaagagatattttgacataacaggaaattagtacatgatagtgttggaaattatt

SEQ ID NO: 300667 - DNA, 1867 bp, Cannabis indica
gggcataaaacccaacaaagaagccctataaaaattgttgctatttgaagaacaagctagacggttgacaggattcaagctcacaagaaatgcttcaacgatctcacagttgctctttgctgacgacagtctccttttctatcatgccaatgaaagcccttgccttgcaattaagcgagtgttagatttttatcaccgggcttcaggacaacttcttaactatgataaatcagtaatgtctttcactcctaataccactttggtggctcaggtttttttccatagaaatctctccatgcgcatctatgaatgctatgagaaatatttaggcctcccatcatatagcgacagagataaacaacaactcttcagtgacattaaagagaaaatatggcatctactgcataactggaacaaaaaaatcttttcgactgggaggcatgaagtgctcctcaaagttgttgttcaagctatgccaacatatgttatgagctgctttcagctacaggtatatatttgcaaccaacttgaatctatgatgacgaacttttggtggggatcgaatgagaacggttcaaaaatacattggagagcttggcatctactttgtaaatcaaaaattgatgagggaatgggctttcgatcttttgaataatttaatcaagctttattaggaaaagaaagcttggaggttattggaaaaactagattctcttcttggcaagttacttaggagtcgttacttcccacataatgatttccttaatgctcattatggccatggcccctctttaacttggcaaggaattatttggggtagggagttgctcattagaggattacggtggaaaattggtgagggaagactagttcaagtgcaacagatccttggatactaggcattgaattctttactcacattcgatattcaggctcaaacaatggaatagttgcccacctaatcaaagacgaatgccaatgcaatgttccccttcttaagcaatggttttcaccagtggatgttgattgtatactaacattgcctctcagttttttttagagtactaacactctaatatggcactacaatatcacgggtacatacactgtgtagtcggggtatcatcttgccacatatattgttgaaacagaggccaatagctgttcaagttccaattcacaagcggcctggtggaagtttttttggtcattacaactcccacaaaaagtgaagatctttgcttggcgatttattcataatgccctacggttgctacttccttggttaggcaaaagatcatcacggactcaacttgttcggtttgtaaatctgcttgggaatctataggccacgcactgttcagttgcaaatatgccaaagctgtatggcaaaatctgaatttgttttttgattggagaaaggcatcaacaatgttcaagggtgactacttggtatatctctcaatcgtatacaaccagcaagagatggaacttatcatttgcactctttggtctatttggacggaaagaaatcgcattgttcatcgctccacaaccaaaccagtaccagcagttgcttcttttgctgtcaattacttgacaaatttcaaggcaacaaaaaacaagtatcatgaaacaaacagagacattgttcatctaccaaaacgagtagaggctaatcctccatggaaaccacctactggaagagatttgaagttgaatgtggattccgctcttgatgcaaatctaaacataattggtattggggctgtggttcgtgactctacaggcacaattcttactgcacaagctaaaccaaaaatcgacaattttgcttctcgtgaaatggatgttggaaattatttta

SEQ ID NO: 300668 - DNA, 1862 bp, Cannabis indica
gcaaaacacaaccaaaaatttcaagaaaatgaaggacaagctaccgtgtgttaggaaagaaatctcacttttataaatttataagtattgttacacagatttagcataatgttaaaatagtggagctaaaaaaatttgtagaagaaagctagaaatagtggaaaaatgtcccataaagagtagtgtgcatgtagctagtagctacacttgtgttgtgtgtttacaataaaataaatatatatttatatatatgtgtgttcatatatatatatatatgattgacctaattattcaactacataaaaaaaaacataacattgaattgatactaacatttctcgtattttctacattatcatcccactaagcaatatattcctatacattctctcaaaaaatcatgttcacttatatatatatattccatcttcacttattacttatttttttttttttctaatatatacatatatatatgaatccctttatactatatttgttttaattaaaaattacatgtaattacaagctagtcgtaaataactattttgttatcttacgattaatctttttgttttagttgttgatattaatatgattattttataaatctaatcaatctaattttccccaattttcaaaatcatttcttacttttcttttcattttaaaaataccttttcttctattttattttatattaaaatgttctattattttctacaaattatattagttgaataaaaaagattaagcagagaaagaaagaacaaaacccaaaaatgaaaaaatagaagaagaaaaggaagtgtattatactacctcttgcaataataagctgaaaaatgaagataaaatcttttgtaaaaaagctcaatagcataattttgcaaaggcaagaaaattagaaaatcccaatcagacacattatttttcatcataacactaaccttatctccatgaacttttgtttcaaaaagcacaccaaactcgaatttatagatatttgtttactaatctctttttatatattgcaccattccattaacaacaactttagaaaaattcaaagcagcaaccacttattcctgaagcacctcataggagttacttgcagccgttgtcacaccaggacctagtaattttttattgccaattctcacactacgaccaagaattaataccacacgcatgggagccattcatactttatagcttgtttcatcaattgaatatggtcattaaagaaactaattgatttgggcagcatctgaaatataatctaaactttaataaacactcgagctcatagtaggttttccatttgtgctaacaagagcactaaagggtatttctcctccaatactgaagccccaacccattcaatcaaatccaaattagaattgatcgtatgaagatcactacaccagagatgtattagcacatgtttcttgtcacagtgaattactcacgtctcaagaatcaaattaggagttgcttcgtcatgaaaagttgaaaactggccaatgtgaagccataatgcattctaatgattctgtccaaattctcttagggcccgtttggttggaggtaatgaaaacaatagaataggaataggaataagaataggaatggtaatggaatggaataagaataggaatataatggaataaattaatggaatggaatggaataggaataggattaggttggttagatttatggaatcaataattgaatacaattcttatgtttggttgactatataatataatggaatagaatggaataaattaattttgaacaaaaatattattatttttaaaacatgattaaaaaattaaattaaatatattcaactt

SEQ ID NO: 300669 - DNA, 1628 bp, Cannabis indica
gaggattaggcagatcatgggccttgggagcccatttacaaaaggaaaaggtcatttataaaaggcttttctccacatgggaggccctgcagtgataatgttcctcatcgcttttttttttttttcttttaactaagtacttcaactttgagggcatctccaacttggaacaagttggaagtttggaacctgacaaaagacagataggttaaaaaaagtttacaattattttaaattatggcttttaatttaatatatgaaaatattgatgtttgttgtagctgaaactcagacaatgtcattttaaatgtgtcgattaaagttcaattgtatcttaagttggaatttttttagcactgagaagagttggaagcaacataactagtccaacttactacatactaacacaattggcataaaacttagagatttttttttcataaataccgataaaatagaaaaatcttacaaaaatacaaatttacagttttctttttaacatttttacggatttggttttttttcagacaaaaaatggattgttgttttttatattgttttgaaagcaatattatactatgttgtttgcatattgttttcatatttgtactatgttattatacattgttttcatcttaaagttgtaattaaaaaaaatacataagaaactaagtcaattttttttttgaaggtataagaaactaagtcatagtctgtataaatgttaaaaaataatgtcattttaggtatttgtttaaaaattcctaaaacttatagtttcatcattttaaagtaagcagattagaatctaggcccattaaaatttaggctaatttattctaagtaactaaaataatatattattttatttatttaaattttgaaagaactgatgttcaaacgtaatatattatttatgttatcaaattacccttgttggatatttattatggtaatttctatcttcttttgcttttttttatttttttttatttttaagtcttaccaatgcttctaggtcttatatactgtataaagagctacttttgtagtaaattaacatgctaccataaaataaccaagagacttagtaaggtgtcgttctaacaaagcagatcaaaataacaatttttattttttagtgtatttatacttatgggaaagattatcatgacttaccaagtaacttagcaagttaatactagtaacttgcaagtcttcatatttcatataacaaagtaactagattgtatatttttggctaaaaacacaaatattgggagcacttaagtcttgagcaaagaactagaaaccattgttactggacactgaatttattagtgtactttggttctcatttagtaactacttattgattttgctgggtaatattgagctagcttaagttaagtggttaaaaataaaaaacttttactgtttaacaaaatgttagcaaaatggtaagtccaaagaggtaatgccagcaagtgttgagaatcatgaggttccaactcaaaaccaattggttatgagtggagtaacccatgttcttgaatcaccttatcataagtagtgtcatttgctcgcttatttttttattttgcgattgggagttccatttgctcgct

SEQ ID NO: 300670 - DNA, 1478 bp, Cannabis indica
gcaacatacctgtaagtataacatccccttcaaaaagtgtcatgaaagagcttatgtggcttatgagatatgggatcttaaatatcatatccttggtcgaccctttctgccttatttcttcgtctacctatggtcaatcagttttgagttcatcaatataaaatctgagctacctataaagcaaatgagaaagagaaactaccacccaccttcaaccatagttctaagttgtccgggtcgagaactgatgccttgggcagctgcaggattaatttttaaaaatgacaatgagaatatgagatgagataaatttttagtttctgggtgattaatcactttgcagtttccagctaatgaattcatattagagctacatggaataaccatctgtctgattctttaataaggataccataagaaaatcaaagtgcacagaaacatgcttagagaaaaaaataccagaatttaagtaaagcaccatagattaaaagcaaaataataaataaacataaagggcaggcatttcttacaacagaactgattggcgtgaaggtatcctggcctttagcaattgtccatggaagacctgcagcctaggaaagcaaaccatttctaatgaggtaatgacactaactatggacaacaatccaatcatgcatgtttcatagtttacataatactttgcagcagcaatgaagctattttctctatacaattaggcagaacgtgactgttggaccaagtaatctatctatgttaactcacagttgtgccaacctaattaacaaaaacttcacacaagaaaatactgcttctgtacatttcgttgtaattaaaggctgcaacagttaattgagctaaaactagactaggcttccctaatcaacaaactcaagctaaaattgatgaaaaaagatacaaatagcattacctttgctgaagcttgaatttctctggcagtcatatccagtgcaagagcatagcctagcacaagaatgaagcaattaactaccttttaagtgtgccaaacaagtatcagtaaattcattaaaagccaaattccacactttcagtttctttacaagtccagaaaaaaattcacatccattgtcagtaagacaacatctgctgagattcagatagagaagagcaacaagagctaataaccagcacaaaacaaaaagcttacgccaaacaatcgaaaaacactagtatgagattcactttcgaaaactgaagcataattctttagttgttaatagttatctttaaaatttagcagatattaaattgaaattcaagatatcttgtcttaccagttacaaatacatgtataagtttaaggttaccagaaatatacctagttgaactaggtgtaatttgtaacttcaagttctaagcttctactggggacacaagcatttccagaaattagatcacaatcaaaagacaggtcgtggcacacataaaaaaaaagt

SEQ ID NO: 300671 - DNA, 1764 bp, Cannabis indica
caagtgcggattttgaattttccaatccgcaaagtgcggatgttacttttgcatgtcaatcaacatccaatccgtacaagtgcgaattttgaattttccaatctagattggattggatcgtgcgaattgaatttgatcggctattttatgaacgcctcctaccctacacaaccaaacacaatttacatatttttctacaatcatattatctttcataattctctataatcaaattattttgaatagttcattccaaaagcccccttatagtaataactttcactatctaatatcatcaaatatcttataaaattcaatgcctacttgtacccattttgctggtaggtcaaaatttcttaatattcagtgggtttaaataaaaaaatagtataataaaaaagaaaaaaaatcattaatacaaattcatttaaaaatgataaatttaatttataaatattttaaaatcaaattatttaattatataatattatttatttagctaccttttattaaataaattaaaaataaaattatatactatacattttataagaaactgaaaaagctaattaaattaacgagttaataaatagatattttgaaataaataaatatatatatattcaatagattaatttgttgtatatatttatattgtcttgttgatattgaacttattgggtcttgtatcgaacccatcacgtcacaataaaacttaaaattatgaggaccattggaccctatatcagacctattggactatattcttcaactttcaatcccttcaacattaacctaccatcggacctacattaggcgcaaaaattataaattctctctaaaacacaaatttaagcttaaaaacctcaaaaatcacatattctccaccaaaaaacacatacctaaccctatatctaattgttttaaccctaaatcatgaaaaaaaaataaaacgattacagttaaaaatttatgaaaaatttaagaattatctttaacaaagacattgtcggcgttaggtggtgtggtcacagtggtctatgggttgtgtgggccatgtggtcgcgaggtcgaggtggtctgtgagtcgtgggtcgtgtgcgtgtttacagagagcgagaaagagaacaaagaaagagtgagaagggggaaagagagagagaaagggttgttcaaacgggaggggtataatggggttttaagggaaaaaaaataacatattctactaatattgaatagcttaaatttaggagaataattttagcttaataaatatataattagttaaattttctatttataatataataaacagaatatgataaattattatattatatgacaactaattgactttaaaaataaacttaatagttgttaaaatgtatattttttctttttagtaaaagcttttagtgccgtaaataataattaattatactaattttgataatattgctattaagcaataaagttattcaatgttattataagtcaataatttttgtaaataaatttaaattatcttaaaaaaaattattaagacataagaaaaaataaatttcttttttggtaaaaaaagtaatgtaatataagtgatttcatgtttaatatattattttacttcaattttatctcaaaataacaaaatactttgtaataactttgtataaattttgttttaagattataacttaattatttttttaacaaatataaaagaaacacaaataacgttgttaattccatttttttttttttttg

SEQ ID NO: 300672 - DNA, 2839 bp, Cannabis indica
ttttttctcttgcgcctaaagaaccttacttctcaattctttatctcagaaaccaatttctaaccctttgcatgaaggaattatgttctatttataaggtacaatcgggtatgggcatacttaaacctagtagggtgtaaagatataaaataggcccacttatatggtaaaatacaatatatattaactttaggtcgcttaggtgaggcccaattcacaaggtggagattgtccatacaagtagggaccattttatgattccaagagtcatgcgcatccacatttgtgccaagaatgtcagagaatatgacattggacaaaaaggcgatcttctattggtagtgtgtatactttacgattttgacgtaggggtaatccctgacactgttgggtgatatccgggatctatatgagtgactcttcgattaccttcttccaaattacctaaagaaggcatctaaattggtcttgacaaaccattcgattctgggccgaatggccattcctggacatgggtggtccgaccttattgggttagcaagttgggctcatatccagatctaaactatagtgtgacttggtcactgggctgaatgattaacctgattgggcacaggtttgggcctgccttagctaatattgggcttggaaattatacacgtcatcattttgaaaattggatatcatttattcccaagccgtcaaagctcaagagtcacggaggctcacaacctttctctagatttattgatgaattcagaaccttgaacagagaaagtaagccattatgaccatatacactacattgttgttaaccccgaaaattagggatgttgatttctaaagttagttgactagtctcagagcgattagagcaagtgcgttcaataggtttacccactcggtatgtacttcgcaacgccgttgtcaattcttgtaattccccggagacacctgtgtgattcgatgtttagtcccttagtaatccaatgatgagaacgcaagcaaaagaaagaggttgtgcatgtgtggatgggtgccatgtgcatgggtgtgctgggaaaatgttggagcatgtgcacgagggctcgcgtgcagcccacggggggcttgcatgcgagccgaggttgcgaggtgtggtgtgcgagtcgtggttatgggggaaggagggagcatgagtcttggagtgagccatgagtgtgtgcgtgacttggtttaaagggatagggactcgcatgaaagcccatagggggcttgcacgcgagctttgaaggggtgttgtggtgtgatttggcatggagcaaggggatgggtgccttccatgcgagccgtgtgtgtgttgtgtgtcgggggtttgagctcggatgcgagccttggtatgcatcgtgtgagtatgttttgggtgtgtgaggagaaggggataggtgaatgcatgttcacaagaatgacaatgggaaggaatcaaaggacaaggcatgcaagggaagaacatacaaccacaccttctaaaaactgagagcaacgaggtatgagcagcggtgacaacggacctacgagacctgaggacccgaccaagggtacgctacaaccactctcctgtagcctgcaattgggaaccatgtgccagcaaccaccctcctactattgaaatcacctgacactagtcaagggtatgaggtacaaggtcatcctcagtacctagaacatgtagcgtcaaagcgacattttatccccttagggaccactttgtagttcaggccacaagagcctataaataatggttagttattgcagatctttcataacatccaaacctccaaaaaagactggaggtgcttgcttacagaacctttcatataattgttacacttgtttggaaattgttattggccctatttgcataataggggtcgagccatctacacattgggagcaggcattacaggaacaccttgctgtcttagtcgccatatttttagatcttgttctttgacattggcttgcattttagaaaatatatgtttccaatcctaggcagcttgcagtgggttaacatcactagctcttaggcctttgcctcggtaacaaatattagggggaaactgaactccttcacccccacttgatccaattgaattacactagatcatgatcacgatcaagattaaattctatttaccgcttacttgagaagataaaacatgtgcctattaagttattaggctactaacatgcttcctatcatgcttttcttataacttacaaataaaacaagctactaaagcataaaagacttacttaaccgtgaatcaagcttatttatgataataattgtacatatcgtgatgatcattagaagcaacgtagaagctctgatacaaagttgtaacaacctactagtttaggtaagttatcacgattttaatacttactatgcattctattgctagtcaacaagtttattgaaaagcttgatctatttaaacttttataattaaatattaaacttgaataaaatgtttatacggggctaagtgttttaaggataaaatacattgaatggtgtaacggtaatttaatccctatacaatgaaaatcatctatagaggatcattgattattgggattataacaatggataattgatagcatatctatatggtggaacatatagagcgttctacatagccgagagtgcaattccaagttctatccgtggatgcaacaaggaattaataagtcaatgaatttacttggtaaatttttggtctgcttattagaagctcggatatataggcccatggtccccatactagttgagacaatactacttgtaaga

SEQ ID NO: 300673 - DNA, 2694 bp, Cannabis indica
gtaaaataattccaacaattggctcatgtagaaatgggagcacaccttaccactaaggatctatttcgtaaagttctgcgtggtagctagaataacgcccttttaattcatcccttaagtgtacaagttgcttatacgatggtatgtgttatgcaagatgaagaacatttaggttcccactccggaggaaattttatacttctacaagatcaaaacccaaaaaatgtagaagtataagcaaaagattagattttaacggcttgagaggtattccaagtctctagttggcccggtaagctccgtgaagcacactcatgactttcgggattactagttttataccatagatttcccacggaaaagggttccttactttggattttaacactataagtaagtgtagctatcgaaccccttttttctttccatgttggaatctaaccaagtctatcttttttattctattagacagtattcctcgtccagctaagactctctttttgaagattaggcgaattttataccaaagtttttcaactaaagacttgcaggtgggaaaaattaccacctcactcaacctcaagaaggctggtttacttgctcctcaccaaagcatagactctttccacgtcaagggctcacttaaagactttcttcgtggtgatcctctagagcttaaggaaataattgtagagatcgtcgctgacaaggcaaaaaaggccattaagaaggacaaggaatgactagctaacaggaaccagagccatccgactcctttgagtgaagaggaggagctttaaatctggtttgaggcagtcatctagaacaagggtactctgagagtgagtacctctagaagaggtaatttgtccttccgcttagtttgtgcttcgcactttgggaacttagatcattttgactagggggattcaacctgtatcttttggacctagatcatcataggtattctgtaactccatacatcgataggatagatgaaatagtcagaggtccaactcatttcgttctacctgtacatactgttatgaagtaccctggattctatcagtatgggagctttttaggtagggaagatattttcttgtttgcctgtggaatctgtaagtattatagagttaacagtctgaatcatacttgagccttcctttatttttgttgtttatatctttagtttattgctttcacgatattgacttttatgtttcttcttgcagaaaatccccaaactctccacatgggactcattgacaactccttggtgagcatcgcaaaaaggtcctccaaggtgacggaggctgccaagggacccaagggcaaaaggaaggttgtacagtcttccaaggctggacctaaggaaccaacacctccgaccaagggcctggaagctgtttctcaggctctggccttagaacctacccttaactctcaaacttctgtgacaatggtgaaggctttcggatcccaaccttcaatgattgtgatggatgctccctcccatggggaagtagtggaagttgcacttgtagtggcgtctctccaacagttgacaatcttcattgacgaggaggaagaggaagatgaatatgaggaacttgtcttcagagatcgtaagaagtttggctccgctcttggtggagacaataaaagaataaagatgaaagctaaagacaaagtcttacagctagtagctagtaggaagcaaagtttagacatatctggctggaaggaaggaaggtatcagaagattgagaggttgacaaggaggaactcttgttatggcaaagacatttaggaccctagtcccaacaaccaaaatcttcttccgcaccagttcctccaatgctaaaggagaaaacaagccttccatctctttcgacttcaaagataaacttccctatccagcccgtagagcttttggaataagctcagagccaaatagagtcacttaaaaaattcttccataagaagtatgagctcgaggcagttaaaatcagaagcagatcattgtgatttctactaggcagggtgttgaacatgctgatttggtaaagattctaaatgcttctcttccagtctttgaccgtccggccatcacggagaggctccgaccaaaggttggaactgatatggctccatttttggcagatcttttggatcagactgctaatatatatatatcaagttgggtattagagagacttgctactacggctagtgacgacccgtcattttatggctaattgtcttaaccactaaactactggggtaagtaatttaatattgcttgataataagtttaataatttttatttgtatttaacccttattcattatttcttccaggcgaatctattggttgagagatgttctgccttggtgaataaactcactcttgaagtggagtacttgaaggatgagcggacaagggctgaggggagtagagatgaagcaatcaaggcactaaaaataccaaggctcatgttgatgagttgttaaaatgtagggttgagagttctcttaatgtaacatcctcgcttcaagcctccattgggtccttacacccacggaatgaatggctcttatacacgagtacgccactctggctgcttcctggattgacgactgaccctacagacccgagataggctaccgaaaaataagaagcaccttgtt

SEQ ID NO: 300674 - DNA, 3192 bp, Cannabis indica
cctttgacatggttgtgcagttagtgtcacccagccatttgtgcccaatatggctgaaataaaaaaatatctagtcccgctctgctttggcgcagacttcagatgcaagtaatacccaatctcataaggggtaggcggaggccagcctagctccctgtacatgctctttgacatgagttgtgttgggcacatctcaaagtaagcggcaacatccaaaaaaactagtgaagcagcatcacccaccccatgttcaatgtggctcccagaccacgccaaccaatccggaggggcttgtgcgcctgatagcttctacgaggagtctcgcaattaacatcccctataaaataactagtaatgattttactgagggccttatcaaaaagagtagaagtaggctaaacctaactcactctaggtggtttcgcatccagtatctccagttcaagagattgctctaggacatggtccaatcttagctctgaaggcttactgagcccattcagtggattaccttgggcattacagtggcccaagggacagtgagggaaaacaaagcaagtcctatacctcctccttctcactagagcaacctcctctagctctgattctgcatcaaaactctcgtctcctgagtcaatctctggcttagcatcaacatgcggctgagtggtctcctcctccattctcacttgaccccttgtgaccaccatggccatgtgagggtcatacaaaggcaccctacgcatagcctagtttgttctggccataagtatgaggtaaacaagagacctacgcgactgtcacctcccatattcaactcacaacacaacctacatggaagagataaggggaggtgagcaacgtgacaaagctacaaacatattcaagtcaattgtaccaaagggtaccttctaggtaaaacaaaggatacatgatacaaggtcgatcaacgaccaagtaccgtctcaagtacacctactaagacatatagtaagtcctatgttctacaattgactataatagactccttacctagccttatacagagtttccaagagaaaccacgcataaggccacatgtatatgcctccaaggtcgccacaagaccctagctgaggttgaaagagggagaaaaaccagctgcccacttcgagccttggcttggccggccaggattccaagtcctagtggccgaccaggaaccctaattctaggcataggccagccatcctagggacacagtccctatggccggccagacccctgaaggccacctatggccagccaagcttcaaataaggcctccttggccggccaacatttgcatggatcagaacacatattttttcaagaactcaaacatgttcttggtgttcttcatgttattcatgacccaaagagctaagaaccatattgatggatagatctttttcatctagaaatcacacattatgtatcataaggctatcaagcttggatactgaatttttttttttttgctctctcttattgctttcagattcatccttgtataaatacaactaaaccgggagtaggtcattacctgctatcataagggggtcaaacctgtataacaaatcttgttgttactgcttttaattttatttgtacaaacacgtggcaagcattagatctatacgaccccattttcggttgatcactttttgagatcaacaacaacattataacataatacaactaataatacattattatggccctttatcaaaatttatcattgttgagcaagctttgagttaaaatactcaaacttgctcaatacgtggcacaaccactaaacgaatctcaaaacaataacaaacatccgtaattaactctccaaagtagcccctaactctcccaaattcagacagaaaataagcaccaatttatcaaagagaaatagttcactaggattatcttgagtccttgctactaatttccttctaatccttgaagaattccagctgatgaatgaaggaatatgaattggtctagttttctttgagaaagagtgagatctagagagaggggtttcaaggagagagaaaagggtttatttaaagtgatgttaatctcttttaaatctttctaacacattatacactaacttagtaaatacttaggatttctaataattccactaaggaagataagacaaaaacataagggataattaccatttctttttccataagaaaccaagcacacctagaggtaaaatgatcaaaactgttaccctgtaaaatcttgacactctaaaagtctaataatctcaccctgctaaatcacaaatgctatatcataattatgtcactttagtggccatctgtcgcatttccactgttaccgggcataaatcataaaaatattaaatatatataacatacatggcacacctagaacttaataaaatttttagaattgaggaataataactctaatgcctatttctaacaataggtataaatttctactaaagcacatattattatatataataaataaattactaataatctgttaatttttttactaatttttacatctaagtatgcagtcattaaatttaggttattaccacgctatctattgatagaaaaactttcagttttgagtttaagtcctagaattgattaatatgagttgtttactagtttactgcagttatgacatagggtctggatcttcaagcgatttctactcaagttgacaaagattcttgaattcggacttgatgtatggaaagtatacttgtaccacatatcatgtcaatatatgattcaataattaacatctataagaaagagttattactctattggctgtctcattagggtacagtataagaaagagttattactctaatttaaaattattgttaggtttcttacttatcggttattttaataagcaatgatagtcacattggttgtttcattaaaaatggtgaataattgttactttattaagaaacatagtttgtcttattagacacacatttgttattaatgattgtttttattggatagtgtgtgtaacgccctgttcaacagggacgccacgtgtgtgcactttatttaaaataccaataattatataagatgtaattatactaaaagtgtgggtaattaaattttttgatagttaaaactcaacctttaaactgtt

SEQ ID NO: 300675 - DNA, 2658 bp, Cannabis indica
aaaataatatttaccctacatttaattcaaaattaattggacatggcgattgaaaagatatttttgcaaagtgatttaagttaaagaatactaatagtgaaatatttgttataaataaaaggggcatataggaataggaaaaaggaacaagattagattatactttaataataatttgtttcttttagctttttacttgttttaatttggagccttggctcccacttattgatagtttgaaagccaacaatttaatcattatgaaagtgctttgcaaatgtgaaaaagttttagctttacttggtgggaacaaccgtacgaacatccttttacttaatggccacattattgttaaatattttatttgccctttaaaagttaatatttatcaattattgagattgttagatttaagaatttttatcaaaatttattcaattttactaatttttatatactaaatcatagagcattgctatttgacatcagtagtgcttagtactttctagatatatcgccttacaattggctagcgatactccttaaaagttattgcattaaactatatgagacgcaatatttagttggaccaatagcgatattgacatgtataagagtgctaggcaccactggtgcctttagcatttctcataaatcatgcccccaaactttgatatctaccaaattatgtcactcaaactttgacatgtactaaatcatgtctcctaagcttttatccatgttagactttccttactaaaattggacaaaagtccttaaatcgaataatctcaatagttcagagggaaatttttaatgatcttaaaagttcaaaggacatgatttagtatctcaaagttcggaaggtaaaaatcctacttagtcacctgtggtgcttagtgccttctagatgtgtcgcattggaattgactagcgatactccttaaaagttattgcattaaactatatgagacccgatatttagttagaccaataacactattgacacgtaggagagtgctaagcaccactagtgccttttagcatttctcataaatcatgcccccagactttgatatctaccaaattatgtccctcaaattttgacatgtaccaaattatacctcctaaacttttattcatgttagactttccttactaaaattggacaaaagtccttaaatccaataatctcaatagttcagagagaaatttttaatgaccttaaaagttcaaggaacatgatttagtatttcaaaatttagaaggtaaaaatcctacttaaccttttatatattgatgattgtgtcacatggctaataaatttattttcatgatgaggcttttattgtaaataactcaaatatgattattattgttattatttagaataattgcggcataagtaattaacaatttaagtttgtaattatataaagctaataattatttttaacaacataagtattcataataatattagtaaaattgtaatttttatataatttcgtcaatataaattctattattgttttaaataggcctttacataggcttagattctacattattggctttggatgaatgcaataaactaataagtctagttacaaatttaaaatattaactgagtctgtactgacgaaacttgatgaaaattataattttactaatatcaagtaattatgccgctaaaaaattattggatctaaacttaaaattttagtacttacactacttacttttttattattttattgagaaatgttgcaatcattatcattatgtaatgtaggcttttctttaaataactatattaataatatacatgttttaatattatatacaacctctaggtaatttgattattgtataaaaaaaaccttataggtaatgtgttatttgtacaaacttacaaaagaaattattaacttcttcttttttgcttatcaaaacaaaataggccaattagtatgttttcatctttgaaaactacctagttaatgatttttcttgaagtgtaatggaagttacaaataataatttatattaactttactaattaatttctagctagagatagttcttacatatttcatatatagagacaaaacccccaatgcgtttatgggtgttgaccttgatttctatacaatattgtatctttctcccactccaaagatagtatatttctttgtgaatacttattgttcttttgaatcaaccatttgggttaggtgtattcttcatttaggcaaaacaaataattataataatatccacatctcaatatagattttcactaattactatgaagccaaattttattgataaactattttgcctaacaaaatagttattttattctctttttccttttaaaggtaaatggaaatttcattaagtaaaccaaatatagtttattacatgcaaaaatggctcacttagtataatcaacaaaaataaactaactaaatcgtttacattaaatatgctataaagttattaggtgattctacaatgcaccttcttaaaagagatatactgatgcgtcattgtaacgccccgatattttgccttattttacaaaaatactattttcatgtataatttgaaaagataaaaaaaataatttaaatacaacagtggattttaaaa

SEQ ID NO: 300676 - DNA, 2882 bp, Cannabis indica
ccagcatgagtactcctaatatcacaatatggagaatctgtctcaatcattagtttctctattggaatgtccctcacaacatcaaggttttctttgttttaagagaacaaccatttacacctgtttcataccagaagggcaaatgagaaaaagtgatatattcatgacgaccatctgggaccttaaacgggtattaaatgtgtaattatatgagagaatactccaatgtgtacctatatacatatttttaaaggaaagaagtttgtctctgtcttctgcactgtcagtaaatgaatgggtgaccccagaagtgaacctacagaagagcaacagccaaaaaaaaaaaaaccataaacaccatatttgcaattgccattacaaaagtaaaaaaaaatgtttgcataaatctatcaggaaattcaaataataagtgattgatgagaacctgcaactcagttaacaacaaccagcaaccaaactacacacagcagcagtaaggctcaaacaacaattacaccagcagcaagaattcacacattaacaggtacaatgagaatgattcaaagtgtgagctattattgaattgaaatcaaatgagatcctctattacacactgcagagagctaaggtagctccctactgatgcattagagaattctctcttacaaattgcataaccgaaaaacactatccattcccatacaaaaggtagctcactactaaagacaattaccaaaatacccccgcctaagccaatttaccttgcttaccccttctagcataagtaaacttaataggaggcctcacattcgtatcatgatatttgaagcaactacctagcttttcatatttacttgcaagaaggaaaattaagagaaaaacaaagctctcagctttactagtaacaaactagattaagtccatatttagattttataaaccaatgtattcagcaatctcacctgtccttatttctctccacaattttacagaaatcatcagcagccgcacgcatatgaagaaacatgggtagctttgtggcatgtgccaattcaaactgcttctcaaaataccttagttttccccaaacagacaaataagaatcaatgagtaacagaatgaaacaaaaccatagaatatgcacataagcaactgagaacgcaaagttcttatacatgacaaaccaacttacttcttttgaacctctgcagggcaaaagaaaagcctatcatagtctagtccacattcaccaattgcaaccaccttattcacaaatttcaaaagacaccagaaacatagataaaaatccattacaatatattgtggacaatgtcccacatagaataaatggtagagaattaagccatatataagaacatgggctactccactcattgccaattgattttgaattggaaccccatgattcccaacatggtatcagagccatattctttgcgggcaagtgatcatatccgatctgcacctatacaccatgtccactctgatacggttcaagattgatgagcgagttggaactccatgattcccaacacactataaccatatctccataacagaatataaactagtaaaagttctcaacgcatttgattccttttaagttacgaagagacagatttatcatgtagtccataccttccctttttctatgccctcttgagctaatgacaaaagagcctgaaaatgcttttccgggtctccactctcctcaaactcctgaccaaaattacaaaacaagcaatgctcaaacatagcaataactcaaccctaaccaacactgacttttgtttaaaccttttccaaaaacctgagataagaaagaacaaccttgcatctagtgggatgcactccaaccgtacaaaaaagtcttcctgcaacaacccatgaaaacccttttaagttatttcagctcaacaaaaactgtggttgtggtggtgattgatggtagacattgtatgtgagtttcaaggaaaaaggacatggcaactgaaaaaaccatcagtttcagcaatggcaagagcttcccttgattcctcaagcgaaccaccagtaacctgaatccataaatcacgaaatcccaacttaattaagctttttattaagccaattaagcatggaaaagctataaatttaaatagagaaatacaattatgcggtcaacgccagcagtccaagctctgcccaaaacagtggctatatccgcaacatggcactgtttgccattatacattcctttaaacattccatctgttgggcattcatggcaatcgaatttcagaagtattaaaataaaaacataaaaaaaggacaaactttgtcgaaataaataatctaaaaggtgttcgatgaaatgcctgacctgtgaaattggctgctatatctgagcgttcagaaaatgtgtgagagagcgaatatcaaaatcacagagaaggagcgaagtatgagtatggattcaataatgaattaacgaaataataataatgagtaaggaaagagtttcttgcctatcatccgtacggtcgccatgttcgaattggagctcaaagagatgagagtgaagaacactgttgtcttaatctgcaatttgaacataataaggaatgatcttcatgacatgggtccaatccaaaaagttgggctgtttaacgtcgcaggagtttttgagaaatctattacaaaaatgacatttttatgattatttctttggtgtttttcataaggccaattataattttaactaattagtaatttttactcctgaactttgacatgtactaaatcgtgcccctgaacttttttggccgttaaaaattcccctcgaactattgagattgttaaatttaaggacttttatctaa

SEQ ID NO: 300677 - DNA, 3224 bp, Cannabis indica
aagcccaaaaatgaagctcaattaatttggcttagaccaacatgtgcttactttgtttccttgtaaattggattgaatcaaagacattaatgctccatttcacgcacacatggctcccactcggcaaatcttgtttatgtgataaagtcaaaatatcataaaggagattggaaaacatatgaaatgctccagcttgtgctatcgtttctaattttacattaaaagtgtattattttcaattactcgaaaatgttcatatctataatctgttaatgattttatgagacaaaaatactccatctgaaaatggtgtagcagaacaagaaaatagacatctccttgaaatagctagagctctcttatttcaaacacatgttcctaaaccattttgggccgatgctatttctactcatgtttttttaattaatctcatgccatcttctgttcttcatggtgaaattccttacgaaattctttttcctaataagccactatttcctattgagccaagaattttcggtatcacttgctttgtttgtgatgtttgtccacatgtaactaaattagatcacaagtcatcgaatgtgtattctttagttattctcgtctttaaaaaggttataggtcttattgtttcgatcttaacaaaaatcttattttcatagatgttattttttcgtcttcacctactcctactcgtcaggggaatgctgatgatttgttggtatatttttatcacatcttctgggcctgacatatgttcggacgagtctcttattcctccacatgacttggtcacaactcctaacatgcctacacctctgcctcctccatctccacctccttcacctcctattgtagtgtgctctaagaatccgcccctctgcctcctttgcctcctatttcatgtcttgcacattcttcttcgtcattgtatctagatcccgacgatgatctttccattgcactttgtaaaggtaaacacaaatgtacctattctatttcttcttttgtttttataatcatttgtcctcttcttcttgctcttttattgcttctcttacttctattactattcttaaaactattcgtgaagccatgtctcatccttattggcttcctgtaatgatagaagagatgagtgctttagttacaaatggtacaatttgtgtgtgagatattatggattaatcaacttttaactgaatttgggtataaaactttagttctaacaaaattatggtgtgataattaagctgcttttcttattgtctcaaatcatgtgttttacgaacgaactaggcacattgagattgattgtcattttattcatgaataaattcaacaaggcctgatctccacatgatatgtaaagactggagaacaattagaagatatttctacaaaggctttgaatggaatgcgggttgattatatttgtaacaagttgggcatgattaacatttatgctccaacttgagagggagtgttagaatatacatatatatatcaagtatatttcattagtttcatatttactcactttaatttagttagtttcctatttattctctctaattttgtatatagatacatattattctattgaataaaatatacaattcattcaccattttgtacactccctaatgtacagacacactttgacgttccctgccatcctggggtctaggctttctctgagggagcctattcccttgttggaggtcaaaacgtacctttctagaatcaatgttcattatgtctcccctagatactaccatagggttagccttctagtgagtaggttcctctgtgagatactttataggacttggcacccgctctttttggttttggttctcttgcagcctggaaaagccttcccgcgcgtcactaggtgggtgtggtatagcagcaaagtctacattcaggccagcaatggccatggcttgtttaatagtgaccagggcctcttgcattcttttgttggcctctcgttgttttgccaactcatcattgtcttttgcggcccatcattgtaaagaaacgagttttacatactcatcctcctcacaatcctctggatagctctctttcccataatctggatcgtagtgtcatcttcttccccttcaactcgggagtctatgtcttctttagggcgtccctaaaggtttggtggttgaggatttctttggtttttttgggtcatcaccatggtgatgaggaaattaactagtgaaagctctatacaattcttagtgaaagcactaaaatgttgaccgaaatttttgacaactacttaattttagagaatgattttaacgtggttggggcattaatgaaccttttgtccacgagtcacttgtattgatgtttagaatttaattgttacaatggtgtttatagggattatcttagtatcaaaatcctccattttcctcgtcctttttacagttatttttccctctatttataggtgcaatggaggagcacaaagagggtctcagtgcattccgcttgccaggtgtagcctaggcgactacatttctaaataggataattatgcctgtagtgagcttgttggtgatacaagacgggacatgtctccgactaatgggacctcagagaaataagttattactaggtgtcataggagaatgcatgtcaaaaaaacatagtagaaatccccaaagatatctccttttttgatactaactcatttttttgctcatatggaaggagttaacaatagtatttttccttgagaaatgtaacgagtgttaaaaataggtatgcactgggaggtccgggaggtcttgaccccccagaggttcatatttcataatattaattctttgaggttattgagtggcacatcaccctaccagatacctttactcctcccgaagccatgcataattaagatttagagtcaattgtaatttttgttagattgggtcccacatgacatgtggctctatgctgggaagccacatgtattggtaaaaattggtggcaacagaaatattagagaatgagcttgaaacagtaacaactctccacattagcttttaagaaaaataagctatcatcaacaaatctccacaagtcaaatttgaaatatgttgtaaattaatttcccatttgatgattgacgacatccccttagcaaagataagaaacatgaaaggagataagggatctactgttgggtttta

SEQ ID NO: 300678 - DNA, 2585 bp, Cannabis indica
aaaaaagttttgttcttaaattatatgatatttgatacaatactctacataggaatggtaatttataattagttatattttttttcacttttaatcacaaattttgttgggactaaagtaagattttttgtagtgtgggttctgacataacatgcaataaaatatatatatttttttaacaaatataataaaaatattgtgatatactatacacttttgtttttcgataatttagtttaaaaattgaagatctaaggtttacctctacttagcttagctacacagtcgccgcttctaaatgtgtgaattgtgaatcgaataacatccgccttcattttggttttatgagaaggtttggacttggagggtaccaagtccaatctagttctttgtcatctcttttattctcccaaaaaataaatgcgacatattaaatatgaaacctatctcaccaaaatcttatccgattaaaagctattattatcaacgaaacaaaaactgcctatttgagtgatgccgttttagagatcattgttaaattattacgccaaaacaggcaagcgttggcttctttatcaccctaccacagtatttattgttggtatatctcctaacggcttagttggaagttttttttaattaatttcctaattatctattcaacccccatttttttcattcctaaaaaacccagaaaagattataacgacactaaatgcatacgtgggctcaatccatatatttgtttgttttgtcattattataacagctaagagatttgatatctttgacgagtcattataagattgttagctgtcatcttcaagcccaagtttctatacatagcaaaatctagattctgaaattatccaaatcacttttagttctcataactcaaaaatgttataaaaccaaataggatatcttctcatcatcatcatgatcaaacattacattcaaaagtagtattagaaagaaagaaagaaagaaaaaaaaaagaagtaatgggcaacattttgttcataaattcaagaaaatctcaattaaacgatatgctaatattttctcaaggcctttcaatccaatacaccataaccttagatcttctaactactctaattctatgcctcacaatagctttgtgcatcgttcttctctaccaaatcctcttcagctttctttcatggcttctcgacatgaggccagaccgatcaacagaagaagacataatgtacacatcaccagcagacaccaatagcatgcctcatcatcatcaacatcatcaggcagcgttttacagaggttttgtccagtacaatgtcgtacaggtagttgacatgttggagaggtttgttcgagacattgatgaaagacgaggaccaaggttgagggcgttgaataagttgcctccattgataagttatggcaggcaatgccatgaaagaatgtgtagtagtagtagctccagtactagaggaggcgatgatgagtgtgtgatctgtttggaagattttgaagaaggcgagtcttgtcaagtatttcctttttgtaaccatattttccataccaattgtatcgatcattggttgaagaacaggccaacttgtcctatttgtcgccattgtattttagatgtttgactaatttgtaccatatatttgtatgtatataatatacacctgtagttaattaaggaaattattcttttttaggaattgccatataattaattaacaacaagccaatattgacagcaatttcaacaaaactatctcaattctcacgggcttagagtgatttaactgtggtttcatgagttgctcactccgccactaattatagacatcatgagaagggtaaaaagggtaaatgaatttttgttcgagagtaattttgagtgagcaatcattataaatagataggtataaaaagtgagaggatatacaatgtattgagtgaattctctttttatatcaaaggagcctaatgtagatacatttatttttgagtaagataagcggtttgattatgtttttgtggtttggaattcgagggaggaattgttagcagctattgcttcttgttttcaaggagtggtgtctcctttggcagaaacgatgggaattaaagaaatttttttggttgaaatctcaaagttattctaaagtgaaagttgattcagatagtattgttactattcaagccattggtagttcttttagaatactttcagctggtttttgtctagtggttgaagattgtaaaagttcattgtaatttttacgcaatgttgctttatgttttgttgaacggtctcctaattgagctgcatattttcttacgagacagtcttgaacttgatgttatgctgattgtatgtttagggagagggatgtaggggtgttcatccaatccaatccgtactattttactcatagtgcatccgatccgcactaagtgtggatttcattttttggatccaattcaatccgcacaatagttcaaattcaatccaatccaatttgcaaaagtagggattgaatcagctattttagattggttactttttaatattaagttattta

SEQ ID NO: 300679 - DNA, 3394 bp, Cannabis indica
agatgatgaggatgatgataatgaagaagagggtggactaagtaaatcagggaaagagttgaagaagctgctagggcggactagtggcctgaatgattcggatgcagatgatgatgacgatgatgaggatgtaagctgtgttaattttctgtacttttttacttttgttttgggcattcaaaaaattgataaattgctaaattgaaaatttgaggatattgctaaattgaaaatttgagtttataaattgcattgctgttttattattatttttattaaagaaactgcaaatagatcaattttttttgacttggggtccaataaactttaaggaggaattttttgttttaatacgagtaccccttttctggcttgcctagatggacgatgacattaatgtctcacctacggtggctacaaagcagaaggatggacctaaagaagaacctgctgagattagtcccgtaaaatcaacaccttctgcctccgctaaaggagccccatcaaactctaagtctgccaaaggaaagagaaaactaaatggtgatgatgccaaaccatctaacggtgcacccccaaagaaggtgaagacagaaaatgtatgcctttgtgatcaaagagagttcttttatatacatatcaaactctgttttttgtaagcgatgaactctcctgatcttataaggctcaacagtagtagtttacttagtccttttataatgttactacaggaacaaaaatcttctgaacctgcagctgcttctaaaagtaatgtgccttcaaaaggcgcaccggcagtctctaaagccagcgggacatcttctgccggacctgttactgaagaagaaattagggctgttttagtgcagaaaacaccagtgacaactcaggatcttgttgccaaattcaaagcgagactcaaatctcctgaggtacacttttctcgtgttttcttcttttttttttttaccaagtcttccaactcctggtttgctgtggtttccagcaatgttcctggaatcttcaaggcatttaagagcctttagtgaagagagggggatttcgagagaaatacaccaataatattttatatcataagcattgcaatttgtggatatatatatctacatatgtataataataatgactatataaacaaccacctactctttcttcaaatactgccaaataaaaaagttggccaagttttgttttgggttctagctttgctagcctaggagggagagaggataaatgggaatgagggaccttagtaaaggaagatagagaggaaagaggagagcatttttctcttgttacctgttcttcatttacaaaataccgtagacggatggaatatactgatttttcattggaagaaagatactagagtagaaagattttggagggaaaatgtctaatgcatccaaaatagaatagagaatcggtggtactctactcattgactcttcgtgtttatttgcaggataaaagtgcttttgcggaaattcttaggagaatttctaagatacaaaagaccaatggatctaatttcgttgtgctgagggagaagtgatgaacttcttttttctccacatttatcataggggtgatcaccgataacacagtgtcttgaagaaatagtactcatgcacatttcaaatttgcctatttgtctccctttccatcagtactgtataacttcaaaactaccattttacgtgtaagtcaaaagtcctgccgagaataaataacaacacatatttagatattacatcatgattattgttgtttttgcaaatctgagcttggtcaagttttgtgacagttcgtacgtagagattttgtctttcatttgacctacattatttagcccataagagtatataatcttaaaaatacggaattcatttcactctttagagttacattagtacgaataaaatgctcaaattgatgaaactatttgctaataccagcacaatagatagcatacaaacaggtaactaaataaatacagcactataaactagtggttggtgaggagaatgcagagtaatccagctgcgaatatgagaagggtgcttgcggttgattgggccgaagcagatggagttgagggcccatcagccaaagcagtttgatgctcctctgttgcagtgacttgaagaattccaggcccagtaatttggtagggaagaacctccacgtgtaatttgagaccctttttgcaatgctcagagttgctactggcaaagtagcgtaaaccttcagcttccagggagatggtatccagaccgtccgtgtacattttgatagggttactcagatcacatgcctcgtattcctccttgcttcgcagctcagctacactaccgtgtgctgcggagtaggcgaaccctgccctcaaccaaattcatcagtaagacaaatacttcagagtcacaacaacaaactcgtgttacattctttgactggtggatgggacacccatgaaaataaaaataaataaaaggtgattatattctttttctttatatgttagtgggccaattcttctgttcttcttgatatgggaaaagcaatggattggatgtgatactccatagtactccccaatccaaaagatattacttacttaccaagatttcaaaaaagatataaaagtcctcaccataaaatatgattttatctatagaaaaaagaaagaaagaaaactcaccaataaaattgaatttaacaattaagaaaaaaatattaattaactgagctcacaaaaacttcatttaaaccacctacaatttgtttttgtctctgcctttttcttctctatttctttttatttgattaaaattaactaagcatgtttatcaataaaaaactattaccaatgaatctaaattttgaacagaaaagtcgataattctcattttaaaacaataaaaccttaacataaaaaattgaacttggcatttgttcatactttctctaaagccatttactgaactagaattttttttccttttttaacaaataccaaacttgtacaacagtacaaattaataaatgcagtacagattcggtgtaaaattaatgtgatatttgatatggccgggtaataaattaagatcgaaaataaagttgggaaagagaagaaactgagttagtagtgttagtgttagtgtactcacagatttgatctccaaccctaaaggttttgccggaagcccaggtagcgatgtcgtgagatgcatcccagccacggtctcctccaaccacatggtgaacttgggcttcagcccattttcctccgagactcattgtcattgctaccataaccacccccaaaaccaccattttctggacttctcccattgaactaatacaaaaacta

SEQ ID NO: 300680 - DNA, 1825 bp, Cannabis indica
agaagcttctgatatatgatcatctccctcacagaagctttatgattcttttacatggtaagcagtatgcacattgagttcacctttctaatttactgattatatatatatatatatatatatatatatatatacattagtagctacgaaattatggatatctttaagtttcatgtgtatgcattgtttatgctgtctcatttttggattactaatgcacctgttgcttctgtaatctgtagagtaatcactgttaagcctaagagattgattagttacaagctataaatatgtgtaaagattattctaggcaaaccgatagaagacagaaattgcatggctcattgctccaaagtcaaaaagattttgttttttatttgtttagtaatgttgaagacttgtgggcatttctacaattcttcaccttaggcataaaaccaggggataaaatagttggcagaggccttttgatactgtgttttgtaatctttctaagtaaagcattgtgatctgttgaaaaggcaaatgatttactcccttagattgctattgtaagttactcattttaccttttcctcattcacagtaaagaaattacaaaatgaactgctttacacatttgctgttttgtcatgagcaattggtacaacttcatttgaacttattcattatatacttttccggttttctgcagaaactagagttggaaaacctgtgctgaactgggccaggcgccacaaaattgcattaggcatagccagagggctagcatatctccacacgggtcttgaagatcccatcactcatggaaatgtgagatccaaaaatgttcacattgatgacttcttcgtcgccaggctgactgaattcggcctagacaagatcatggttccctctgtggccgacgaaatagtggcacttgccaagaccgacggttacaaagcacccgagcttcagaggatgaagaagtgtagctcaaggacagatgtttacgcatttggaattatgttgttagagatcttgataggaaagaagcctgggaagaatggaagaagtgagtttgtggacttgccttcaatggttaaagtggcagttcttgaggagacaacaatggaggtgttcgacgaagaagttgtgaaaggaattcgaagtcccatggaggagggattgatccaggctttgaaacttgctatgggttgctgtgccccggtgccttcggttagacccaccatggaggaagttgtgaagcagttggaggaaaatagaccaagaaatagatctgctttgtacagccctacagaaaccaggagtgaaattggtaccccattttaagcattctttcctattactttttaaaatcatcagaagaaaatatatgaatcccattagtgttgttttcataatcttaattttacttctcatattcaggacagaactaatgtaaggtatatttgatagtgtttctttgaatttggatgttgtattcctaggaattgaagatcagtttatgctgtctagtttgcattaaatatatatatatttttacaaattctattaaacttattcaattcaattctatccaagcaaattgatgggatttccaattttaatgagattggattggatttcatattcttgctatcttttttgttttattggttatattttcatactttaaatgtacttgtcatactttatttcaaaaccaattaaaggcaaatgattttatttatttatttactttcttgcagcaaaaggcaaatgaattttaggtatacatagtaaatatatgaatttcggtggactcaattacaaaaaaaaaaaa

SEQ ID NO: 300681 - DNA, 1117 bp, Cannabis indica
attatagtcatccctaataataagggtatcatggatgactttttacacttcagggacgacaatatcctctctatatggtttgttgtttttgaaatgtgataatttgaaatgaataggatttttctctcttgtacattagggatgacaaaaataatcttgacacatcgtcgcaaagggataaaggatgataatattttaaactatagtgaacaacatcgtcgtttgaaatattatcagagatgataatattttagtcttgacacatcatcgcaaaaataatcttgatatatcgtcgcaaaaatattatcagcgatattatgatccatgataatcacattaataataataaaataatattgtctcttcttcttcattttgatgcctctatcactcactctctctctctcccctctctatgtcactcgatctcgcctctccctctcttcgatcttgcctctctctctaatctccgctccgtctatctctcgctatatcttgccctctctctgtcactcaatctcttgcacctctatctctctcacgcatttctctgtcacactctcacccttgcatgggtcgggaacgacaccagagtttctccgcttgtatgctcatcaaacctctctttattttttatatatattattttgtaattatatatatatattttaatatagggagctaatataataagtattgtagtttttacctattgaaaggtacattaatttatagcaattgatttaatcaaatgactcaaattaattttagaaaacttaaacataattaacaattttttatttataatttattttaaatattattaattagctctaactaacaaaactgcacacctaattccaaatctataatttttttttacttatttaccttatgccttataatttttaattaattactttttttttttaaaatttggaatttatatatttattttgaattaacttgatttttctactttaacccaataattctagctaaaaaagtacaaaatattcaagttatttaatcctacaataatcagtacaactaataatataatcatggagtaagctgtaaaattatcttatatcaagtataatgacatgagttcaat

SEQ ID NO: 300682 - DNA, 3243 bp, Cannabis indica
attagattggattggttcggttcgattggatcggattggatcctgcccacccctagtatgaataaccttaattttcataaaatgtaggtgctaaatgtaatagaagtgtcattttcgacaaatacatattttttttttgaaagcaatttaatattttatttataaatttatagggctcgcataagacatattacaaaacaaatattcctcaagtaatgaaaataaaatcagatgattaaaaaattaatattattggtgggcatcggataacttggtgggtaagaaagtcaatacaaattgcttattgcttgactttccttgttctcttcctttactctcctctcctctctgtctactcgcttccatttctccttctccacttcaaaattcgaaatcctccgctgctctatctccctatcttccttcgttgtcttcctccacactcgacggtgcccaccggtaatcccttacatttttctccctttgattagtgcgatctgattattctttcgttttgttttctgggtattgtgatcttaataataattaggcaccgggtttaacgctttttttttttcttgggttgtttgtttgttgaatatatcttgtttccctaatttttcttggcaatggtatggatagttctttgggcattgtgattaataactatgtttcatttctgttgggtgcggtatataaggttgagtctggatttagttgattttcactctgtatttatgttgggtgttaacatctcggctgcgtgtttgctctgtttcattttattatgtttgagtctttgagatagtaaggcttgattagatttgtgctgagtattttttttttttgtatgttttgggggaaaaattgtaatattcaagacgctgccattttgtattcttccctttaatttatttatgttgaatagtagcagatatttcattggtgtttctttaattttattgctatttctttaatatccttaactatgtatgggatgtctggcttcagattatttggtgaagaaaataaatggggggtattttgttggtttaatttggtaataaagaaagcagttaatcaattaacttttatgagatgtttgacggtaattagaaaaatgttaaaagagcaaaattttatgagattagtttaattgcccatgtgtaaggatgatgaaggagaccgattagttgccttctagacatgtttgaaaactgaatattgtttgttgatataaacaaagaccttcatattgataatgcttgagaatatttgactcaaaagtaaattttcttgaagattatatcttaccaaaggaaagaaaaacttttgtttgggggaaagggaaaacagtggttaagaaccatatggactctcacccaatttcaaatagagtttttcaattcatttgtaggattcatggtcaatgaagttatagtattccaagcaaagggagaccagttaagtatactagcggattcaatgaggggcatttgattatctcttccaaagctgacaaaaataattaaacaaagagatagtaacacagaaaaaattcaactgcccattgtcaaaattcccttctcctagcttgcttccttattcagttaactgtatcttactatatgtgtgtgtgtactcatattagagttgacaattgagttttcgcatctatcccatattggtaggtacttttatccaggttctccttcgatagcaaacaaaggggtctgaaggggggttttccatctgctgtgagtgggatctcattggccataaaatgaagtctcattaatgtttattgttaatttctttatattattacctttcacactttgatgagtttttttggtgggagaaggagatgtgcttcttaattggtttgaacttctcaaaaatttatgccttgttgaacaaactgatggaatggattaatgttaagattcttttggttcataattaactgcttaatccaatgtgttcatgcaggttcaagctcacagttgaagtttcaatggccaaaaaatctgatccaagaccaacaatgctatctgtatacctttatattcccaatatcattggtgggcattggattttattgatttattttgggttctgtatatcttttaaattacttgtaacattacatttggctgcattggaatcaatgaaaaaaaaaacatgttcatctggaattctactctatcgtgaatttacttgatactaaataaatattggtgttctcatttattttctttttatgttctttgttttaaatatacatacatcattgtgattttcatttttgataattataattacagttatttgataaaggtagtttttggggccagtctagttgttatgcttcccaaacgactataaaacgcaccaacttcctattaatatttatgactgtattattcagatagatctttagaaaattatataaagcacccccttggatgagtccatagcatatttaaatgtgccctctgctgtgaaatctatgaaataactgatcaactctctttgtaattggcttcaggatacataagggttctaatgaactgttttgcctttgcccaatgcttttccaacaaaaagttattctccatcctttattttattaggtaagaaataatatttaaggcctattactttttagttttattttcttaagcatttgcgcatagaaagtgttatatgtgactgaatgtgcttttctcagctttgtgtgtgatggcatagatggttggtgtgctcgcaaattcaatcaaggtaacgaactatacattgacaattttgtggaatatctgtcaaattataggagcaatatacagcagttagctttcaacaatgcatagaatgtaacaaataagttgtttctttctttcctctgccagtttctacatttggagctgttttggacatggtaacagacaggtgtcatatcaactcccctctctctctctctctctctatgaacacacatatatcatttggaactgtttcattagtattttgattttcgttttttttttttaaactaatttgtgctgaacactcttgtccttacaaggttttgattcatgtgctatatatctcaggattagcactgcttgtctacttgtaattctttcccaagtgtaccggtaatattacatctttatgttcgtcatattttatggaagtttccgttatttatgtaagatttatatttttaagttttggtttcgt

SEQ ID NO: 300683 - DNA, 594 bp, Cannabis indica
aatcacgtaatacgcctatgttagttagggtgttacaattgggtagatgtgggagtttattggtcattatcaagggtgaagcttacgtgatatccagatttgacagtgtagctaccagaagtggtgtgttgccagatgaggattggtctagggggagaggatatctagaattttattaactatatcaatagggaacaattggttgaggcgagggatgttccaagtcatgtttctatttataaaaaatgggccggaggagtttggattgtaggcacgagtctaacattggggatccaataaccatatagagggtgtgtattcttcccattaccaatttttgtaatgagtcttgttcccagctaatgcttctccaaacaaaagaaggggtacgacctgtagttttgtccacgaagagaaaatgaggatgatatcttgccttgagatttgagcaaccaaagaattaggctgggtaaagagatgccatgcttgcttggcaagcatggcctagttgaaatgaaccagagatctaaagcccattcccccttaatgttggaatttattttaccaggatcttaaatctactcacaagtatgt

SEQ ID NO: 300684 - DNA, 2418 bp, Cannabis indica
catttaatttttttattttgttctagaggaagtagtgtaggtgtgtcaatccttgaattgattgaagaaagtgattgaaaataaaattagataaaataaaacatatcctagagaatatataagggtacaaaatatatatatgtcaaccttaaactaaattttttttcctgtaaattttttacgacgagtaatccaccatttaatctaccttggctgtagaaaagtgagatagaaacgaaatagagcaaaactcatcattctaaagtcggacaatttaaaaaacaagaaaaataacagtacaactgtccaattgtacaagaagataataactaccattaatcccaatataaattaagtaatgaatgtgcatatataatgatatgaataattaattaattaattagtaggtactgttactactgtatagaatagaggtggggctaaggaaatcttgggttaggattagaaagagaagagaagaaagtgttagataattgattaatttgtccaccccactagggaacctggcatgttcccctttcccattttcatcatcatttttgactccacaccactcttcccaatcccaatctatcattctcgggatgctgtctctctttttctttctctttcttcctactataattatattatcctatacatgcatttcttttattattatttattatttaccagagaattaaactacatatataaagtaactgctcactagtctaccatacatgtacgtttgattctcgtacgtactaaatttactgacaatgcatgcatagaaaacgggtagaacaactccatttacttaaaaatcaaaataaaaggaaatgaaagaacctcctacgtacccaatgtctatatggaagtcatagtaatttttctttattttcttggaaccttaactctccaaaaggaggaatccggccgagaaggagtatatggaagtgatactctttttcttatatgtttcttttgtgtgtagaacatctttcaccgcttgctcatctggtcaacaggtcttctaaggccatcaaggaagccctttgagaattatcacaaggctttaggataaagtctgaattttgaaagatcctttgtcaatttttctcccaatacttctcctcagtgcaaggaagactttattagtgatctagggataacccttttgttggtaaatattttgattttctccaatctaaaaactactttagaaagctttctttttcctttttttagacaaaattaagacccatcttagctgcttagattaacaaattctattcaagagctagaaaagaggtgtttcttaagattgttgtacaagacattccttttgcaatattgcctactaatttttgtagtagaaattcttaaggtaaaattgtagtggaaacagttcacttcagaagtactctgaaatccattggaagaattggaacttggtttaactctatgttttgtgggaggtcttggattcagatctttcagtcattttagtcaaactatgcttgctaagaaaacttggcgtatttccttagaccctagctctcttcttgcctagctccttacaagattacaagaatgcctaacttctaagaatagaagctcaagtctacaactgtccccttggtcaggatgtctgggaactaccggaaataggagctctaaagctaattataaagacaaattcaagatattacgaaccagcgttgcgagcttagttagccctattttaaggtgtcctagcccaataatcctataagtgcaagcgagagttgagatggactcctataagtgttacccaacagatcataactctctttgttcaagatctacctaacctttcaagtattattagagacatttgatttttgttgtctttattcttttggtgttaattaatttatgatatgtttctaggaatacaaacacagtggcacataataatttacctaaattagcatgggattgggaagtagataataaaacagtatggaatggcaatattcttttcatacttctttttcaagttttgtaaccttgatattaaacactttcactttcaatgataaattttacatatttcaacaaagaaaaaaattaaaaaaaaaaagaagaaaaatattgaaaatatgaaagaaaaacatctgcaaaaggtgttgaatttatatagttaagagtaatttattaaatgagtacatatataccaaaattctttcaataatttctatttctatttttattgctcacgtggatgaataagaatcatcaattgttccttttcttaaaatagatcataaattgttccatgcaataatactttcataagatatttttagctagtagctactttttttttttttgaaaatgaaatatcaacttcattgaaatgattagcattca

SEQ ID NO: 300685 - DNA, 5891 bp, Cannabis indica
tttgggcggtttacgaattttttgtacagccctagttttaatattacagtcatattatattatttattattactagaaattaatataatattatatctattatatatattataattattttaatatataaaatgcggattggattgaatcggttatctttaaaggtcaaacaacattcaatccgcacaattatggatatccgtatttgcaaattggattagattggattggatcggatcgaatactttatgaacagccctactttcataactaaagtcaaaaaaataatcaatctaatattaaattttaacgcataataaatatcaaaaggaatattaattttagtgtaataaataaattcgtataaagagcattatttttttttcctttttaagtttatttttacctttaccttaaaaaaattatgcctttcacattaaattttgaatctgccactatatatgagacaaatttatatatttatatataaatatgtacgaagaagaagaataatataaggtgaatcagtttatgaaagtaacacccaaaacatatgatcaatataaggtgaataaattatatatggagaaggcttacgacaagatggattgggagttcatactaacggtccttcaacggctaggattcactgctccgttcacgaattggataaaggcatgcattaaagtaaaggaaataaaactgttgctcaatgggtccatcgctggaaagttcaaaccggagcgtggcttgagacaaggagaccccctctctccttctctcttcatcctggcggccgaagctttatcccgtctactaattcaacaagagagcaggggtcgattaaaagggttccaattgggaagaaataatctatctattagtcacctcatgttcgcggacaacattatactattcggccaggcctcaataaaggaagctaaaattatcttggaatgcctaaataagtattgcacgtggttaggacaatctatcaatttccagaaatcatcgattctcttcaccagaggcgtcacgagaagcaaatcgcataccatatcccaattcctgggaatgaagaaaatggctgacaatgcagcctacctaggccttcctcttttcagatcgactgaacgcattaaggataataagtaggtggttgataaagtcctccatcgagtgcaagggtggaaagctaagcttctctctagtgcgggaaagatgtgcctcattaaatctgtaggatcgacggtctctaactacgtagcctcctctgatgtcattccaataaccattgctaagaaggtggacaaagccttacgagatttttggtggggagactcgatcgggaaaaggaaaatgcattcaatagcttgggaggtgctctgtcgacccaaagtttgtggaggtttgggatttcgtacaactgaagccaccaacacagccttccttatgaagtgggcttgaaaaattttggtagataattcaagtctatggagtcgagtggtggacgcaaagtacttaaagaatcgttgttttttggatattgcccctaatagctccgactccctactttggaaaggtatcttgagtgttagaaatcatatctcaaaaggtatttgtaggaaaatggggatgggaaggccacttctatttggtttcacccttgggtccctaatggcactcttcaacctcaacctcggatggatgcctcggttaacataagtcttgtgagcaacttcatttccaataaccattgggatgaggatatggttggcactggtttaatcgtgaggatgcaagaagaatactcaacatcacactgcctttggaaccgaccaaaaattcatggatttagacccctgaagctaatggggattttagcatcaagtcagcccacaaagtagtcaaaaacttgggaatgatgtcctccgctaattccaaatggcgaataatttggggggccaaaatccacaatagattgaagatgttttggtggaagatactagctaactacctactcacacgtagcaagctcagtacgaggttcaaagtggacgatccaaaatgtcccttctgcagcactaatgttgaggacacgatccatctgttctggtcttgccaatacgcgagagcaatatggtttgaaagctactgacatatcagaacagataactactcctcggctaactgggactcttggctatcgtttttcaaggatgacaacaagagaccagtgggattaagctataacatgtttttggaaggggcagcaataatttttgagcgcatttgaaaggaaaggaatagcatcactcatggtgttcacccctctccaatctctgtcacgataaatctaattgataaaaggattaaggaagcattgaatatcacgaaatctactctactcctcagtcacaatggctcccccctcccccccccgggatgggtcaattgtagcacagatgtggccatcgatgacaacacctccgctggtgctgcggtattctggaatgaggaaggtaatatcatcggcatgtttacaatcaggcttaattactgtgaccctttgacaggtgaaattgcagctctaatttatggggcggaagtggctgcgaatctccactttaacaatgtaattttccacaatgactcttcaagtgcaatcactgccatcctttgtgcagacaacaaaattcagatgctacaccataatgttcaagatgctgtgcgcaagttcaagaactcctctaatgctttgagtctttgggaagctctttggattccaaggggactcaatggtgttgcccaccgtgtggctagatgggcgattaattcccagctgtttgggtgtgttaatctgtccgattttgacggttccctgctcattggttgagcggatggttgtgtttggatttctgaattctgttatttccttcttagttagtttgctgttcttgtttagttagttttccttttttagctgttgtttgtcgggttctgtctgtatctttgactgtgttttttttggaggcttccctccttccagcctctttcgggttgtttttgcgtgtgttgtttgtttggtcctctttgaggggccagtaatcaaaaaaaaaaatataaggtgaataaatagtattacgctcttttatataattatcacattcacatcaccacctaatattatagtattatataagtaaaatattatatgagtcacctagttaaaatgatggtttagtatacttttatttgttttggtattcaagataatattttagtctttttcttttaataattgtgtatattataattatttagaataatttgtaaatttttagaaaattgtaaatagtttacaattttaaaattaaaatttaaatattttgtgttttttcttatacgtatagtaagtaactatttgaactatattcttaatattgtaaaagtttacaaatgatactaaatagttataatgtatgctatatacaaaaaattgtattaaaaaaaattttgaatgtaaaaatagatagaaaatctataacaaatctaaggggtgtactgtagtgcataaatttcctataaattattgttttattatacaatactttttttagttgtggttattctcgtctcatggagatccacgcgtttgtaaatccaatcaataaagacttcatggcctaaaagcaagtcttttagtttctacataaacattattatatgtaaaagttattcctatcttaattattcaattcgcatacgtctcttaaagacttatgcttacaaacaattttggttaggagtagtgctattagtttagtattttttttttttttttgtttactcagcttggctgtattggtttgtcttcgttatcacatacccttgtataattatttctaaattatgccatctacctatttgtaattttgtaagattgtacaacccagaaacctcaaatgatgatgagaaaaaaattaccttccatttcaaatcacgtagttttcctatccaacccagaaattggtaacttagtcccaacagttcaatttgctcaacgcctactccatcaccaccctaatttttctgcaacaattcttctcatcaccgttcctcaaagaccagtggtcaataccttcatccaatcactccctaccatcgctccaaacatccaattagtccaccttcctcatgtggacacacccacacctgaccagatcgccacctttacactcgccagcatatctcaccaccctcatttggatgcaccctcaactggctccacctctgaactgggctacatatcccttctcataaagaagcaaatgcccagtgtcaaacaaatcatggtagaccttaactccactaagtctgggtcgaaatcaggtcgagttgtggcattattcgttgacatgttttgcacacccatgatcgacgtagctgacgagcttggcattccttgttacctattcttggcatcaccagcaacttttcttggcttcatgcttgagcttccgactcttgatccccaacatatttttgaatcagaagctaagttgagagtgggtagctttgccaaaccactaccttgtaaagtgcttccatcgacggtgttaaagcgaagagatgggtactcttggtacttgtaccatgctcgaaggtacacagagacgaaaggtattgttatcaatacatttcaagaccttgagccatatgcattggattcaataagtaagatggatggggtgcctaggatttttccaattgggcccataattgacgataatgggcccatcaaatggcatccagagaaggccaactttcagagccttattagttggcttgacaatcagcctacatcttcagtagtgttcttgtgcttcggtagtatgagaagtctcaatgaggctcaagtgagagagatagcgattggattagaacgggctggctatcgattcttatggtctctccgtgaaccacccaagactaaattagcaatctcaagtgactatgtggatcttgtaaaagtattaccaaatggattcttgaacataacaaatgggatgggcttagtttgcggatgggtcccacaagtgaagatcttggcccacaaagcagtcggagggtttgtgtcacattgtggttggaattcaatcttggagagcttgtggcatggtgtaccgattacgacatggccaatatttgcggagcaacaaatgaatgcttttgagatagtggaagagttgggattagctacaaagattagattggattatagggaacaaagcaatttagtcacggcagatgaagtggtgaaaggaataaatgatttgatgagggaaaataataaagtgagagaaaatgtgaaagttatgaaggagaagagcagaatgactttgatgcaaaatggatcgtctcaacaattattgaaggccttggttgaggaattgattgctagtagttaataatatagtagttaataatatattctctttgcttgaattttttaatatgatgcttgaaatggtgacaaatttttacacataatttgtctaatgatatagaaaacttaaacatctaaataaattgtgtgtttgaaatacatagtacattattttatctgtattttataattgtgtataacaaatatttttcacatcattagaattaaaatattcgtaaatatacaaaatgtatgagcttataagccaaaaccattgacatccatgatgaaatgagaaacaattttaactaaaacaatcttttatcttacatagaatttactcaatatgatatttcaaaacattgtttgaaaatatggtaatttttagtttgtcctttttattggctttactattttttgttataaatattaataattatgt

SEQ ID NO: 300686 - DNA, 3413 bp, Cannabis indica
tataaatgtaaattctgccgtgtggcagtaaaattgaaaagtattaccccaaatctagtatttttgtaaaatgcccaaacataatagggtaaatagcccattattatatgggcatctttaaaataggttatccaatattcatatatcctagaatatttgcctaatatagtggcagaagactcaaatgaaatttattatgtataaataattgtgaaatttacacattcatttatgtgttttaattatacaatttgttcaaatatattatttttttttacaaaaaaacttagcttatggagttgttttttttttaaatttaaaaaaatgactaaaaaatataaggtaattaattatccaaagaaagtaactagttaccttaaacaattttccccataattttagcttattttttaattgttcctgacaaaataaaattttcaaaaaaaaaaatgatatatataattatttttgtagactttacctaagaaaaacataaaaaatgataatttcccataaaaattggtttggattgtaatgtgtttagtcttcaatcattaaaaagaaattaggctagatggcttcttatctttattattatttgagggattggccttgcttaaatctgcaagaacaaaatctaatgagaaaaagctcaatagaaaaaagagttcctatagaatatcattaataagagacatcaaattataaaaaaaaattcctacataaaacacatgaagataaaagtcaaaagtaaaaaccaagccaaacaaacttatatttagtcctcaaatttgctactcttatttactccttcgtaatagtacaccatcacatagagctaatgaattagattagaagattcaataaacattaacattaatgatgagatctcctattctatatagttaattatttctcatctctataaaattgctttaactttcatggaagtcttcaactttatctaatcatttcaacagtgttgttatatatttaatgtagtgtcataaatttatagtatttttttttatatattatatcaatagtgattaatgaaaattattttacatacaaaaacaaaaacaaacatcctctttattttttatttgtttatattttatatgtataatataaatatatattaaacagttgggctgtttgttatcggttacgtgaattaaattcttaaaattttagaaaatataataataataataataactagatcgaatatattgccacctacaaaactttatgtgaccattttaagttttgtttatgaacataaccaactactccaactcatacattgaggttatattaatattggattagagatttattgatgaaatgaaactatatatataaatccaacatgtattatagacctaattaacaatacgatttataaactttgtcactaagtaatttatagtataatttaatttgttaattttgataaaatataaaatctatataattaagagaagaggtttgattaattagtatatattaattatacagaactaaagactgacacaacatttatattctcaatgtcaagtagctatagttatcaaaataaaaaagaaggagaagaagaagaaagaaagaagaaaactcaaaaattgatgttgttatatataattatgtggtagacaatccacattgttttatgtatttaagaaaaaataataatattatattttttaaattaggagaaagggctataagatattattttattattaagcattaggagctttcgtattagtgcttttattacgttattgacaaaaagaaggtcatgccagcatatgattgtctctgaattattaaatataataatgcaagtagaccacgttatattatataccaaattaattaaaatcattattttaattaatgtcataggaaacatacttacgaggaatctaggcttggttattatttgattcttcaacatgtgttctctcatgctccccaatctcaatattatatatatcattgatattacttaaaattaaaacatatttattctctaataatcatatcgtgccaattaagcaacaaaagtattactttatattcaaaagatttgaatggttgttgtatttattaatttatatatatttcaattttttttttaaaaaaaaagacagtaaattttggtaacttaaaattatgtaaatagactagtttagaatgtaatttatttttaaatgataggttaaaaaataaaaatagttaccaaaggattaaaatattcaaattgtacgtacatatagtttttgagtacaaacatatattaataattagttagttatgaattctattataagtagaccttaaaattttgtcaattatatttgatttatcttatatagcattattgagcttgggtaaataaagctcatatacattaatatttggttgagggtagtggttaggatttaaaataagtttttaatcatttgaagtaaatgtcatgattggaatttatttattaattttattttcttgtgctaagtatgattgattgatgctaataacaatctttaaactaatcatgctttatcgtcgcacccaaagaaagatttttcaaatgattaaataatgaatgatatatatatgtttaattaaacaatcttctttttctcattcccaaaatatataataataatccattaacagaacatactttcccaacaaaaccctcaaaattataatcacttttataattccaaaagtacccttgctttcccccacgtggcccaccacctgagagtttttaagcatgggcaaacatgtcaaaccagatctttcgccgtacgtgcaacgcacgtgcaaggcctaactcgaaacatcgattaacggaaataccgaattaagcaacgattcgcccaactggttaatcacatggttaccactttaacccagctaagccggtcacgtgcgacgatgccagtgggacccacccaaccccactagaagcgagctggctgtcacgtgcacgtgcggcaaatctctcgatccaacggttccaaattgttttactattttatctacggctaggtgtcgttcgtacaccttcgtggagagagaggaggggaaatgattttgttttagaggctgtgtggatttgaccgttgactaagaatccagcaaagacaaggtaagtttgacccaaaagtacacgtgcgggtggccaacgtacacgtgtgctttgctggccgtcggcacttggccccagaaggaatagtgcgccacgtaggatccacatgagtggtaataatagattatagagactcaacttgattgatgagaagccctagagcccacacttctcggtgtctcgccattacctattttagtttacttaattaaccctctcactacttttgcttaataaa

SEQ ID NO: 300687 - DNA, 6147 bp, Cannabis indica
ataaaaaaaaataaaaaaaaactgaaattgaaaacagtgcaagtgttaaacaatataaacgagtataattaaataaaagtggctttaatcaagcagacatgtatagtattaaataggttaatttatctaacaaccttttaaacataaaagtttgtaaagaaacgttatgaatcatgattctaccgactcttgttttgttcacaacttcacatcaccatatataaaggaaaaaaattgaactagctagtgattaactataaaggcaaattaagtcttaattgaatttttcttttgatgagtgctttgtttatttctaactgatttttcttcacatttttatggtttgcaaataaaacagagtgacgctcatacaataatgaagtgattttcattttggttgtctttttcaataacaaaaaaaggtggccagtggctctctctctcctatgattttagttaatatgtacttcttccatgatattattttaacagcataatgtatattacacacgttgacaaaatgaaaataatatcattgtatacgagtcccatattgccaaaaagaccatggaaaaaggatagtcaatctttctctcttcaatagaacaaaaaaaaaaacaacccaattaccaaaataaaaaaataaaaaaaaaccttacacccttctatacaacttgaatttggtttagaacagtttaagatataagtaagtaaataaataaattaattaaaaaaaaaagttaacataaaattattaaacaggtgaattatttttacaatcacataacgtagtgtataaaccatctcctttgactagagcagatttctcatttggtttctcttcgtcaactagttcgctgtcatcatcaccatgatcatcatcatcatcaccatgatcgataatttgagctccggtaaggagcttggctcgttgagcttcagagttccaatcagtttggcccaaaaccaccagcatggtcagagcacaacagccctgagccgcgagaagaccaagccagaggcctttgaaatcaaaaccagcgaaaaaagacaaaaccagagccaccggcattcccaccatgtaaaaacaccccaagtttatgttggctccaactttgggcctggctgttcctctcaagaccccacaacccgttgtctgaggacagttaccgagctcacatagtccgatgattggcaaaaccaacgatgttaaagaaataatatctttgtcttgtgtgaacatagtggcccaaaccttccgaaccatgactgcaaacacaagagccactaagcccagtgcgaagctgcaagagaggcctacaatggcggcaaacctggcttttttgggtttgttagcaccaagctcgttaccaactcttgtggatacgctgaagcttagagaagaagggaatatgtagattagagctgtggtttggatcaaaatgcccatggaagccacggttgctcttgggtttattaaaaggccacatagcaagatcatgatctcgtaccaccaccattcaaggcagaccgagatgcaacttggaatggccaaattcaatagtgttttccaatctttaaaacaatcagtggaaattcctccccatgttttcttgtgggccccagagactaagatgtagaggattaaggaagctacaagattaaaattggtcaaaaccccacttagagcaactcctttaattccccaattgaggtgagaaacgaagaaatagttaatggggatgtggagaaagattgagaaagttgcacagtaggtcagaggaagagtaatggattgagttctcagataaatcctaagtggatgtaacagggattgagctaaaaggtcaggaagagaataaagaagataagattgagcttccattgcaatagcttcatcttggccacaaagaataagaatcttcttcatgtttaaccagagaagagaaatcggtattgaagttaacatcaaaagaagaattgtcctctgtaaacagagtccaagcagagtgtttttcttagccccaaaagcttgaccgcaaatgggctccattcccatggcaaggccagagaggatcgagtaaccggtgatgttggcaaagccgacagcgagtgagccgccggctagagcgagctcgccgagccgacccaagaagagcatggatatcatggaacgggaatagagtagaagacccgttagtatcattgggaaagcgattccggcgattgaactggcctcatcaacgagacggaaaaaatgggatttctgtgtgttgttgttgttagttgtcgaagtaataataatttgcgtcgtttgcttcgtttctagtgtagttttgttattctctgcttgttggttctgttggggtgccgtcgttgttttgatgcctttttgaatgagtggagttttgaggccttcgtcgtcgttttctgaacggccatctttgttgtttggaacatgttcgctcgatgaattgcatttgcattcgttgtagctgaccggagatgacagctgacacattttctgctctcctttttttttgggtatgaaaaaaaaaattataaaggaaaaaaaggaatttggtgagtgttcttgttcaaaataagcacacaaaacaccaagtagtagagagagagggagagagagagagagagagatgagagttggaagttgaggggtatagaattgcaagtctcgtgcttttatagagtctgtttgggaatggcttcaaagtggatttttaaattcacttttggaatgacttgtaaacgcttgattatcccattaggctaaatactagaaaaagtatatagttgtaataacagttgaactttggatatatatttttatatattgttatttatataataacatacgtgtgtattttttgttcggtttaacgcgttatgttaagaatagtaaaagagaaaaataattaaataaaatagaaagctgtatattagtaacaacaaacagtactctcctaagtagagttttcgttaaataaataaataataagtcaaatttcctttagctttttcttagagaaaaggttgagcttacggttagttagtatgcttaacagttaacagtttatgtggtagtgagagttcatcatagaaaacaagacaacattccttgttggacagtcatagtatgggccgagttaacaatatacttccaaaagcccagagttgggcccatcatcaatgctgtatctttggttaaagagatagttcgaaaatgacgagtgatttaataaaataaatattatgtgaacatacaaacaatcacacatcgtcatttgccaactcgaaaaaaattgtctgctttggtaagggagtttaaatttcatcagtttgaacaaaagggttttctgtcatcttatggttacggatatatgtttttccaaagaacaagtaccgttaccagcttgctatcaagtcattacaaaaagagttgagcaactgtacttattgctcaagtacgtacttaccctcataacatctattatttatgtcctcaaattggaaaataaggggaatacaaacaaagtggtgaacgtgaagctcccaaaaatgtactctaataaatacttcattttattacacaatttcaaaaaaataaaaagaatcctgtgattgatgcaaccataaaatgttgccaaattacaaatcacctcacctttggtggggtctttaagctgaggttggaatttcaaacaccccaaagcccatttcgtacatgtatatattacttgatcatgatgttcaacttctatttctaatcttgtttttgcaatttattacattattagtaattttttttgtaccactgcaagtgtaatttgtgtatatttgtactgccaataaaatgaaaatatatgtgccaattcgatatatatgtttatacaatgaaaaagttaggttaatattttatcaaatattaatcatgattgatcaattaagttttgacatatattattctatctattttaaaattgatcaattctagtgaattttattgtgtagctattgaatatcatttttataaattcttaattttaaagtataatatataccatatagtctaatgttattgggtatggcttggaaaacccttttattaagcaactctaagcaaaaggataaatttgttcatcatgtgacccatgtataaagtaggggaccaattggaaccttttcatttgcttgggaacattgttaagccttcaatttttggatatttatctttgaacaaagtcgctcttcaaacaacatttcaattggttacacttacacaagatatgtagatggttgatactgccaagtggatggccaacgaagttccacccacatagtcaacctaccttaactaataagtgggttggtcttcatttatttgcgataagacgatcgatagaaactctcatttaaacttgttcactttcttctttttgattataacaaatttatatatattacatataattccttttatgacaatggcatgaaaattgagcccactggaacactactctctttttgactcaggtataaacactaattatataatcattaagattaattcataaaaacgtgtggaaattttccacatgctttaaaactaaactactctcctttgttttattatgccattgtatattaggtcccataaagtaaagaaaactatttcagtccccatttcttttctttttccttctaaatttctaatactccaaaaaaaaaaaaaattgtctttattttttatatttttccgaaaaaaaaaaatatgtagtcatctgaatgaattatatgacgtcaatatgtgtaggaaatatatatagatatatcttaattgttttatttatttgtttattttttttggtgacagttttttatcaaatattatcttaattgatgatcattgttccaactttcggtggaatgctcgacttgtgtctgaagtattagatattccctccaaaatgtaaagtgagaaaaaaaggataaattttacttaattaataataataaaaaactaattaatattttttaatttctctaaacaagatttcagttcgggatgttcatgcaataattatgatgaattaattaatgcccccttcttttttttttttaagaattgttcgggatgtttttgtggttactatattgctgatcatttgttttacaccatatacaattttgaaatttataaaatcttgaagacattctaaaaaattagatactattgagcatatgtgaggacttgataaattcttaggaacatctttacaattttttgagtttttatgtgaaagaagaattgtgatttaggacaaaattatggatcttgtttaattaagctttttgtgttatccttcgcctcaccacaataaaaatgagcatgcaggctatcacataatgaatcgacactataaattttttcattttgtctcacatgaagatacgatttatagcatcaattataaattcattaattattgactaacttttttttagtaaaattgtgtcaaagcccatataatcattaactaaaatagaatttacattcattatgaattttgaaaaagtttttacctaattatggcaattttatgttcggtcattttttatggtatttctttttattgttatttttaagcttttcactactgcaaaaatggacattcgtgacggtcctcaaaacactttttttcgaagatcgtcgctaataaattttgttatactcaattttcgcaaaaaaataaaatgtatactcttgtacaagggccacatgccaaccttgaagacaatatagtcagccttgcgactttgaccaagactcataaatgtcaaataaatcaaggcatccttcttgagggccctatgaaacttctagagggctcgaaaatgtcaaccaaccatttggcgctaggactcacacacccaagtgtgccaaaatatgactcaccatcaaaatccaagtaaaaacacagcccgaggggttcgagaacaagcatagccaacctttgtcatttggccatggtagtgctcgcaactggtataagacagcataaactgcctttagtaaaataggcataactccatcaatttttatccaaatgatctggttcaacttgc

SEQ ID NO: 300688 - DNA, 1025 bp, Cannabis indica
tagttttttttttttatataattatgtatattatagctatttaagatatcttacaaattttgagaataatttaaaataatttataatatagaaaacaatgttacaatagtctatttcacatgctcataaaataaaaaatacacgtgtgcaacaaactatttaaattttattttcaatatattaaatatttttaaaattttgtaaaatttcttaaataactaaaacatatataattatataaagtatatgagtgtatgtgtttactttaattttaagaagtgggttttactttttaggatttaatattatagagtaagatatatatgaacgtgcatgtaaagacatttaacggtgacatgcacatgcatcaacaaaattacgtacgtaatatatatttatatatattgcgagttgtggggtttaccttttgtcatatttttttttgtcttatatattgtttgaaaaagattactattaaatttcaacattaaatatatataaatatatatatatatatattgaaaaacgttaaaagttaccacgtactgacactatctagattcttattatattattatttgaacaattatttatgaaatatcatgtgtgtaaagtgttacatcacccagagttaacccttaaaattaagtgatttatataaaaatatatatatatttttaagtctttatttttgagtatttaagttaggtaggccttaaatataagtttaatctgtttatatctaaagtagaacttaacattagatcatcgtatatttattatttctctctataataatatatgacttgatcctactttggtcaaatcttcttgtatattttaattatttatcgagacttattctactcttgagtacatgttatcattttttcagtcgacatgtgaaagacatattaaaagacactaccaacctaaactatattgccaactcaaaatgatactatatacctaatagtcatactcatatatatatatactagtaaaaaattacgtgcgaggcacgt

SEQ ID NO: 300689 - DNA, 5491 bp, Cannabis indica
attttagtaaaggttaaaagaatttaactaagatttttttatataaaatatgattaattaaagaataatagtttgaaatttggacaacttgattaatttttataacataattatttcgtcttgtcttttgacatggtatgagtgttttctttgtctttgagtgtgtggattggtttgaactctgtttgattatttgtttgttggagattgtggtttaatactattttggtttcgatgatgaataacgaaccaaacctggaagaacagtatgcaacttgtaatattgatgaggatgaggaagagggattgctctttgaaggtggaaatatgagttgttaaaaatagatgatagatggtgcttggttggacgttttctcacaaactggtcaattgactttcaagcaatgcaaaataaaatggcacagttgtggcagccaggaaggggaatgtatgttaaaaaattggaaagtaatctatacttatttcaattctatcataaagtcgacattgagagggtgatggagggcagcccatggacgtatggtcgagtccctatgatatttgagagattaaaacaagatgaaaatcctcgattggtggttctcaacaaactagaattttgggtccaacttcataatatgaccacggggtttatgtcggaacgggtgattcaggggcttagaaattatctcggtacatttgttaagtcagacctgaacaacttcattggagtatggagagatatctatgcatctgggtaaaaatcaacattaaagaaagaaaaatctagagaagcagggtggcctgtgctgttatgcactgttcaaatatgaagatcttcccactttctgttttatctatggaatcctaggacattccaagaggttctgcgagcgtctatttgatacccccatagatcagtttgagaaaccatataatctggagatgtaagcagccccacaaagaaagacctatgatgttggcgcaaagtggcttagatcgggactcatgaacaagtccagcggcacatcttcctcaagcaacccagcaacgacaaatcccaataatctcggaactggggcagctcaacatagcacaagatcagggagtggtcaacgcagggtattacacacacaaaatcagggatccatttcaaataaaccaataaatttgagtaactatggtgcaagaagagtggaggagaacccccagttatagcaggaattgactaataaggaaagttttggttagaagaaaatatctaacattgaaagggcgatagacaaaataactcaagtgaatgttgatgaggctcttattgtactagaaaataagagaaggagaatggatcttgataatcaacatgggccccaggagatacttagcatgggtcacgttaataatgggacaaacatcacaattggggcaacagaattggttgatgcggaaatggatgctgaaatagttggtaacataaaaaacttgtttggggtgggttcaggttcacagaatcgccaataattatgaatgtgttaagttgaaattgtcgtgggcttgtgaaccaataggctattcaattccttaaagagattgtgtctcaaaagaaacctaattttattttccttcgtgaaactaaaatgattaaaataaaatgtaaagagtgggtcgtatgttgggcttcgaaggaatatttattatggaggctcgatggagtgcaggggtttcactttactttggaaaaattaagaagagggcagcatactgggttactcgaataaccatatcgacattatggggaatttgactgagaaaggagtatggagattgactggagtttatggtgaacctattcgtagccgtagacatctcacctgggatctcctccgattcttagcaagggactctaatctaccatggtgtgtaataggagaccttaacaatgttttcagacaggaagacaaaaagggtggtcggcggcacccacatcagctcattgatgggtttcaacacgccatgaatgactgtcaattacacgacctagacttgacgggtaacccatttacttgggaaaaaggcagaggtaccagtgattgggtggaggtgagactcgacatggcactggtgaatcgtcgctttacttaggtttttcctcttgcagctctttttaatttggaaatctcttcctttgatcattgtccaatattattggagcctgaaattactcatgtgttcactcctggccgtaagtttaagttcaaaaatgcttggtttaaagagccagtatgcttcaaaattatcaaagactgttggaatagagctatggacaacaatttctctggtaaactacatttttatgtgctgataagctcagttcttggggtaaggaggtgactgggaactacaaactcaggattcgaaagtgtaaagctgagctcacaaatttgaagaataagaaggatattctctcattaaagagatacagtgatgtaaaaaaagaattgttcaaagtgcttgaccaaagagaagccttctggaaacaatgatcaaaacaattatggttgaaagaaggagatcagaatagtagctattttcacaagactgtaactactcgaaagagatagaatcaaattgaccggttgaaaaacaatcaaggagattgggataacggattgccattagtggttaccagctattttaattctctttcaatcttcttagggttcttatcaagaagttattgactgtgtggacagttctattcctaaaatggcccatgatgaattccgtcaacccgttacagaagaagaggtcaagaaagtagtatttcaaatgcatcctgataaaagtttgggcccagacggaatgacaccagattttaccaaaagtgttggtaaattgtgggtaaagacgtggtgcatatggttcataagttcttctctactggggcattcaaagatggttgtgctgatgctaatattgtcctaattcctaagaataagaagcctgagaacatgatgcaacttcgctcgatagctttgtgcaatgtgtcttataagatcataacaacagtggtggttaatcgtatgaagcctttcatgaactgcattgtggcagagaatcaaagcgccttcatcctaagaaggcttatatcaaatacgtgcttatttcctttgaagtactccattatttgaagaggaaacggaaaaggaaggatggatttatggctttaaagttggacatgagtaaagcatatgaaagaatagaatggaacttccttaaggtcatgcttcaaaaactgagttttgaggattggtggactaggctgctgttgaaatgtatttcttctgcctgttatgcagtgatccatgggagtcgagaaataggtccaataacactgcgcgaggcataaaacaaggggatcccctctccccttatctttttattttatgtgcggaagggctttcagctaccttatgttgttatgagaaatgaggtttgttacacagatgcaaggttgctaatggagcttcccgaatatcacacatgttattcgccgatgatagctaccttcactataaggcaacactggaggaagcaacaagaatccaagaagtcttgagtaaatttgaagaggcctcgagtcagaaagttaattattctaagtcttctattgtcttcagcacaaatgtagtcttagaaactcgcaacaatattagtcacatgcttggcatgaccattgcaagactaatagcttgtaccttggtcttcctagtaccatatctcgcaacaaaatggctgtcctgggttatttaaaagaaagagtctgcaaacggattcaagggtgggaatccaagttcctctctcctgcagggaaagagatactaattaaaacaatggctcaatctcttccgagttatgaaatgagcgtgttcttactgccactaaacattacctgggagatggagaagataatgacaaagattttggtggcaatcttcagacaagtctggaaaaggaattcattggctttcatgagaccggctgtgtaatcattaaaaaaaagggaggaataggtttctgtcaccttagagactttaatttggcacttcttggaaagcaaggttggcagcttgtttcacagcctgattccttggttacaaaagtctttaaagcacgatactaccccaacaggtcttatctcacttcatcactagataataatcctagctatgtttggcgtagtatttgagaagcccaacaattagttaataaaggccttcgttggtgtgtggggaatggaagcgacatcagcgtccttcatgattcttggctaccttgcatcgagaacccgtatgttacttcctttcatcctaatttggcacatgctaaggtaaacctaacgaggatggatagcacgggttgggacatggagatcttgggagatttatttgaagacagagataggaaactcattgaaaagatccctctgcaaccatctatgactaaagatacattgacttgggcacttgaagcttcaggtatatactcagttaaaggtgcttataaagtattacaacaagttaatggtaggtgggacaacaatgatgatatagtgtcaaagttctggtcatccatgtggcggctaaaaatcccaccaaaagtaaaaaacacaatgtggcgagcaggcaaaaattgtctcccaatattatgtcttctgcaaacaaagagagttaatgtcacctctctctgccctgtttgtagagtagaagaagagacaatttttcatgctctagttacttgttcacacatatagtaggtatgggatcgtgttggaatcggtacaactatctcatcagaaaacaccacatttttggattggtgtattcggatctttaatggcaggtgcggaaggaattgtagtgttggcaaaaggttatcttgatcaatggacaaatgctcaaagcactcttatcacgttgtcatggtctggtcttcagacaggtgatggtgttgagcaatggtccgctccaagtgaaaacagtatcaagatcaatgttgacgctgctctttttgaagggggaaatagctatggtatcagactggtagcatgtgaccaccatgctttcctagtggaagaccgaactgaacattttatgggggttgctacaccaaaaattgctgaagcaattggagttcgtgaagtcttgagttggattaagagaaagaactggcagcgcgtgaccattgaaacagattgtttaacgatagttcaagcacttcgaagctcaattaaaatgatatctttgtttggacaaatcattgatgaatgtaaacaactctctttagaattaaaagaatgtttcctttctttttgttaaatgatcagtgttgcgaaaattattaattactacgcaagtgcacgcaatcaagtagtatactcacgcaagtgaggtcgaaccacagggaattggattaattactactaaactat

SEQ ID NO: 300690 - DNA, 1758 bp, Cannabis indica
ttcgttgaacttgttgattatgatcccttaacaattgtgtcggcttttgttagaagacatctttttttttgtgatctaaaatcattgttagaggatataacgagtatgttatccagattatccatatatatctaccagtcaatgtgactagatatgaattagttgtacatacaatttgtttgcctagagattatccattattttattatttagaatgtatagtcatttaacctttacattatttaattactagtaatattagtcattgcttgccaaaaacaaatattaaaggaaaaaaataaaattataataaaaaatagaaaaagataaaggtgataatcgcattaatattagcaagttaattgtgacttttgttccttaatttttacttgtaccaaattataccctaaattttttagctcgataaaaatctcctaaactattgaaatagttaaatctaaaaattaatgtagtaattatttacatactaaatggttgattttaaattttaatatctagtaaatcatacttttaaagtactaaattatgcccctaaattttcatcccatttttagccattcgaaaacttgaaagcctcatttgatacacgtgatagaggaaaatccaaattacccgtattatcacgtattgtatatcgaccaccaccgacttacgctttaaaactatttataacaccgttttgtaaaatagtaacttaaaaagattaagactgaactcatttgccctaaaaaaactaaaataaaaattaaaattaaaatcaaagctttaaactcttcgaatctggactgttgatcatcatcatcgggacttaataaaaagagagagtagggcttctcatctctgttcatctctccaatcacgaattcaatccctagaacaacgattccaaaatcaataaacgactctctcgctccaaattttgtttctatggtgagaaaatgttttaataattcaatcttcgccttttttgttgggaaaaactcacactcaaaccctaaccctaatcgtttctactcgattactattctgattttttttaatttttttttctctattttatggatgcggaaaagctcgcactgagcgaagcaaaccctagtttgattgctttcccgcccgagcagccgcgggcgttgattaacatcaacggtttctgttccggtaccaaggcaatgcccaatgagctttctcagaagtctccgccttccgttgtcgacaagtttaaagcgctgttgaagcaacgggacgacgacttgagggtttcggcggaggacgaggtttcgttgccacgaacggaggaaattgttcagctttatgagttggtcttagcggaactatcattcaattccaagcccatcattacggatcttactatcgtcgccggcgaccaaaaagagcacagcaagggcatcgctgatgcaatttgtgctcgcattcttgaggtctgtttttggtctctgcgggtttcgttttttctgctttgtgtaattatgggaagttggctgggtttgtattttgttttgggtttattgtttttgagtttctgtacatgtaaacctaattgtgatgaacgtataatcgatatgtcctccaaaattctatcttttgttccgtctgattggataaccttaaaattctgtttgagggattttaaagtataaaactaagccgctcattcattgatatctcaagtgatgttgtaaatttccagttttcatgttatactagacttctacc

SEQ ID NO: 300691 - DNA, 3656 bp, Cannabis indica
aaaaaaaaaaaaattcaccttaaaataaaatacccattttattattcttttttctgttttgcttctcccattctaaaacaaatgcatgtatagaataaaatatttttgtgatattatgataagaagataaaaatatttacacaaaaacatggaagaaaaaacaattattgaatgataaaaagatattaaattattaaactctacgatctcgactgtggtgttatagcattccctcaagtcgattggactcctctcaccgatcctacacctgtgtgtgtaaggaacttcatggtgaggtggtaaattgaagttacgatcttcatctccttcacgattgggtgttcaattactgcattgtatgcagaatgttggtcaattaccgcaaaattagccatagacttcgttgtgacgggtgttgtaccaagagttattggtagtttgatcattcctttcaactcaattgtgtcccaagtaattccgtaaatacttgaagttactagttttaaatccttctcgtgtagtcccatttgcttgaaatcctacaagtttaaaaggttaacaaaactatcattatccacaagtatgcgatgtacattgtcacctccaatgttagcgactatgaccagtccaccggcgtggtggtgattttcccatctcgcatcactttccatgaaagtgacatcgtcgcactcttttttaataactttgttggtcttttgcttagattgttcacattggttagtagtttctccttggtctgcaccgcgtatcgctcttgcactttctttgaatctccacaaacgtgagatccaacaatgatggtcaaaatgtttcgaagagctctagagccactcgcttcttctgcattttctttcatatccacttggggatcggcttctccgttattcttgtattggctaaaatgcctcgtcaaattaattcttcgatttcatcctgcaaaaacaaacattcaagtgttgtgtgaccaactttgtgatacttacagtatttttttagatccctcttgtcataattgcctttaattggtgggggtttcttgaaaaacaaccttgtgctcttcgatggcatatatgtggtcaggggagacatagagttctgtataattgacaaattgcggacctctcttccgctttagggaactttcttttcgggttggtgacttggcaagcttcagacttcgatgccttgtagggctgcatctttttaggctacaacttgggctatgtcctctagaacttttagtttgcagacttctggatcgcgttcttagtactggagagcttagtttttgctttcccttctcgagctctacaagcaagttctctattattttgtggggttctgccatggcaaagaactcgactagtttttcagggcatcgtgcttgtagttccttcaaaaagtctgttcttggtagaacaattgtgataagcatgcaaacaagtgaagactcgagggacttctcccctttagttacatcgacattaaaacacttaaagtaatcttgttaagtctcaccttcgtcttcttttatgcttgctaaatttgtatacgatggtttatacgtcatggttgcttgaaagtgggtcaaaaataaatccacgtatgtttcccagattgagatggatgctttaggcaactagctagaccagtcgtgtgcgttctcctccaaagttgtgttaaggatacgacgcttatccaattgaggtacctgatcaacttccataatggttaaatttatcaagataatctataggattggtggtacctttatatttaagcgactcagaaagtctgaagcctttgaggagtctagcttgtcgcacttattcggtgacgttcaatgtagcttgtaaatgggctttatctgctgcttgatcacccttaatgctcgcaaaagattttcttgatcaatccctccttgcactgtgggattgttggtaagtgcaacttggtttcccgttggcagagcggccactgctgctatgttaggtaccaccacatcattgggcacggctggtgaaagcagtaggttaactgcatttgttgcattatttgtattcacggggggaataccttgatcggccaaaaaggggatcacggggtttctcctcgttattgaaattgcttagattttgggaccgtgcatgaaacacttcgttgaggcagtctcacatttcgtctctctacacatggtaccttcctcctagtcttgtgaacactgttcttgtcctggtgtaaacactgggggagtgactgtcagttcttgaggaagaggaatgagattcaccatcgtttacctcaatttgcggttgtacatgactacgcaagttgcgtcatttaggatcttcctcgtcttgcggccttttctccctccaccaaggttattgattagtattaggaacagaagaactcctaccacgtatggagtcatgaacatgttaatttaggtcgagtcctatatggtcattctcacctaaacgttccctctgattacgattattattagaatgttcattatgacgtctagtatcattagttatctaatcatctgtgcaacgttggtttggaatatgtgggggataacaggctcgaatccaatctcttcctgaatagtcgtgcactacgagattgtcagttagatgatagccttggaggcaacagcgggcgtgattggtggaaactgtcccactgtagatgctggtgtcgaggtttctccaacatgccttgagaattgaggaaataggttaagggggtcacattggtatgccctactcctcctataacaacattgacatgggttgttcctcctccagaaagagaaacattgatagtgccaacgttgaaggtcccattgttgttgttcgtgttcatctagtctatagctatttcaattctcctctaaaatctcaaaaatatttatcattttccaaagacggcgccaaatgttgttggatgaatttagacaataataaaaatatgtgagtattaaagagttgcttgaataccaataaatagatacgctagtactcggttagaatagcgagtattcaaatattggctactaaatagacaaaaacgatagcataaataaagagtgatttagcaagaacttggcctgtctagtccacttttggtaatgatttctagaaagcaagtgtcctttcagattacagaactgacaaatttataaatgtttttacaataaattgaataactaagaataaacatttaaagaacaaatgaagaacaattttgtccattcataaattaatttgcagcaatgtgtgcgacttcacaagtcgcagcttgtctattcacattccaaatacacgagctcgagggctctacggtgcagtttcggaagatgaggcatttgggcctatttcgttgaatgtatgcgttcactcttgattgcatgatcagacattctatgcattggacaacgtaggacatgcaagtccctgacgagtcgtcgaatacattaagtcattcgaaccaaaacctatgtaaagaggtgatctttactctattgggttttatgccctaaataaaactccattttaatgtaatccagattattcaatatcaataaagtaacataagtatttttcattcacttgtgtatgttttgg

SEQ ID NO: 300692 - DNA, 6751 bp, Cannabis indica
tgtcatattgttattgatgtaattaaatagcgggtcaaataaaacttaaaaaaataatttttagagaatatcgctaatcaatcagaaagtattacttacgaaaggtgttgggtaccactggtacccaatagcgattaccaaaacttggtgcaaatcttatccctactctttcagtaacttagacaatcatgaaaatcacgtgttagttataggggtcttagagcatttttaataatggtattctttaaaatgtcaaaaacctctaaattactcaaaatataatattttattttatcactcttcctcgtcattttttagcctttttttgttctaaaatatttaaatggtaaacacctctaaaaattattaaaataatatcatattattatttaatatatattaaataattaaattttcttatttcacgacaaaaataataaaaaaaaaataagaatgataatatataaagtattttattgtatggcattctttgttggccttttttttcactccaatctagtggtaagcataatattcaaatatgtcaaaaatatactcatgtcatcaaatatttttaaaagtattttcattggagataattttatatttcattctcctttaattaagttatcagtatctactttaagagtattcatctcattaagaatgacactgccacaacaagttaacctcttaaaaggtcaaacttaaactctttcataaaagcatattcatatcattacaccacacaacacatagtagaagacattttatgtaaagtattgctatttggcatttaagatatctttggcaagaagtaaatttagccaaataataataaaatcaaacagagtgaataataaaaataatttttcaacaaattactattattattgcatgaataaacataaaccctagaaaatatattcaatgaaaaaaaaaaattgtgtcagttttaaaataacaattattaccacaactagaagaaactaaggggggctttagccaaataaccatcccaaaaacatttcaaacgattagagcactcacaatagttagataaaagaaacttttctttcaaatagagaataaaataaagagaagaggtaaaaaaaaaattatgtccatcaaattatgttaataatataaaaacaattttaaaaatagattattaaaaataatcttagaccaaacaaacaatttaatgctatatttggcagttcctccaaaaagcttagaccatattttaaagacacatccaaaaaaaggtcttctgtggccaaccactcagccaagtattagtgtattataaatacctaataactcaagtcgactttttaaaccatcgtcaatggaagatttaaaatttatgttaaatttggtacaaaaaataaatttatatttaacccattatttacaatttttacaattgtgctccaatgcacaagatagtaaaatataaaaaaaaaaacaaaattgattatatcaatagtcatttcatatttcattgagaatatacaaaatttattattttttattcttttattatttaaataatagtaatatgataaataaagtaaataaaatttagtaaaagtcaatgaattacaatcacaatcattagtgacattatagtaaataaaaaaatatcgtttattgtgaactaaatttagtacaatgttatatcttgtactaaatttaacacttgaaaacaccattagagtacaatttttttaagtgtactaaaatatagcaatacacggactttttgatactccattagagatgctcttaaatggacaatagaactcgaacaatatgaaattcctttttaacccaagaacaacaatcaagttaaaactcttgtaatccaaggtatgtataatattggcaatgccatgtgcaacaagacataagagatttgtctcaaataaccatattccattctaagttaacaatgcaatagaaaacagcaaaatgtatgttaagttcataaactaagacaactaaacctaatggaaataaacaagaaaacaaggagatgaagttagcttcttttacttgggaaggtttacatgacataaattacaaaataattagaactttgtttttcttcttcatcgatatcatcaaaccgatacaatgaatgatacagtttcgggatctataccatatgtaccgttccatccgctatcatcacactgttagcctcttgtagttgctgaaatcatcaaattttacattatagtctagccattgaagaaataaaagaagctaaacaatgttgtatgtatgtatacatatatatatttatattacctctagtaggactgttatctctgctcttgtgaagcggacatcgatcctggagttgacagcctcctctataccgtcgatggataatgcatccaagtgattggtacgcatatgctggccgaatatagaattgaatgcttctattctgtaagacgaaacagacaaagatgtattagaactcgaagagtaggaaaactcgttgaataggggaaaagaagctatatagatacagacctctctggagaaagttcatcaacagattgggttggaaggtcatcatctatgtccatggcatcagttgttgaactgtgtaaagaaaaaattagtgagaatcagtaactgaattagatttagctattgagcaagaacaagacttgttacttaccctcctttaccggctgcaccactgtctggtctatcagtatcatttgtgggacgatcagctcggcgtttgctctctgtttctttctccttttcgttctcacgctcctccatctcagtcaattctttgtgatatatggcaaagtttaagactttgagtgcagcttcgacatctgattgtaaaacctgtttaaagaaatatcaattattcactagcaagtaagatgaacaagctaaactgtagatgaagatacgaaactgtagtgcatttgacaagttttcagtgcttcaagcagattgtgtagcacttatgatagcattggattgattcactctatctatgtggctgaaacagttagtctagcagtttgtttagcggttttttatgcgttttctaaacgccattctttcctcattgaacttggttctttggtagaggttttagcaagtttgatgttcagttttcctggagtgtccctaatccatgtatgttgaacggccaatgaggttgcacatggattagctcggcatgctcttcgggtggatagagaacttgtattgtttgatgagattctttcttttggtgggattcatgatacttaaggttgtatgacattataatttatttttcaatgaagttattcattgttgcaaaaaaaaaaaaaaagcactggttacctttctgctcaacttcaacttagcatgggcagtagagagacgaataatggtttctaaagttctggcagtaattggaagtgtccctccagtctgtagagtcaaataatcatattaatttaaaggaagaaataactattgtattctacagttttgaagaatttcacagtaattaattacctttgcatttgaaccagcatttctgagttcggcatatgcagttgcaatttgttcggatgcctaaaatatagatgttgtagaagcaaaaacaaataagcaaaaaagcacagcaatttagattattaaacaaaagaaagaaaattaaagcacatcagaacctcatcagtaagttctggttgaatcctatgctttgcgtaatgaatgtactttttcagaaacttgatggtgagcgtatcacgctttcggcctttatctgttttcttcccatgcagcattcggttatacttcacaaacacagtcgaatcattatctgcctcctcttctctaccgtatcttgaaccccctccaagggctgcttcacctgaggtttaatgcacatttactcagagttatgtaaagaaacacaatgcttgaggaaaaaaaagtgctgttgtaattacttacctccatcagttgcagaacggaaccggtgcatacgcaacacatgctctgagatgtatcggtcaatatcggcatccatttgatcaagtacaataaacagtaagtcaaaacgagaaagtagagaatctggaagtccgatattcttggttggagtaatcgagcggtcatactgtaatcaatttaatacacatgatgagtaagatgaatgaaacctggtctcgaaaaatcaaatctcaagcaagtaatttcaagttgaaataccacactggtgaccattatcttgatacttacagttccgtatatgggatttgctgcggcaaccacactgcaacgagcattgagcgatgcatggataccagctttagcaattgttacagtctgctgctccataacttcatgaatagcaacacgatcttggtcgttcatcttgtcaaattcatcaatgcacacaactccgcgatcagcaagcaccattgcaccagcttcaagccttctttctcctgattgcagacaaataatatttcagaagaatatcatttcattaagaaaactgtaaaaaaacttgtgaggtaaactacctgtctcttgatctgatgtaacagcagctgtcagaccaacaccagaagaacctcgaccggtagttgatattgccaatggtgcaatattcataatggctctcagaagttgagacttagcaacagaaggatcaccaaccatcatcatgttaatgtcactacaagaaacaagattgtggataaaatgcaaacagaaaagaaaaaggaacagaagatgtgtcctgaattccacacggatcattaacaaacacaaatagcaataaaagaataactcaccctcgcaagtgggtgccattctttaagttcttttcaactccactaagcattaatagaattactgctttctttatccatgaatgtccataaatggatggcgctagcgaattaccaagaaggtcgaatgtgtcttctctttcagcaattttctttatgtttttcaagtcttcagggctatagattggtgcatttgcctccttgttgagcaaagaaacattgttggcaatgagaacagtcctgcaaaacaagagcacttatttaaggattccaactaaaacaagcatcactatttaagatctagaaactactgttttacatggttgatactaacctgaatactccattcacactacccttacttttaccgggaagtgctttgtaaatccctacaatagacacacggtctcccggtttgcatgaatcaacaaggtcatcttcaactatgatatccactgttcttggaagctgaccaggagcagaattctctggcacttcttgcattgacaaggtctgatgatccttgtatttgcacagcccatactcggtaaccaataaatttccattgtcatcctgagcatgtactttcttcagtaagagactaatcaaataagaaaggagaagttaagaaagaaaaaggtcttgagtttaccctcgtaggatagacagttcctgtgggcaaccccatattggaagtaatgtcacggtattcacgattggtgaagcttccagtggtaggacagaaatgaacacttttaacaactttaggcctaacaagagaacctacaaaagtgttggcaacaaattattccacggataaaaagattatctaaaaaattactatctgtcccgcaagaatatcttcaaaacccaaagcatatcagtcaaaatgtaaacccatatctctattcccttctagaagataaaaaaaatcaaagtaaaaaatgcacataaatatctagggttttgggtgaaaacgaattcattcaactacatacaattctaagagtagtcactgattctcaactcatcaaacaaaaaacttgttcctgtgtttgtaagtgcttatgaaatagtataaaagaagtaagtacatttggtgacaattccttcaacgcagaccatggagcctatgaactcagacagtaagtctcttggcgtgacacgccgagatacaaaaggaccttcaaatcccacattcacttgttcttcttgcttcaagtactttggatcaattttgttagcaacttcagtggcagcatcgcaaaaggcttgcatatactcattcggattcctaagaatcctgtatatatgaaaagaacaaagagaatcaacatatcaaaatcaattaaatcacatacaatttcaaagaaaacacaccacattgaccattcacttcactataaagcaaaaacaaaccctcatcccaccaactaactaagaatttatacacacactattcagtatcgaaaccatttctcttaatatcaaagggaacaagaacaattaaaaccagttgctcctcaaattgagacaaaaacagccaaattcacaactgtatacgaaatagatttccgatattcttcctgtaaagaactaagaatgaaaaaaaaaatacctgggaccgaaatcgccgaaggcatggagatcggaaatgttaacgataaggcgacggcgcttatggttgatcatggctttgatctcgtccatgtaaatctgtaccaaatttcaccaaaatcagacaaaattgacataaacacaaataacacagagataacagataaagcagtaagagagacttacaccgtcctcgaggaacgccatgagctcccgcttgtgagccgccctaacttcttcgctgatatccatgttcggagttctagagagagaaagctagagagagagagaga

SEQ ID NO: 300693 - DNA, 3894 bp, Cannabis indica
aatgctttttcttgtatcgtttgactgcccataatggaatatattctgtaatttgttgaaggaagttggaccatttaacatttataatgtgtacattgtcctcaacataagtccttatagtaaataataataaaaaaaaacaagttaaaagttatagtgtttattatgttactaaattaaaatataactttttattattttaagtcttgtcttttgacatagtgagaaaatctctgtttttttggtgttaagttttgtcttgctcgttttcttgttttgtttctatggcctcgagtaattctttaatccaagaaatggaagatcgttatgcagatgttacgaagataatgggaatttgggagttaattttgttgttccagaagattaggtgcttgatgattatctatgtattgttggccgttagcttaatgcaagagccattaattttgaggttacgagacatgtgatggcttctctttggcaacgaggcaagggagtgtatgttaaagaacttgaaacaaattgttacatttttcaattttatcacgagattgatgtagaggaggttgtggaaggaagtcttcggacttttaatcgtattcaatttgtgtttcagtgactaaaaagaggtgaggatcttaagaggataattttcaacaaccttgatatgtgggttcaaattcatggacttcaaatgaggtttaaatctgctcatgttgttggaaagttggaaaactttgttggtacgtttgtgaaggttgatcctaagaactttcagaatatttggcgtgattatatgagagttcgggttacgctagaatcacagtccctttgaaacgaagaaggaagcttaggagaactatggaggatgcaggattctaggtagagtttaagtatgaatatgcccttatgttttgctttatttgttgaataattgattactccgaaaggttctatcctaaactctttgataccccaattgagaatattgtcaaaccatatggagtatggatgaggactcatttgaggaggatgaacaatttggtttgatcttaatggttgcgagatggcactgaaactgatgaggtctttgctgatcgttggtccgacgatgttaatgcagctgttgtaaagtcaagtcaacgttgcttgattgtggaaaataatggagaggattgtggaaaattgattacgagaaagatggaaaaacaaaataaattgaaagctgttattgagattgagcaaatcgtgggtaataaggaggttgataactctaatcttggtaataattttcacgcggtggatgagttaggagattcaaatgacaacttgattatttgagattctaagcgttatcgtatataggaaagaccttctagtgggtactatgatatggaccaacaacaaattggccaaccaaaagttaatggtccagttattgactcgatggaagatgttagtggtgacatggaggtcaatgaggaagtaagtgatcaagtacaattgggcttaaaaaaagggctcttggtgggtgctggttcccaggcccaccgttcattttgagtatcgtcaattagaattatcgtgggcttgggaacccgtgggtttatcaattcctagtagatcttgtaatctaaaagaaacccatttttcttttacttcgtgaaactctttgtcgtagagataagttggagaggcttcgtatttcactagagtttgaaggattgtattcggttgatgctagagatcattttggtggtgtgcctatgcttaggtgtaatagtgaagaggttcaattacttagtgttgagaataactcgaccaagaacataaaaacaaatacacaataaagtaagctaatcaaagacagaattgaacataacacaaagtaattaatttggactaatataaccaagcataaaacaatgtaaatggaagagatattacgtggttcgaacaaggaataacaatgtgttatcctgcctactctatggccaaaaatagcccttaggacctttgatatttattgtatgaaaagtcaccagagattacactgaaagaactgctaagaacagttgacacacgtaaatgatgccatgcttcaattacaaagattctctcatcttctttcctctcaactctggtttctctcattttctcttaattatttctctacaacttggtccgaatcttaatctcgagtggtaattacccctttttacaagccttgattgagttaagtggcataactgtcataacagaatgttaggtaattatattatgacattgctcgagctagagaataggtttgtatcaagaactaagtacctcaaaatgtgtagccaaacacaacaatatatccacctttggctttacatttgagttgtagtcatcctgttgagaaagatctattctagacttgaaaaactcagcagtttagtatgtttagtaagttcagataaagtctgaactttgctaaaggaacatacttggttagcatatctgctgggttttctttggttccaatcttcttcacttgaacttccccttttgcaatcacatccctgatgaagtgtagcttaatgtcgatatgttttgatctttcataaaacataggattcttcatcaaatgtagtgcactttggttgtcacaacgcactacaatatcttttgcattgaagccaactttagatgtgaaaccccttagccaaatttcctccttgattgcttttgtagcaaccatatatttagcttctgttgaagataatagcactaccttctgaagattggatttccaactcacacatccacccaaaatagtgaatgcataccctgttataaacctactggtatcaatacttctagcataatctgagtctacaaatcctacaactttagtgtttatcttgttgttattgttgtaaactaatctcaaatccattgtaccctttagataccttaagatccatttgacaacagacaaatttttatttctaggatctaaaatgaacctactcaccatgcttagactgtaagcaagattaggtcttatacacaccatgtagtacatcaaacttcccacacaagaggcatatgaaactgtgtcgatttgagcctaatcctcttctgtctttggggcctgggattcagaaagtttgaagtaaggggctaaaggtgtggtgactggttttgactcactcatgcaaaacttatctaataccttttgaatataatctctttgagataaggatattctagtaggcctttctcttttgatataaatccctaggattctcttagcctctcccatatccttcatttcaaattttgcattgagttgttgcttcagcttgttaatctcttgtctttcctttccaatgatgagaatatcatgtacacataatagcaaccagattggtatgctattatagtacacacatggatcatagttacttcttgtattgctagtttcagtcataaataaatcttagattccattgtctaggggcttgcttgagcccatataaggacttctttaggaggcatgcttgatttggcttatcactcttgtagccatctggttcagtcatatagatttcttcctcaagctttccatgcaaaaaagttgtttttgcatccatttctagatcaaattttgatactttggccatcatgattctgatagaggtctgttttatcactggagagaatatgttattaaaatctatgccttaatgaaaccttttactactaatcttgctttgtacctgaattcttcacctgacaatccttccttttccttggaaatttgcaaccaattagtttatatcttgttagccttgtaacagtcttacaggttctatttttcttgagtgatgtcatttcttcatcaat

SEQ ID NO: 300694 - DNA, 2884 bp, Cannabis indica
ttgactgatcatgagcaaggttatcaagacagacatgaagctgtgatctgaattccactggtcttcagactaaacaaactagtaacaagagtggaaagaaataaagaaagacaagagaggaaataagagagagagagagagagtttgttttgaaatggaagctagttttgaagtcttttaatatggtatcaagcaagctgtgtggagaatactgccaaattctaacaattgtttttttttttaattataagaaatggcagaattgtccatttcttatcaataaattgctaaaatgtccttgtcacctccactactatatgcatatctactcaatttttgaacttgtactaatgatagctggttttttcgcctgtgcaggtcaatctttgttctttggctgatagctttgaagttattagaagcttaaaagaaaatggtttttctcttgtaatacaaaatttacaagacatttaatatgttaagtatatgctcttctcattttttttcttttttttgctggaaatatgcttctctcacttgatcataataaattcttgagtttggtgagatgagataatcataaggttaatgtggtccttttctatattacggttgactttttcttaattggatctcaccctctctctctcgagcttattattttttttatttttttaacaaagcttatttttagttttaatagcattaattaaacatagtggtatgtaattattgggggagaaactaaagtttcattcaaagccacgtggggcaagatttcgcatcacaagtggcatacattcactgacttttaatttaaggtcttcagtaaaaaaaaattaaggagaacagattaagattatagacatatttgcatactaattaagtgagatattccaagaaggtgatccgggtaattaatgataatcttatccaatatgaaagagcattactattaagtattagtaagtaactgtctatcactatttagaagtgatattatcactatttagaagtaatattttttgattagttagtgtatttcttaaaaattattactagagttagatatttaatttttgtaatagtggtataatattataaaaatgtattagataccaatagtactacttaattaataatatttctctaaatttaaacaatgataattatctcattcttacaataataagttacataggttatacttttattattagagcattactattaagtatttaaagtatttaaaatgttcaataataatcgaattagaaataaattgagactacatttcagcgtctgattaggtggttggaagatattaatacctatactttaaacaaagttcagtttctgttgtatatcacttcccaaataattataataatacaaaatcaatagtaagaacagagtctgcagtatgtccacagactgattctacaacaccattggtaaaaaaaattacactaaagctaagaaaaatttaatctagggggctgacattatataaatatatatatatatttatataatatgaacatattatataataatgaggttgaatttgaagtttgaaacttaaggcgtgtttgaaataactggaggcacatgatgattaattgattcactatagtttctcatatgaaatgccagcagtatttgtccttcaccgactaattaaatatatttatataaaaaataaatattcatcaaattagtgtgaaagtacatattatataaaatatttgaccagaccaggttagttgcttatcttgagtggaattaatttctttctttttttaatattttttcatggaaatcttgtatggaattaattaataactgctgctgatgatgatatgatgatgcagagcagagattcttcttttatattattatatcacagaaattacgtaattaatgccttgtctttgaaaatatgtaaataattatataatatatttttttaatgtgctaaaataatattataaatggcccttaatttcatttctcctcgacctgattataatatcaatatatgctattttacagtagtgggtcgttatggagatttaaatataaatctctgcttatttctacttatataatatatatactgtagatattattcgtctacttactacatttaattgaattcaatcactgtaatgtgaattctattatgtcatgtgttaaagctatatttcaattattgtaacttgtaataatacgtagtacaattgattaaatatatgtacgtacgtaataattattgtaatgtattatgtacgtatcttacataagtatagtaataataagacagatattcatacaattatcaattataggttaatgtatggatatgacaaccaaattttaggcaacatgtggattggtttttatgttattaacaaccttgtcaattccaaattctatatataaaaaaataataatactaataatagagaaactttgaccaccttaaatcaagtagaaaaaaaatttcaaaaaaaaaaacgaactatcattggttatgagtatcagctcgaatacataagttaatacatgcaataacgatagccactatgattcttttttcaaagaattaattatttaagtgctattagtttctagcataggagtaatgaaatgaaatgtcaataaacttattagaaatatcagggagaaggatagagggattggagaattcttttgtttggcaagagggagagaagaagggagaggagagatggaaggagagggtctccctccgaacacattatttttcatccctaacatggagaaattcaaaaaaaagacaaaaaaattatacaaaatatattttctacccttaaaaaaataatatataattatattaaaa

SEQ ID NO: 300695 - DNA, 3361 bp, Cannabis indica
tcgcaagttcaactcaaaatgtaccaaggaaaaattgctcagcactttaattcaaaggtaaaagtcatgcatttgatgttgacaatctttttttgagaagagtgttcctaatgttgcaggaactgggagtgggggtacttagcccgaattgggaaggcccctatgagatactcgagaaggtggatcaatgtactttttagttgaaaaggatggatggatcaagggaccttcacgcttggaatgcagatcacttatgttgatactaccaataggcagagaaaaccaagctttgatgatatccataattttttgtgtaaaaatctatgtaattaacttttatatgtgtagccctcaggtgtaatgaaatgaaagacaaaaatagtttacatctaaatttacactttgcattttcggccacaagctatgtttagacgagttctgggaagttggagaggtccacacttctcagctcacttgggggtatcatgcctagctgtgtgtgccctcaaaaaatgtacagtgcaccatgatcaactattttgtttattaacattcataatttttgtaattaagcttaaaagaagatgcattttcaaccaaattccttaaaaggagggtcgcttgaattccttcttaaagctagaataaatacacgttttgaaagaagaagcattttcagccaaaattcccaaaaaaagagaataatttgcgtgaatcccttcttgaaaactttcaaaaataggttgtttagaagttaaaatgggaaggcttctcttgaatgcctatagactctaactatatcttgactgaaaggtattgtttgaagttcgtagagtgcaaaatcggcctcccaaaattatgaaaaggcttaaacaagtcggccaaggctccacaagccggccaaggcttaaatagtctcaaaggcctaatcatgttatcaaggactttttatcggctcaagtttgcagatttcataaattgttaacaaaaccgtcctacctgaagtggaacaaggtacttcttaagtatttcctaaatcagtggatggttgggggtaagtgaatacaaggttttgaggcaatggtcattggaaccacgtgattctcaacaacctaagaaggcagcccttaaaatggtctaataggccaattcataaaacttaaaattgagaggtaaaaatgggcaaagcataaaagtttatgacggtgcctcgcggaaaggcatattaagttcttctcgcacagaaggtgattgtcatatgaagccccgcagaccaagaaaaagtaaaaacaacaccagaaaaaataaaaggaaatggaagagagatagaagtaaggttgtctaaaggaaacagataaatgctaaagaacaaaagtggctcctaccagtcttggaagggggaatgtactactatattgatgtgaggtgggtcattgactggcccccatggaagatttaggttaggcccagccgcgtcttggacaagctcctcttcggccttgccagaggatgcctttgcttccacgagcccttgagaacttacgacctcaccattggattcctcatcgttctcaatagaaaggggaaatttctctaggtatgtgtcgcagtgtatggcgagtactctcctagtaacatcttccctctctttctcatcaataagccagagtatagtggagtctgtctgccacaagctaaaaaggaccatggcataagacatatccaaggagcaaaggcgatacttctctaccctagccggcgctttagcagctacctcaactgcatcctgaatggcttggggagttgtttgtcacatttttttgcatagtatccacgacaatatatgccctcacaccatttgctgggctttggcttgcctttgtaacttgttaatgatctccaaatgaagatcactattatgacgggctacgtgaagcagtatattcagattgtcatgttatgtcatctaggctctttctgtatcttctccgcatcacactcattacaacggctttgtatgagtaggtccttttgttggatatccccttggagagcgctgacttcccaaatttatgtggatatcattttagataggagaatcaccctgactttggctttgcctttctcctccagagaaagacaaagctcttccctgaccttatctaagttctcttagagggaacacaccatctccttgccttctttctcggcttgggccttgtattataaatatagcttccagtatttagcgtctatcttcttctcctcaaccgccaacttggcattatagttctcctagatcatttgggtgctggaggtagtttgggtcttaagttgctcaacttctgtacgtaaggcaccattttcttttgtcaaggattggactttagcgtgaagttggctcagttcaatggtcatatttcccactttttttggtggtcctctctacaaacaacgccatctagagaaaggaagacaaagggaaaaaattatacacactttagtgattaaaatttcaccaaaagggagaactgctcaaaaaattgaagcttaaccctgctccatgttgtttagcaacaaccgatagtgtgtataaatcaatgctgctgctcacaacccacttcttggatgtaagttcgctcacaataaggctcatgctgtccaacatttctgcaacgtcaagggcaaaggctctgcccaccttaggtaccaaattctggctcactgcagcaagatctaacactacgccagggaaggaaggctgggaaactcactctacaatttcaaccatcttgatggaagaaatccagatagcccatttttagatttacttgctcccgctcatgacgctttttcaatatagcggcagactcacctaccttggtgaggtagtcatggccaagaaccagaggcctcatggggaaagtaaaacccaatgagggaaccttatctacagtggtgtgccgagatgggtcagtaggggcagacctaagagttgtgcgcccagcaagatgtttgagtgcaagagagtgagatgggcatggggtagactgggatgtcacaatttgcaactaactaggggataaaattcattgttgttgcgattgtggcactcattctaactgttgtggttgttgtttttatagttgtggctattgttgttgttattgtggttgttgttatggttgttgttgtggctgttgatgtggttgttgttgttgttgttgttgttgttattgttgttgttgcagttgttgttgttgttgttgctattgttgcaatggttgaagggttaactgtaaagcccgcttagttaatttggaaattagcagttgttgatgattaattatgaaattattta

SEQ ID NO: 300696 - DNA, 2151 bp, Cannabis indica
tttggaggtggagaagttttgtgatatggaattacaaagtgtacgtttttcctgtgaatagaaatgaagaagataataataatataaattaataatatctaaaagttaaacaaagaaaaataaacgattccttataatttcatatcttgacaaagttcattacctgcatattcttgcccacagaagaaaactctacagctcttaggtactgttagtggcatgtccttgagagtgtccatatccaagtccatttcaggttcagtttttccattctggcctaacctttgatgaattccatcggctcttccggaattctgcagtggtgttcttgcaagatcaatctcttcaatccaaggattcacttgtagtgtctccatgattgtatgtagtaccaaatctccatgaacccctttgcagccttgtaaagacaagtatctcaatgaggcattcctctgcaggcaagtaaagattttctacaaaatcatctgatctcaaactctcatcgtcatatatccctaatctagtcacagtttcattggttgtcagaaactgtaatatggctgcaagcccatctcttccaatcttggttctaccacctccaaatgtcaaagcttttagagttatatttgcttggttttgaagggatgagaacctgctcaatggacagagtaaatgttctactccaactcctctaaaccagtttccatccaaatataagctctctaacctcttgttcttaaagagtccagcagctacatacacaacccccttgtctttcaagcatgtttttgacaagttaacctccttgattatctggttctgttccaaaacccatctgaactccttggcccaccgtgatttgagccggactccggtcatgtctagagacttaacagttgagttccaccccaaagcacaggcaactctgcaggtacctgagacatccaacttgtaaattctaagtgtgttgttctctggtacaaattccaccacctttgaactcttgtctccatgttctccactccaaacatgaacttccatagacctatttcttgccaaaactgctgaaataagtggagttgcagtgatagaatcggaatcaaagatagtcaacagcctcagtgttgagttgacttcaatcatctttgagagctcttctgctcctcttgatccgattgagtcctcccatatctggaactcttccaagctatcattcaccttaagagcagaagcaagaagctcagccccaacatagccaatagctgattcagaaaaaactacctctttaactgctctatttctcttcagaatctcagatagctcaaacatacattctctactcagttggttccttctgaaacaaagttgcctgatgtttgagttactctcaagcaacaaaccaagatttctcagctgtttcacatcccattctaccctgtgaaactcgaagtttctcagacatgattggctgctgccacccttggcagctgtaccccccaaaactgagagaatctcagagaagtatgagagactgtctttggagatgtttatgttgatggaattctcagtttcttggtaacaacctgaaggagctgggggctgagattggtagaaggaaatgctgtgtaaacttagggtctgagatttgatagcagcaagcacccattgaagatctttgaggttctgatttgttgccatagtttttacatgagtaagaaaacttgggaacgtttaagaaagggatgatgagttgtgaaaactgaaaaagtcgggtattctcaaacaattctttaatatatatttatatttatatatacagcattgctattgggcacggtgtctattttttttataggtggcgttctacgattggttagcgatatttttaaaaaaatatttttttaaattttatagaattcgatatttaattacaccaataataatataacactaatgagagtactaagcactaatggtactttttagtaattctcattctcatatatatatatatataaagagaattgctataaggcactattgatgcttaacactcttttcggtatcatattgttattggtgtaattaagtatcggattacatataatttaagaaaataatttttaaaaaatatggctaaccaattgtaga

SEQ ID NO: 300697 - DNA, 5098 bp, Cannabis indica
tccaagtcataataaggtgggttcttaaaaactctcccactacgacaagataccgtgattatgtgtctaggaactttagtggtatagacctctttagttgcattaatacaatagatgttgtgggactatcttatataatataagatatggtcttatataatataagatatggaacacttttgaatttaaatcaaatagtctctccacttctttgttacttcgattttaagattaccatatatatagtcaacttctagaaaaatagtatttgcaaaaacaaacacttactagtcttgatggccatagtgtagtccaccccttatcactttagagtagccaacaaatgtacaaatcccgttagcagttctagctttttttcagtacatgctcagggtatatttagatttaataatggtgtacactaagtacgtacttgaccattatattaatccaaggttgtcttgggacctaatcttagatgggactacattttaaaatatcgtttgttgtctctaaggaatatccatagaaagattttggtagttgttagtaactaatcataaacatgatcattttattaaaatacgactatgaaattatgaggatgtatgttcgattataattctaagtttttttaaatgatctttgaactccatatcaaatatttctccactcctttcagttcgcaagatctttaattaatttcttaactgtctttacaagaaattcatgtaattttttaaacatttcaaatttttggcataagttaaatatctacagtaatcgtctaagaatttaatgagttactaataaccatcctatattatatatccctatgtccaaggatagttgaacatactatccatgtggttattcacatgttctctttgcatagaataatcttgccaaaaccactatgacaagataaagtgccataaataatcaacagtcattactaattcttgatgtatatgattcttaggtctagttacaactaacagtagattgaatagtttaagtggatacttggtctcagaatatcaagcttattttcatacatcaacatatagtttgatccattgaaatggatatcaaaacttgtgatagttaaacacagtgtttatgtaatttagaaactgaattgttattctagcttggacttccactactaaatcactattataaccctaagcttagcttaaaaaatatataatatagatttcaaaactataatcttaagtttacgtcaatcgatattttagtagcactgtaaaaatgagattcaagatataatcaaaagttttaaataacaaatctagcaacctagtgaatggtcaccaaaatttatttttcaaatagtaagagattagcttgaaaatttctaattgagagtacaaatgattttatttgttcattagtaggctctaaagtgactaagcagtttatttgagctcgttggttctattagtattattagatatcctccattgctccaaatattatacctattcacccaattaatgttactaaattaattctcgttttgtgagatattagctcaaaggttttgaataatgagtataaataatgtggtttccacattagtaggagtttttaagtaaagaatcatgtttacgatattctattattattaatgacacaagacataatcaaatgtttcaaataacaaacctaacaacttaattagtgaatggttaccaaaattattttcaaatagtgagagattaagatttctaattgagagtacaaatgattaagtttcttcattagtataggtgccgaagtgactaagaaatttatttgagagttttggtcttttaagtaacattacaaatagtcaattgttccaaatataatatatattaacccaattagtgctcggttactaaattagttctcatcttttgagatattatagctcaaaggttatgaatggtgattacatatgatatggttcctacattagtaagaattttcgagaaaataatcatgttgaggatatgttagtattactaatgacataagacataattaaatatttgaaataaaaaaacctagcaacctaaaagtgaatggttaccaaaattgattttcaaatagtaagagattagcttgaagatttctaattgtgagtacaaatgatttgatttctttattagtaggctcctaaacggtgtatttgaggatgttgtttctattagtaacatttaatcgctctaaatataacacatattaactcaattagtatttagttactaaattagttctcgtattgtgaaatattagctcgaaggttgtgaatattgagtataaataatgtgattctacattagtagcggttttaaataaacaatcatatttaagatatgctaatattattaatagacttagcaacctaattagtgaatatttaccaaaattatttttcaaatagtaagagattagcttgaagatttctaattataagtacaaatgatttggtttcttcactagtaggctctccttgactaatcagtttatttgtgaatgttggttctatctacaataaaaataaaaatagtcaattgttacaaatatcacacctattaacataattagtgaatcgttacttaactagttctcatattgcaagatattagctcgaaggttataaatattgagtacaaatgacgtggtttctactttctctctcctcacttaaatagaaagataaaaacaagaataaaaattaccaaacacataataaaatttttggttgtatattcatattatgatagagttagttggttagttaaagaatctattttctgttatactattgtaattaactcttctctcatctgtaacaaactctgtttcttggattcaatatatagtggctgagctcacatatttcgtgagcctctcttttccatctttcttcttcttctctctcactcttattttcttacatggtatcagagctttcatggcatcgattggagcaaactcatccaacaatggaggtcaagtcgacggtgatgatgctcctccaaatgcagctaaaccaatccttcttgcaccagaggctcctcaagcaggatttccaaataactacgtctgcttaaattttcttctggatagaatcaattacaccttctagagatcactggttctagcagttgccagggcttgcaacctcgacgggtacatccttggattaatttcctcaccacctcaaactcttgaaggtaatgcacccaaccctgcctatcttcattggctaagattcgatcaatttttaatgcattggctgatgaattctatatctaaaccaatgcttgggcatatcatcaattgtcgatcatcctctgagatctgaagtgtattctcaagactcttttgcctcaagatccagggctcgcgttctacaagtttgtggattactttaggcaaccaagaaaggatcatcgccgatagaaggttatattctgaaaatgaaaagctatgtagatgctcttccagctgctggccagcccatcactgatgatgaccttattcttacattcttggaggattaagccaagaatatgaagctgttattgtgaatcttacctctagagactcccctgagtttaccagaaatccaattcatgttgcacagtcatgaactcagaattaatcaacataccacggatgcccttgccaatgttcaagccaatatggaaaatctctccaccaacaataacaacatgggaggttacaatggtcgaggttccagaggaaactatagaggaggcagaggctattctagcaatcgtggtggtcgtggtaacaaacctgtgtgccaactatgtggcagggctggccacacaacatagaaatgttaccacgagttcgcattaccttcaatggccccttatcatccagtcagaccaacaataatgaagccaacagtgaaaatccttaagccaatttggctgagacccccacttcaagtgacatttctggagcttggtttcttgacataggtgccacaaatcacatgacatccaactctcaacatatgcaaaatccagtggattacaaaggcaaatctaaagttcttatatgtaatggtacctctatgcctattcttcaaatatgatctaatcttgttcccactaccatgcaaaaccagcatctcattctaaaagacattcttcatgccctaaatgtcactaaaaatatttttagtatttctcaattcaccaaagataataatgtcattcttgaatttaatgatcattgttttcttatcaaggacaacacaacgaggcaagtacttctaaagggttccctcaatgatggcctatacaaacttcaagtgcagccctcaggtacccctgtccaaccaagaataaatcaacctgcatctgtacacaccaacaggttttcttctgcttttaattgtactactactagtaaccttgtcttagattagtccaaagttgtttcacttggcattgtaagcttgtacactcatccaagctaattttagccaaagttttagcccatattagtcctaatgtcaagtgtaaaaatgtcactttttgtgatgcttgtcaaattggcaaaatgcatcaacttagtttcaaatataccatgaataaaactactgtccctttttaacttgctcatacatgtgtgtggggtccttctttttacacttctatagaaggatacaaatactacataagttttgctgatgactatagcaaattcgtgtggattttttctatgaaaactaaatctgaagcaccttctctatttaaacaattcaatgcctttgtagaaagaaaattctaactaaaaataaagagtatacagtcagatttaggtaaagaattctctcctctcaaagaacagttccttgccaatggcaagaaattcatgtccccatacacatcaacaacaagggagagtagaaagaaaacataggcatgttatggatgttagattgacactgttagctcaagctgaaatgcccttagagtttttgtaatacccagaattaagaaatggattagcaaaaccctaactagataattatgtataa

SEQ ID NO: 300698 - DNA, 2777 bp, Cannabis indica
tggctggaggatttcgtgatgatcaagcgatgttgaggagcaagccgtgagccaccaaaagttattaggaagcaattcctttctttttccttctttttctgttttcagcaacaatataaacctttttggtaataagttttggttgcatgttatttgtaagataatattgcaattgaagattgttcctgtctcaaagaggactcttattctatcaattggtgcttttgttgctcttcatccaatgaagaacgatgagattgctgctctgttcgaagatatgaaggcaagcttcaaggaattctcagaagctcagtcgagacaatatcctaagatgttgcacaaccatgaagtcaaatacgaggaaaaaattgctcagattccagctatgtttacgcacatggctaattctcacccaaataacgaatgtggaagttcaggaataccaacccctcgacaaacgtactaccatgctactagtgatagagatggtgatctcaatagaattcttaaaaaccttcatgtaaaggtagtcaaatttgatggatccaatgtggaggattggatttacaagatcaaccatttttttgatctggatcaaataggggatttcatccgcttaacagtggtgccattttatttggagggggtgtcgttgaagtagttctaatggatggagaagagtggttcattttatgaattggaatgtatttcttcaagccttgcgaatgcattttggagattcattatacgatgatccccttggtcgtatctcaaagattactcaaacaggtcatgtgtctcaatttcaatctgaatttaaagaactgatgacaaaggtaacttgtgtttttgagtatttactcttgattttttttgtttggggtctcaaaatggaaatatgcagagaactcttgctctctaaactggtggatttagttgatgccatggctaaggcaaaactatttgaggatcagaatgacgatttggttgtgagtgcgaagggggatgcatggattttgatctggttgatcccctcatactatcacttattcatctccatcaggcaataatacaggtagttcatccttgtataactccacaccaacaagcacttcaggtcccaaatctttcaaaattggtaaaacctcattgccagtaaagaaactgacccccactgaaataagagagaagctcaagaaggggctttgtttcacctgtgatgaaaagtataatgtcggacatcgatgcaagaatcgcatcttgattttgtgtggcacaagggagaacgattctgatactttggccttggcagatcaagatagtggtgaattagatgatgccccaatggatgaggtaagcctaaataccttatctaatttggcgaatccacgaattttttgcttaagcactaagcatagcacagaatcgttggaagttcttattgatactgacaagcaataataatttcattcaagaaaccttagctaatcgtttatgattgaaatgtgatgatgccaggtgcttcaaatttccatgggcaatggttactccttaatgtgctcaaaaatatgttttggagttgaactgtggttgcagggatatcaatttgttgtggatttgtatgtgctgcctatttggggtcttgatgttgtgttgagaatgcaatgcctccaaactcttaggccttgttggcacgatcataaggctcttaccatggaatttcaatagcaagacaaggttttcaagttgacgggttcaactgattcgagtgttcatcctttgacattcaatcagtttcataccttgctcaatgaaggagaggttcgagaggttactgcttaatgacagtagcgaaaggagacaattcctcagctgcagacaacaagagttgggaagataacttaccaagggaagggaaagatttgatttctaagtttcaagaggtcttcgaagaaccaaagcaattgcctcctcatcgaagtgttaatcattgaattttcctttagccaggttctgctcctgtcaatgtgaagccttatcactattctcatttccaaaaagatattattgaaaaaatagtgtgtgaccttgtctctcggggttttacaaaaactagtactagcccatactcttcttctattttattagtcaagaaaaaagatggttcattgcaattttgtgtggattattgagccttaatcagtgtgactgttaaagatcactttctcattcccaccattgatgggatgttagatgaattgggcggagctgagatgctttcaaagttagatcttagagcagggtatcatcaaatttgaatacacccaagagagaccgacaagaccatttttagaattcatatgcaccataaactgctaacttcccaacatttttttatggcctaaggagtccgagaaaagcttaaaacctcttagcaaaagaatgacctatttaaaatcccctttacaaaagagtaacaggtcatcagcaaagcaaatgtgattcaagtttaggcttttacatctcgtgtgaaacttgtaaaagttttttttttgttttttttttttttttatattactgtataccttattgtataataataagaataattagtaatttttcccctaaactttcgacattacctgatcctactccctaaaatatatgacttgttaaaaattcctcatgaacttttacatatttacataaatttatacatcctgttaggttccgtctcattattctgtttaaatattgatgtgtactttgtaattaac

SEQ ID NO: 300699 - DNA, 3304 bp, Cannabis indica
agggtaaaatagtaattttatcactactcaatataaactatctatagaggatcaatgattgttgtgattgaaataaaggataaattatagtgtatctatacttggtgtatgaaatgttctatgtatcaggagtgtaattctgaatttatagtgaagtcaggaagaattaataagttaggaaatttacttggtagatttcaagatcgctgcttattaggagttttagttacataggctcatggtccccacattgtctgagataatatcatcttgtagactcaattaattgatttaataagtcaattaaaattcaaaaatagactatgtcttatttaagaatttttactaagtttggacaattttgagaagaaattaaaagagatacaaagttttatttgttaatagtactccttgtgggtctaattaataatatatttgcattatatttttatttgataattatttataattattaaaataaaattgatatttaataattagatgaaaagacagtttagtttcattaaaagtggcaaaaatctaactctaaatcccatgaaaaattcgaccctaaagttagattttagcccgagtttttattttaagttcatctcatctaaacgtaaccctatgtgtagcgatataaaaaaaaagagaagaagattaaaaacttaatgtctcatctttgtcttctcttttattcacaaatttcgaaataggcatatactatggcttttgaattcccattctcaaaaatatgttccaaaggtgaattgagtacaaacttacattatttaatgtggtactcaagcatttgtggaagactatgataaacacaatcgaaggagaaggagagtctaagttcagttcttgatcatactctgcaacaaaaaagatcaagggttaaagaactgaacggaataaatcatatcatttgctacaactaatgtgaggttttctaactattgttgtgtttatttcattattttaaagtttattcttatataggttgttatagattatatatctattatcaacatacatgttagtaaatatagattctggtaaaataagatccaacagttacaaaattatccatgtaaattttttttaaaaattaaatagcttacaatgttgaaaataattttgaaattttttaaatacgcgtgataaattagaatatatcaggaattctattttcagtattgtaaaatgtaaactattcaaaaattttaaaaattttacaagaatgaaattataactataataaatactgtaataaagaaaattaaaaaaaaatattccgacatgtcattcagctgtagaggttgactaagaatttataataagagattgtaattagcacccatcattcattcatatataaagcattgctattaggcaaaatgataccttacaattaattagttaacaatattattgtatataattatataaaatctaatatttaattacactatatataaatatatatatataatacaccttaataaatatatataatacaccttaataaatagtaatcgtacttttttaacatttctcatttatcaataatctcttcatatatatgtaggcattaattgttgtttgagttatgactggactccacatattaatgtgtcatatacattagtactcattatgccaaaaatgtgaataatcaaagttggaccattttcaaaggacacttacttgagcatggtcttactaactcacctctattcataataatagcccacagaattgtaaaaccaaacaaggaactatatatatactaaagtttcaataaatacctataataataataataataataaaaataataataataataataataataataataaatgatgtacctatggaatggtctgttactgtcatgaattaatagtactgcagagatcatatatacatatatatatatagaagaaaaataaatgaattattttaaagcattattatagctaacaatttttcttcatactatatactatgatttaccgacattctttgcctaattaagaacactcagtactgttttattacttcatatactatttttttaatttttttttttctaagtttacggtttgggtttctaaagtagttgcagcactagttgcagtaagggtttctatacgattttttattacaatttaagttgcagcgctaattgcaataggaatttctatatagaattcgtaaaaataaacaaaaaaaaaaaaaaaaaaaaaaaaactaattttgaagtgtaaaaaatgaaaaaacccatttttttcacttaaattgctcaaaatatatcattattatcaatttttctttttatggtcgtcaaaaaaataaataaataaataaataatctttttagtggcttttggttatactgtgatcaaggtctaaacaaaataagaaaaaaaaaactttaagcaaataatattcagaactttgtgttttgcaaaaattattaatcaaactcttgttaaatgataaatcgtattttataatttttaaaatgatacaaaataatatcatgaactcaatttttcgttattttttttaatataattaacttgaattaaaactaattctagcacaaataaatatagaaaaatataatcagcttgatcataatactttttgatgaagttattattaagtttaatttaacaaaaattaagctaatttatactattttaacatatttttaaaaataataaaaaaaaataaaaggataataataataaataaatattgtgaccaaggtcattttattatagctgtactccaatacaaccaacatgaggggtgtattagaaaataatctcatattagtaatctataacaagaaagcaataactttatatatggaattataggttaactctacacttaatttttacaatatatattttttgtaaattggtttatttttattttctccatttggtttatgtttcaatgggcaattgacacaaaacaagtcttttcatcaataataggatcatttgtcatttcttgtgataaatcaagtctaaccaagatgggaaattattatagtatgagtattaataacacaagctagccattatacaatacaaaattaaatgattgagccaatattattgttattagtagtattggctgagagaatctagttacaagaaagagcttgatatatagtataaagggaagaccacaaagagactagctagagtattgtccacctagctcaataaatatatatatatatatatgagtgcacttttaatgggtatta

SEQ ID NO: 300700 - DNA, 1754 bp, Cannabis indica
ttttttttgctgaaatttattttgaaaaaattgaaaaggaaggtttgaatgaagttttggataattcctaataatttattgatacgataggattacagggcgtgtgtttgaatttggatgaatacacgatttccattgtccacgtgtgtaatcactataatggaaggataatttatcagaaaactcaagtgctcaccaacttattattctttcctttattatgcacttcattaactttagtttgataaaagcggatagcagcagcagatagatgtagatttattaatttcttgtttatatttcttcgcttccatttaataatttacatttatttaacaagttgtttaaaattgtcaaacgtatatgactttctaaaaggataatagatgatatgtccacacaaagtatacaccaatgcaacacattttacaccaattattattatttttggaagtgaaccaatgatttggtcactacaccacgtaataatttgataagttcaactaacaacaaaatttgtctttggcacttgtctgtaatatttttggaaggaagggcacgtattgttactcattttatgaaatactaaactccattcccagccaaaaaaatatacaaaagaaaaagaaaaacaattatataacagcatgacccaatcgattaaagagaaaaaacgagaccaactaaaaccaatatgacaaaaaattcatctcaaaataagaaaattttctgtttctatctctaagtaggtcttagtcattggaagccaacaaagttaatctttgtatgattagtattgatagttattgcccaaaatttttgtcaactttttaatcttgttttaagaaaattaatcacgagtagagaaaaatatttttacatgatttaaatattaattaattttaatatacagattacttttattgatgagtaatattattattactagagaacatattctctttcctatatagttattttgtctttaattttttggatccgctttttacttatatttttttttctctatttataggcaaagaaataagatatgtttgaattattggtacatcttccctttatccttaagctttacatgaccttttttataagtgtataaaatgatgtatgttatgtgtgtaaaaaataagctccaaagtaaacatttggtgaaacaagacctatcttctatgccattgataggataaggatagcacaaacattagtcattaattggcgtccataagtaagtacgatgtcaaaacagtgactaaatttcaaagatatcctctttttaggaattaagtttattttgccatctacgcaagaagagtcatctacacagatacttttagaattgttgttcactctcgaacgccccgtgtctttagaacatttataaaatttgatatgctaatattgatctttaggtttaccacgtcggctccaaggacaagtggtattttctacttgccacttattttaataaaaactatagacgataataagaataataataaaaaaggctcttaaaacctgaggcataaagacttatcttccatggaccatggctaattggctagggaaatttgaaattccatacttaataaatccaaaaattggtcccctaaactaatactatgtaacatttgtaaaatgggataactttttctaaaacccaattttccccctttacattacccccctcccctctctcttcttctcaatcccttattcattcaataactccaacc

SEQ ID NO: 300701 - DNA, 2543 bp, Cannabis indica
attagattttgagattgacatcccaataattaatctaatccaattagaattcaacttttagaatataattcaattcaattatagttggatatccaattttttgtaattgaatcgaattgaattggttcggttcaatttaattaaattagattgaatgttgtctacccctatcgtctctatcacaaaattactagtgtctgtcaaagtaaaaaattatcaaggttgaatctttccatggttagataattctaatgctggaaatatatttaaattcatttttttaggctaaataagttttctccctaattaaaagtaatttgtattattatgaggtgacactttataatttgttaatgattttttataatttttattaaagtaaaatataagaaccaatattaaattgcactaataaaaatattacagttattaaaataactttagcatttctcttcatattaatataagctttcaaaatctaacttagtgatcttagcttaacaaaaagaaattacaaaagaagaagtagatttaagtacaagctgatcaaatatgtttaattattaacttttaactcacttgagattaagatttatgtcaaaagaaagtgataagaaactattgtagctgtaatggtatgaaataagaggtccaaatttcaccaaatgaaagtctctctagataagaatagaatccacaaatcccaattctattggtccatattccactttgcctccacatctatattgccaattttcccattccaaccaatcaaatcaaaacctcatctctctctctctctcccaagcttctttctactcagattaatcttcgaatcctaaaacagagagccactcatactcatactccaacaatggcagcaaccatggcaacaatggcaatcctcaacaccaagtgcttaaccactaacaaaatgataatgatgatgaacaacaacaacaacaaccccaccaagcaaatttcatcaaaacccaattccctttctcaatccaaaacctccccaaaggattaaacgacaagtcgtttaatactaccatagcaggaacagccatagcaggagccatattcaccacactaagcgcctgcgaaccagccatggcagttcagcaaatagctgacatagcagcggaagccaccagcaacgacaaccgcggcttggctctgctccttccaatcatcccagccatagcttgggtcctcttcaacattctgcagccagctctgaaccagctgaaccgcatgaggagctcaaagggtgtagccatcgggctcggacttgggctgggagccgcggcttcagggctgatgggtgcgcaagaagcatcggctggtgagctggcggctatagccgaggctgcagctgctgggagtgataacaggggacagcttctgttgttggttatatctccagctattctttgggttctttacaatattctacaaccggctttgaaccagctcaacaggatgaggtctcagtaagtaattaagtgttaattctctgttctaaaatattatttattttctttgcaatttaccaaaaaagaaaacaaaaaaaaaagaaaaaactttcttgttattgaaagttgtgtaatgaaacatgtttcatattgattagctttttttttttttgatcttgatgtgtatttagtttccgcccccaagttcttcacaaaattatatattgatatatatcttttcttttcttttttatgatttttgattgatatgattgttatgagtagttgatttcaaggtgggtaactttgtagctgactagcttctgtcatgtgtgatcacataagtatttaaagtggaatagtttgtatataaatgattagatttgagattttcgaaggacaaacgacgtgtcgtttagatgacaatggagctacctactaatcaatacgattatttcaaagtatattttaaattaagtatgaaaattccaaattttcacttattattggttattggataggtttgatattactaaaattaatatttataattatttttgttagtaattagaagtgtatatattgattaaaagacaaagttttagctaacacaataaaataacattaaaaattaatttgcgattagtcgaaatattatatattttgcattttaaaatgttttagttttgggaataacaagttctttgcgttaaaaggggttgtttgttagtagtgcaattactcatcttgcacaataattgagtgctcaaactacaatgttaaatgaacttgctacaatagtttcctgtgccttctgaacgatagatgaaaatgaatatgtgtgttcttaaggttaactgtgatgctgcaatatttttcattttattttatttttagtttgtttatcaaatgacctgagaattagtcagttgattatttgactcgtttttctaattttaatccttgtcgtgtttctaacgacggagaagatatcctgattagattgcagactgttattttagttgattgctattaacaaaattatataatttattaaaaaaa

SEQ ID NO: 300702 - DNA, 1170 bp, Cannabis indica
tttaaatattatttattttctgggatattacaagacaatttagccaagagacgcgttgtgctaaattcgttaaagtgtccgatatgtgagttggctaatgagagtcatcacctattttttgagtgtgagttcaaaagagtcatgcacaacgaacttactcataactgaaaagtactaattaataaaaaaaacactccaaatagaattacctaacacaattctcctaatacgcccctcaaactttcaattagagtaggggcaaatggtcagtgatttgtttctaaaatatgagaattgaagactcgagattgcattcgtgagtccatcagctatttgatcaatgtgggacatgtttgacttgaaccaataactgaagaatcttctcacgaacaaagtagaggtcaagttcaatatgtttgatgcaggcatgaagaacaggatttgtagtgagcaaaactgtacttagattgtcgcaccaaacaattggagcaacaggtaaagatagttggagctcaataaatagagagtttatctaggtaaattttgccataactagaacgaggcttataatatcagcttttgtgttgctctgagaaacagtatactgcttttttgcatcgtcaagcaatgagattcgagccaaagaaaatggtgaaacatgaagtttatcgacgatcgtcagggttagtggcccaattggcatcacaaaaagtacgaatgtaatcaagggaagacttctaaataggcaagccatagatagtcaattgtgccactgagatatctcagtatacgcttcagagcatgccagtgtgattgagaggggttggccatgaactaacaaactcttaggttgttccatgtagatatcttcttctagtttaccatatagaaatgcagtagtgacatccatctgatcaatttccatgttaaattaattagctaaagcaagcaatagtcttatggttttgtatttagctactcgagagaaaatttctgtgtagttaactctttctttctgtgtgaaccccttagccactagtcttactttaaatctcactagttcattgtgacagtcattagtcccgtgatccgtaagggaaaataccgggtaagttgtacaatcccacatcacctggggaaggtcaagtgggatgattctgagactgtgta

SEQ ID NO: 300703 - DNA, 3250 bp, Cannabis indica
ctcactttcttacagctcaatagtataatcatattttattagttaccgaaaacctcggtcaacaaatgcaaaagtgaagaagaaaaataaagagggaaactagttctgatcatgaactggtttcaaaaaaaatttgtgcaacaacaaacaatacacaactaaagagattaaggtgagagagagagcaaacacagtgagaattttacaaggttcacccctgaaattggggctacgtccttggtgagctgcctcagagaagattagccataatccactatcaagatcgatgattacatcaagtttcaaagctccaagacacatgaatcgtctggtagctcattcttcaactcaggtatgtacaaatctctcgaaactctcttcttttcttctctctcaggattaaatagatctttctttttctctctttctctctctaactatatctctattcttctttgaatacgaggtaagctagtactggatatgggtcattctctccatctctttctggtttctgagaagtgtttttgaagctgtaagtatttctgagtttagatccatctatttatagttgctgtagctgagtaggttagttaggattaactaactaattcttgatcttggcgtctaaccgttagattttttaggattgtggtaactaactgtttttgattttattaactgttacaggttgacttacatggggaattaacccaacatcttgatttttacaaggtttggtagaagaaagccacctacgtccttggtctttaaagctacaaacctagctttgagttccactattaagacaagttaatgggcttgattaacccttacacataggaatttttcaccaaggtgtttccaaatctcttacaatagttttgtactgtcgaggactatcaacctcaaacacaaattgttgtagtgctaatctcactctaaacaagttgtttacaataccggtgccaatctcacatcaacacaatatagaaatgtgtttatgattacaaacaaatttactctagaaagtaattagcaagcatacttacaagatgtaaatacaaattttggcttaagtgtgtgaaaagtattttgttagattttaaacttgtgagctccttaaaccacttgaaagtgtttggtataggtaataaatgttctactaactcttaattttgagagaaaataagatttatatagtgtaggagagaaaactggcattttttagccattggacacaaaaatcgagatatgcccctgggaatacggttcaccattctccaaatagtaaactggtttctaggagatatggttcagcatttggaaaatggttaattgaaaattaatagagataaaaatttatttattcagcactaaaatgcttataactagcacgtttatccaatttgaaaaattccaactgcattctcttagtttaatgacatgtgatcttaaaagtcaatttagaaattttcagacattatttttgtgaaataacttgtcgcacaagtaaatgaactgaatttcatacttataaaatttaagtgtggacttgtaaatcattgtacaagactaggaaatataaataaactttcatgaaatcttatcttgagtttctcgagtcttgaagtccatttttggtcactttcaagaaataaattgagacaatatattagattagccccctcccttaatgtgtgcaagggttaaaaatataccttttgatttaccttgcatgattttgtaaattatcccttaatgtattacttaaattaaatatcaagttaatagtccaaaaattgaggttttagccaataaaaaaaataaccaatcaatcttagaaattctcccctttttgattcgtcaaaaaggttggctaaataaatggaaaaataaaagaaatacataacataccatctattaaaaaaatagccatataacatagacattcaagtgcaaataaccataaatcataaacatttaaatccaaacaaacataaaagaatcaagttcaaacatccaaaagaaaaaacaaactaacacatgaataggcaaagacgctaaatcttgcaaacatacactaaaaacaagaaaaaaaaataaacatgaaaatgatgtgaacacattatgcaagggggctaagttggtggaggtccaaagcggtccatataagctttctattacgccatctcctcttgagtatcggtaaacccatgctccatgtcactcctcatagtgaccatgtaacctctcaaggtggttatctcattttagagggtagtgaagtgagtgttcatttcacctctcaagtttgtgaaattggtagtaatggagatgtggagacgagccaaagcatcctcaatgttggattggggaaattaagacattggaagaacttgaacttgttcttcctcttcaccttgagcttgggcttctcgttctccctcttcactttcacttgaggccaattgtacttcctcttgggtgtgtggatcttgtttggtaaaaatctacttcttctccacttcatataaacttgtagcgcatagaattaaatgtgatctcaccgagattgttagaatccttggttctataaccttggtttcatattcggtttggattccacgggaaaagccaccgaaatttgtcattgccacgggaaaagtcaccagaataatcattattgctggaaaagtcattggagttctcttcaccactggaaaattcgtcagagttattttcattaccggagttagacgtcggagttggacattggaatataacacaaagaaaccagttacgtttatcaactagttaaaaatctgagacaaagaaactagttccgtaactggttccgtaaagtaactaaattaaaaattaatacaaaaaaataagttatctaaaataacaaaaccaaaatttgatacttaaaaccaacttacgttaaaaaaaattaataattaaacacgaaaatcaattacttaacacaataaactaaaaaatttaaataaaaaataagacacctaaataataaaaaataaattaaaataaaaaaacgaaactaactaatataacacaaaaaatttaattatgtaaagcaacaaaattacaaattaacatataaaattggtttaatgaaaccaattcctaaagtaactaaattaagaaataactcataaatattaaaaactgatttagaaaaatatataaaaatataaaaattaaaaaatatatcatataaaattta

SEQ ID NO: 300704 - DNA, 2318 bp, Cannabis indica
gattacgaccagacctggacccaaatcccctccccacgacccggcttctgacttgaacccgaatctgaccccggactaagacccgacttaaataaaatcaaaaaataaaaataaaactgaactttatagaacacacttttgttttctgtttttaaaattgaaaaacaaaagtggttaccattcgcatttttgtttttcaaaataaattttttaaaaacaaaaattttactttcattttgtgattaaaaaattaataaacataattgttgccaaacggcaccttaattattttaactctttgagacctgatgtatatcagcacgtcaaaatttataatcaaaccatacaaacaagcaaatcacaatttaggaatttaacaataaaaatacataactagattaaatcggacaatatttccccataaaagttacctaaccatcatctatcaacaacaagtcaaacaattgaaacaacacacaatgagcttcaaatcaaacaatataaacaacacacaataagcttcaagtcaaacaattcaaacaaaacacaacaagcttcagtcaaacaaaacaaacaacaaacaataagtttttttttttatatctccgcagcaaacaaacaattttcctagaacctaccttactaaaacacaagttctcgatcttccattatcacgacacagaattgtaatctcaaatcctacttcattgtggatgaatatttaaaatattcaaacttctcaaacatatatataattacattagaaataataaataaaggattatttacctcttcaattaacaagaataaggcaaattaattaactttgcaataatccttgtcacagcctaaaaagtttttagttaaatttaatgcattaaagattactaaaaaaataaaaaactaaacaaacttcactttataaaccaagacttacatatgtgaagcatatttataactcatttcacataagaacgattgatcgtgcaacatagctcattgatatgacttagtatcggaatccattactaaattgtaccaaccaaaataagttggtatggttagtaccacacctaagtctcaagtccttacgaaaaagagaagtagtcgatactaaattccataatttgtttccatacattgatattatacataatgtgtcatcgtttatatgtatatgtgggttcaaatatttgacaatgctagaaactcaagtcaaatatcaataagaatgtacactcacaatgataagaagaccgcagcccaccaaacttattcatatatattagatagataactgaaagggtcgttgaaaattttgaaactaacagagagagattcagattatgcacatgataaataaataaactataaatctatgttttcaattctataatttttatgagataaatgaattacagtaaacaaacaaatatactcactacatagataagttagtgtatcatttgctactaatactattgtatgaattgacagaagaggaaatgagacgaaacacccataaaagacatctatgattgtatattatacggacaaatcatttgattccaatgcgtttatctacagattacagcatttccttaaaattcaatacaattatattatcacaagaattatttattttgattagaaataaagtgaagaatctttagaaacagaaattgaccctaaatttgatagtcaaaatagcataaaataaaacagattaatacataaggagtacatacctctgtcgccgatcaacagaagattactaagctaatcataatcagcccgagccctagctggtggagcagccattaatcaaatcgaaattttctcaaccagtttccctcaaataataggatatatacctccctgcatatccatgaaaaaacatatataaatcaaatctaaaattcaaaaaacaataatcttaaataaacaaataacagatcggtgagcaagaatggttactgggattggaggaaggctcggatggctgggcctgggaggctgaaagaagggaagagaagggagtttagggcgagagaatgtcttttttaattttttgtttttcttttgctaaaactttataagttattagttttttattttttatggtccatgataagtgggatcaattacaaccgaccaatggtagataatttcttacacggcttgttgtttaattttgttttataaatatataaagaggtgttatttattctctccgttcataatgagggatccacaatttttttttttttgagaaaaagaccattacattaattgtagaaatttacataacagtcata

SEQ ID NO: 300705 - DNA, 2824 bp, Cannabis indica
aaaaaaaaaaataataattaatttacaaccgcctctaaatggtataatgcaattttatacctacggtttttatcaaaaaaccgcctctaaatgtcaatttcgaacatagcgggtattttcacaccctttagcttccctttttataaaagagattgaaaaaactgcctctaaaggctaatattgtagtagtggtaatttagacatccataaataatattccataacagattatagtttacagatcctaagtatatttttaaatgtagattctattacattagcaaataaaaagttaatatttgaagaagaataaggagaacaaagagaacactatgaatagaagttgtaggtgacactggcgtaaaaagaaacaaaatagaagattgcataaaaaaaacaaaatacttgaacaaaatttaaaaagcaagttcattttcatagaaatgttattgacaaataaaattatgcattttttttttattaaattaaaaaatatatgtataatgtatgtaaaacctttgatttcttaaaataactataggaaagtgaagaatgaaatccaccaccaatattgacatgcattgtagcttaatgctttagctatgagtatttttttaatgcaatttaatgaattaaatttatatattatattgtttgtatgtatcctactcaatccaccttcattcccggtagatggatagcaaaatcatcaattcttactcaagagcttgtccacaaaattaaacaaaagaaaggtaaagggggtctaatggctataaagttagatatgcacgaagcttttgataagatggagttgggatttataagtgttttgaaacataatggctttgatgagaaagccaacaacctaataatgaattgtgtcaagggagtttcttactctgttcttctcaacggtagtcccctcaagaaattcactccgcaaagaggtcttcgccaaggggaccctctatcccccttcatctttatactttgccaggaattcttgtctaaactattattgagagctgaagcacaagggaagttgcacgggatcaagatttccagaacagccctagctatttcctatcttatgtttgcagacgacacaatcttgtttgctcgggcgaatgttggggatgctagggaaatcctgaactgtttggcaatttatgaatgtgtgtctggccaagtttgtagtaaggtaaagtcaagtgttcttttctcaaacaacttaaatccaaacaaaaagaaagaactcctgctggctttggaaatatctcaaatccgtggaggggaaagacacttaggaaatccgtttgtctttaagcgaagaaagaaagaagagtaccaagtgctaaaatctaatatgttgaaacggttagaaggatggaggatgaaactcctctcttatgcaggccgtgtgatgcttattagttcggttgctgcttccttgcccatttacagcatgtcaaccaacaaagttccaatctcaacatgtcgagagctcaatgaaattttgagaaaatactggtggattggcaatgttgagaaggaaagatttatggcgtttaaggcatgggataagatatttgtcaaccaaaatcgtcaggaggcttgggattaaggcggttcgaagacactaacaaagccctcctcatgaaattggcatggtctttggctcagaaagagaacaaaccttgggtgaattgtcttcttcgaaaatattgtagcaaggaaagcttctggtcagtcatgccaaaaggaagcgattcctatctctggaagagcatagtggaggtttgcaacacaatactgaagggatcattaactctggcgactgatggcagtaacattgacttctggaaacaaccctggatcccatggctaattatgctgaattttctggattaaaactatagccgatgtctcaacatcaggagcttgaaaccgtaataccattttccaaatctttggaacagagttgggaaggaaaattgtggctatcccaagattgcctaccaatcatgaagatcaaacggtgtggaaggttagtacagacggtaacttttttgttcgaagtgcttattgcttagatcaagaattcagatttgattccaggagagttttatggaatgctaaagtgcacccgagaataagtgttctcttatggagagtacttagtgaagcaatccctttaagaagcaaaattcctttctgctgtgaaaaatgctgcctattttgtggggaggagtttgagacaagccttcttatcttcaagaattgcagtgtccctaaggcgctttggttttcagggacctactccatactcagtgatagaatcccgggagactccttgttggactttgctgaaaatctcctcaactctttcccagcagaagacctatatcgtttgattaacttcatgggttgtttgtgccatgaattttggaagcaaagaaataacatcctctacaagggaggaaagttaaatttgactgacatgctaaggaacattcattcctcctggtctgaattacttcttgatgatgtcccttctagggagcttcccgacttccctacggaagaagctgatgttagacaatttatatgtataaactgaaacatatatgattaagtataaaatgcggaattaataaaacatatatatactataactaaggatcgaaatacctccagccattgaatctttaagcttcaaacccaaaaactttgatctgcaatagaaaccgattgatgtgggtaatcgggcttcctcgctctctcaactctctttagatggattttgctgttatgaacagaa

SEQ ID NO: 300706 - DNA, 3392 bp, Cannabis indica
aaattaatacagaactgctcaaaactgcacagagaaaaaatatgctgaatttgagtcttatatgcatacatctctttcatgttatcaaaaacattccttattcattttgcttacctgttagtcttaaaactttcaaaaccatagatatcaaggaccccaatcagagattttgaattagcatcttgtccaattgaattgttaattttgtccaccaacctgtgtttttgtatgaaaacagacttagcatcacaatagaatctgaatacagattatgcttagctaaatcatctctaacaatgccttaccagtcaaacaatcgagaatatatggtcttcgctaagccatctctactaactgctgcactttgaggatcaagacttcgtttaataacttcttcgggtgtgatcatcacacgcttgcacaatgcatcctccaaggcatcagcatcacaccttaaaaaaaatgaaagtgaaattagaacaaaaaagtacaaagtggaatactaaaaatgggacaattttaaaagaagccatacatgagaaggtctgcagtcatttttagatggaacttggctttatcatcttttggaagtgatgaatcaatttcctttccctttgtgaattcaatgtttccaagatgaagaatggctgctataactctaaagattgcttcctagaaaagacatgaaaacaagtgaagaatttggtctctcttggtttgtatctaccattaacttaatcactggttttgataagatcatacctgctctttagcacttattccaacaatgtccattgctctccttgtagcaaggtagtcacgagcatcacttactccaaccagttcataacaattagattggttaagatagtgaaatgatttcggatttcccaacttgtacttttcaatttcctgacattgtttgaaacataatgaaaacatttagccatgattataaaagttgtgtcatgctatgctatcatttggcgatggttatacctcttgtggtgcagcacaaagaaggtaaaagcaatggtagttacgttcgggattggaaatttggcaaacacgagacctttcaagaagatacgttctaattgctgctcctgatattcttccttgcttatcaaactggatctcaacaaatttaccaaaacgactgtaccaatatcatataaggaatgttaaaatacaaagtgttgaataacataaaacctgttacaatgttaagaaacttgactaaccaagtccaaggatgtctcacctagaattgttatttctaagagttttagcattgccaaatgcttcaaggactggatttgactgcatttgaaaaattgtttgaataagtttcataaacatttggcactaattaagtgctatattaaaaaaccataaaatgaaagtcaatatataaacatacttcaagaacttgttgttcaactgttcttccttcagtagcagctctgcctccaagaaaggcaaggtactgcataagcatttttgttgtttcggttttaccagctccactttcgccactgacaaggatcgaattgctcttgccctcattaatcattgccctgtttggattgattcatgattaatgacactcttatccaattcattggcagagacaacaataataataataatacaaaatgtgaagtagtagtatagataactaacctgtatgcaacatcagctactgcaaaaacatggggacttaactctccaaaaggtgcccctttgtattgttgcatcatatgagcatcataaatatggggcaatctttggaatggattaatggcaataaggatatttccagtataagtctgaaaataaacaatgaaagtttaaaaagattaaagctttatgtgaaaagactaatgatgaaatgaaacaatgggagaaaaaaagactttacatagatttcattaagttcatatctagctttcaaattctgcagtactccaggctcatggagataagatagctttgtcatgtcatcaactcctccagctggagcttctgtatcttttgggtatatttttgatagctttgcaacaatcttgtaaagcacaaaaagaaaagttgcataatcaaatacatttatatatcaatgaaaaattgtaaacatgttaataaattgctatatggatttgtttccacacacaccttttttccattgctagcctggatctcaacttcattcccattaatctttgatacttgtccatctatccatgcaatttctgggtcttcagcccacacgtgagaacctacaatgatattcactggagttccctggagagacaaggaaaaacatgaaaaatgaatttgttgcttacacaaaatcttaatttttacatatcaataatttagtaaagatatgaaaagggttggtttcttaccattatgtatgtatatatgttgtgcttcaatcaaaactcattgagtagtgttttttttttttcgtaactaaatatatattaatttgattaatcctcttctgggattgagttttttgaagaaaggaaaatgacccttttgagaaatgtaggaaaaaaataaagcatatcagatcaaatgttgtgaaagctaaagagttggaaatgaggaaatgatgttaataaaaacataataacaggaaaagtgtctgagaaaatgggatgtttttcttttaaaagagagaaagagaatgagtaagaaatgtaaaaggaaaatgcatggatcccaatggagttagattgtacaagtgacattcttcacaagcaccactaaattcggttacttccctttggtctcgcgccatttcgtggctactaaccaagtcttctctctctcattttatttaacggtattgtcatataataataaactcgtatattatattacataaataattttgcttgcttttgtgtgatgtccagtgttgtgtagccgagtctgtcgttgggatcaaatcacaattttttctctttttttgattcattgggttgtatagcctttattcacacacatagcttgttgcctaatttagaggcaaaagtatgttaattgtagtacagtttttcaaagctttattttatgagtaataattgtcacacattaaaacttttgtataaataagattacaattaatcttaattatactattaaatttaagaattaatacatggttcctattttaagctactgccaattttgtttgtttagacaaaaattaaatacacatgagtaaaaaaatgtgtaataacgtttttaacaacattgctcttattttattggagtataacatctatctaaaaatacacttgataccaaacaaattatattgagatgttataactaaatagagatatatacacagaaaaaaaaaatcaaaataccaa

SEQ ID NO: 300707 - DNA, 2070 bp, Cannabis indica
tttttttttttttgttttgtaaggatgggcttgagtgtatgcattcttcaaaacctttatcccatttgaatgcttgtggtgtccacccaaaatttcagtattgtagtgttagatgttgattgattgaaaagcattgctaacatgttctttggttaggagcaaattataattttccatggttttctgcatagtgatagtccaatctaaagctaggaaaagtcacatatttggcaactgaaaatataaatatttttgggttctgatcaagaaccacatatttgggattcttcaatgttaaatggaatacagaataatgtgaaatgacatttgttcattttttccattattgtccaagtatgcatctttgtaacatgtatataaatcattttgaaattttttgtaaatgatgccttgtggggcactactgtttgaatgtgaatatgggtaatgtaatttgggttttacaagagcatctcgaatgaatttttttttttttttaaaaaatacttgctcagatggataattcaattggtaaaatatgtgggtgctatatactatttgagagaattgattgaatgtcattttaaaaatttgaattgatctcatacaaatggcaataatgttatcttctttctttttttttaataaaaaattaaaataaataaaattatataatttataattaaaacaaataatatatttataatattatttttaaagggtgttatattattagaatatttatagaagtaaaagtatgaaaaataatgtgaaagagaaataaagaatgttattattgaagatgcttataattgtcaaaatacacacatcaccttaaaatatattttgtttattattttctctctcattaacatttgatacattttcttacaaaaattactctaatagtgagcaactccaaaaggtacccaatatagtctcacctactacttttaaattttatattatatataggagttttttttatttttacacttcaaaatagtttttttttttgtatttttacgaaattccacatagaaatctctattgcaacaagcgctgcaacttacattgtaacaaaaagtcgtatagaaaccctattgcaactagcgctgtaactactttagaaacccaaatcgtaaatttgaaaaaaagaaaattaaaaaaatagtatatgaagtaattctcataggggttcattcaaaagattaattggggataaagtaacttttttttcaaatttaaaaagaattaaataatattacttattttggacaataatattcataaaattaatcaaaataaatgtgtcaaaaacaattttatgatcaaccccgttgaagatgctctaagatgtatacttctcagtggaaagggagggtagtcaaggaaagggagggtagtcaattagagtctttaggagttgaaagttttcacagctatatacgattataaagtaagaaatattctttgtttcaatcatcaatttgagtaccctttttgtttttttggattatacataatgattgttgaagataataataatgaaggagttaatttcatcaatattttcaatcattctttcccaacttaaagtatttggaaattggatcatttgatagaattgtactctacacaaacgtttgaaacactttatttttattattggtgaggaaatttaaactgacttgttggaagttggcatttaaatagaagccttactcattagtttcttcacgggtgagaactcaaataaattaacccatgtctattttgctattttgatgatgaaacattctaattatttgtccttgtgttaatgaaaaaaaaaaaaaaaaaaactaacaaatgaagaatgtttttatgctaaattatagacaaaatcacttacaattttatgctaaattacattttttttttttgtgaaactgagaataattttattatgaaaaagataaaattttaagtgtccaaaagtcaacaacatacattcactattctcaacattacataactgcaatatggacccaaaggataaagcaatttgtttaggttgaatccaaatat

SEQ ID NO: 300708 - DNA, 2320 bp, Cannabis indica
tccactgtgctgacgacacaataaacaagaatataaatgtgatgaggatttggatgaatttataaatcaaataaacaaataaatgatcacatgaaccaaatgacacacaaataagtgatgaaaatacttctgtttctttattgatatttaaacaatagagattacattgaaatggagttttatttagggcataaacccaaaagattgtacatgtcgaggcacttaggcctggagcgtacgatctttaggacataagtgcttttgctgatttgtcgcttggtgacaaaacttaaatatataaatagtaaacttttgtaattgtattttgtaacaggatcccaaaattttatatatgtaatactttaagtttattaattaataagaaagctttaattaatcacgttaacatgcctaattagttagggtgttacatctagcctctaagttggtctgtttgttttctgaaagcacttgtatcttcatttgggacgaacatagaaaaaatgcccaggaaacatttcaacctgggtgttgggtgcatcgccaggtcaacctcggcgctgagtgccgagatgcttcaaataggaagcattctgaaatcgatttagatggctctaacatgcttgtgacaagtctttttcatgtctaagtataaagtttgagcaatataaactaagacaaagctaaaaattgaaactctaggcactcaagttggctaccaagatgccaaattaacatcttccgattcccaagttcgcaacttgaagtcttcttgccttgttggttcaggatattgaaggatggtgacttggaaacaactttacgggatccaaatatccattttggagctcccgaagttaacctgggggcagggctagggacacttcctagagttgactgctatgacttaggatgattaacgctatgaatattttccttcttaccaagtgtcaaacaatgatgtccacgtcattagtgtctgttttgggataaaaaaaatgtatatagctatgtatgggcagatatatactttgcatgattaacaatataatatattaataagattatgcattcttaaaatatataaattgtttatatatggtagaatttttttttgatatgtgctctgcccaccatgaggcccatcacgcattccattacgcatatgattattttccaatatttgcttcccctagaaaaggttgggagtgagaggttatatcacatgagttgatgtttgtagtagaggtgtctgtgattacttttctaccttacgcattatcaaggtaatttatctacttctccttctcctttctagcagaggtagcttctcttaacttctttagttgaagtacatccaccttttttgtgttgtcccaaaaaggaaaaaaattcttcaatgcccaacaggtcaataagcgaaagttgggtgatgcctacttcattggaatctttcatcttgtcctcctcatccactacaatcctccgtttcaccataagttacatccgaagttctcgcttcttcgactcttccccttgtctaattgattttgggatttctcacttttgtcgaaaaataggatccttgcctaagcatttcttgaacatccactctagaaactactgtagcataaatctgaatgatgattgctcaggcgcatcaccaattttacccaagttccatacattgggaagtaagaaattttctcacccttcaccactatagatgctttaaaacaatacttctgctcacatttaagaagtccaaatttgaaatacaatttgtgtagtttttcatacctatattgtagccatagattttttatgacttctcggcgcaaaaaaaaaaaactcaaagaatagaggtttattcagatcaatggttgctctaaaacgaagagtgttatttttgacattatcttcaacatggggagcagcgccgtctcaaacaaacttgtataaggccttagacaaaaattaaattatctaattttaacaaaattattaattttattaagatttattgagattttatttttcacacaaattaattttaaattattattaatttttttttatattaattgcatattattcttcacatgttatattaataatcatgactattttttttcttcgcgaatgaactttaattaatttataaaaatctttcataaaaaatgaatcaatatcacaataaaataaatattgttataaaataatataaaataatataaagtagatgagaagaaagaagaagaagatgaagagagaaagagaaagtgaatgagaatttctgagttctttattccaatggggt

SEQ ID NO: 300709 - DNA, 4512 bp, Cannabis indica
ttaaaaacaaaaattctactttattttgtgattaagaaattagaaaacataatttttaccaaacggcaccaaagatatctttcagttttgaatctttgcatagtaaatacgaattaaattttacaagagtgacttgaagtcttgaaccccttggttgctatattcaattaatgtgtcatcacttctggtctaatccctggcatgtttttcggttcccaagcaaaggtcttccttcttcccctgagaaagctcattatttcttcactttcttgttcatccagtcaggctcttagcaaaactgtcttttctggttctgaaggatcaagtaggatttcttcaagttcatcttctgttatatccctcacattcttctcttcttctccttctaggtgcttgagttatgctagtagagagccctctagttgttatttatatatgttttctcatattttaatcattaattgtttttgtttctatacttattttaattatttttatgtcataaaaaagtaaacttcaaaataattttgatatttataaaatttaagaaattataaacttttcttgctcattttgcaagatgcactaccaaaaatgcctaccaaaatttaagcatttcatgaacaaaaacttcaattttttccaatttgcaagtcacttttcttcagcacatgtcaccaaatgtgctttgaaaaaactgcttgtgcggttgtgccggcacaagaaggcgtttatttcaagtagttgtgccaaaacttggcaagcgcaagtagttttttcaaggcgtatttcgtgacatgtgccggcacaaaaaggcgtcaagaaaggtgtcccttgcaaaaactgtttttttttttaaattgcatccattgttgttcttgttatttatactttgaaacagaaaaagtatatcaggatcttttttagttagaaaaattaaaattaattattagtaatcaagaagtcatcaataaaaataagaaatatttaaataaaaaaaaaatcattatttaatttacttcaaaaagaatgaatgaaaaaacattatatatttatctgaaatacatcttaactcaagattgaatattgtgcggtcaatttgaataactttatgagtacaactacaaacaccagaacataaatattatatattgtattcttataataatagaaccgattccaaactccaagcaaatgaattaagaggcggtgattgatgatgatgatgatgatgaagttgcagtgtgatcaatatttgaggtgaaaatagatagaagagccttctgtgtatcttcatcaacatgtccatcatgcttatcaaagaaagaaataacatactccaaagccgaactctcacaaggcaacctaatacaactaataccattattaccacccactgcactaccatccatctctgctgacattctcaccagttccaatatcactatacttcccatatatttcaaagccaactcaaaacgcttctcgtctctgctgtaaacgacaacgtgctcttccttcgctgctgctgctgctgatgctgatgctgccgtcgttatgttttttttcttctttgcagtgaaattcttagtcatggaaacaagccattttggagtcatcattttagcgattagttaataattaatgtgttttagaactcaaattaaaaagattaatttgtaattgtgaaagacttattatttgggggctgagagtactataaaagtataaagtgtaaaagttatgtgctgcactatggtacggtatttatttataggagaggcggttgtgtagaccgtgtctttattctaagatattatctttattttttaaaaggtagttactcaaattaacatatactattctatttataataggaatataattggaaaatttaatatactatataaattttaatgcactcatatttttatattaattaatttaatttattactttaataactgttttatactattgtttcattagtatttactttatttccttttttatttttttttcagtttcatttttacgattaactcttattagattttttttttttgtttttttttttacaagaattttatttaaaagttgaatcttttgtttattattttttaaagaattttgtttgaagctgactctcttgtttaaaataaaagaaatgggtgttcatctcaatcatctttattttattttttaatctttaaggattttctttaaaagttggatattttgttataagaaaaggaagaggtgttcaatctgagtaattatccccgaatttttcagtgtttgaagtaatattatttttcttattctagtatcaaaacataaattctttcataattagtattcaccctattcaatatcttatttaataatatgtatgcttttatatttgtttatttattggtattaggttactactatcatttaatcaaatagaccaataaagaaaatagaattaaaataagaacttaatctaaaataattaagtgattgtgccaagtagaggacttagacaaggcaaccctatttctccctatctctttcttgtgtgtgctgaagccttatctactgttattcgaaggtttgaggagaaaaaatcgatacatgggtgcaaagtggcaaatggagctcctagtgtatctcatatgctttttgaggtgaccgtttcctatgttgtaaggctactgatggagaggttactcgtattcttcagttgctgagtttgtttgctacaactacgggacaacaagtgaattttgataagtcatctgtttttttcagtacgaatacctccagttccatgagacagttcatctatgctgggttgggtatccatgaagcgactgaacatagtaaatatttgggactcccgagtactgttggaaggaacaaaaatgtggtttttggctacttgaaggataaagtgcagaatcggattcaatcttgggataataaattttttttctcgtgcaggtaaggaagttcttatcaagtcagttgtttaagctctcccgacctacacaatgaatgtttttctcatgccagttggtatttgtcaaggacattgagagatctaaaagaaaattttggtggatgtcaactactaataaaggaatacactagatgagatgggaaaaactcacagttcataaaaacaatggtggaatgggattttgagacttgagggacttcaatttagctcttctagccaagcaaggctggagactccttacttgtggggatagcttgatggggaaaagttttaagcaagatatttctcttcaggttcatttctctctgctactttgggttgtaacccgagttacatttggagaagtgttcttgaggcccaagagttagtttgggcaggtgctagaagactagttggtaatggttctaacactaatattttgtcagatccttggttaccagatgaattgaatccttatattgaatcttctcatccggctcttgttgggaagaatgttaattcgttgatgaagatcgaccaggaatgggacgaggatatcatttctgatgtgttacgcgagagggatcatgcaatggtgtggaaaactcctctgagtttatgcactggcagagatacttggtactggttgaaagatgattcaggaatgttcacggtcaagagtgggtatgcactgctacaaacaattaaagccagcagtaacacaccagataattctggtttttggtgccagttatggcaactgaagctccctcccaaagtgcaaaatttcttgtggagagtatccacaacagtcttccaacaagatttcaactttcaacaaagcatgtgccaattgatcctaactgcctcttctgccttgcaactcctgagactgctttacatgttctggttcggtgtaattttgctcaaaactactggagcagggcccaagttccagttgtagcaggtgatgcaatgatctttacaagctggtttgaggtgggattggcatcttggaacgtagcagaatgcttggaggctgctatgatatgttggtcaatttggaggcatagaaatgatctggtttggaactccaaacaacctgatgttagtgaagttttaacagtggaaaaactaaactatgttgactagtttaatgctcaaaaaaacaatgtcactgctactgataccaatgattcgaatgggataaatcttgagcattggaccccccaaaattctctactattaaagttaatgttgatggtgcgcttttcactagtcagggacgatatggcgtgggtttggttgctcggactgctgctggaatggtgttgcaagctaaaactttaactaagggtggtattttgcagcctcatgttgtcgaaactgttggagtcaaggaagctttaagctggagcaaagctaatgggtggacatgtgttgttgtagagtcggattgcttaaaagtcattagtgatttacaaaagcctaaaaatatgtgtaacgccctaatctatagggacgtc

SEQ ID NO: 300710 - DNA, 2829 bp, Cannabis indica
ggcccaaagtatttttgtaattttttttccttttttgtatttttctgtttttttcccaatatataaatatctacaaatagcttttatttatgctgtttttaaaaaaaaaaaaaaaaccatttatttatctaagaaaattctttagaaataccacttatgaatcatatatccaacattaacgttatccaaaacttaaaccattatcctgtttctatctctccaacctcattccaccataatccaaatagtacctaatgaatgatatacatacatgatcactattttcttcgtttgggcataaaattttacgaatatttaactgaaactccattgccgaaaagtaattggatatcaataaaaaaatactacaagacgaattagattcttaattattgaattctaatcgaaattcacatgatgatggactatacatgaaatttttgagtgactgatcatacttaattaaagaacaattactatggggtactagtactatactacctctataatttggcattttaatcccttttataattaatgagtgattttttatatttttattaaattaaaataagtgaaattaaatattaaattatattaataataatattacatttcgaccactgtaacatttttcttaattaaatatgtattcagatatatattgtgtgacttataaatgataataatgatcaaataatgtatataatggcctaaacaaagttgatgatggctgcgagcatcattaaatggcataattccaaagagtctattcatttcgctgggcttcgtgaacaaaagttatgacgtgggagacccacaaacacccaaaaatccaaggattttaattaattgacatacctttttgttgtctgttttgatcagttcgaaccgacttattctgtcaactgtctacgcccgtggttttttttttcctacttgtattttttattcttctatccggatgatacagataggatcagattcatccagaccctccctcatcactctacatgatttttgttaatatctgttaaatttttgtaaatcttattaataacaactatttcaatatatttttcaatattacaatttacaacaaacatcacaatctccttgaacttcccacccttccttgccctccaaaccaatccagagccttcaacgtctttttatctgccacgtggaacaaaaaacctataatgtaatcgaacactcatatccgaaaaaactctttactcttcccactcctcctagatccattacatctccgattttctctctctgttattccagatttagattattaataaatgaaaaagtacagaaacaatctccaccgttggatcatttccagcaatcagccacatggcattacgggggcccacttcgcagtcaccttcttcttctcctccgttacattccacctcggccgtgtcgatgcgcagcctggccctgagttgcagtcacagaacaactcatacggttacctggccaacttcaactcgtcaatggcaatcgtaatcgtcttcctcgtatgcgccttcttcctcatgggattcttctccatttacctccgccgctgcgccgattcccaaaccagtgccgacgacgtaccgcgtaattccgccagagcattacgcaagcgtcaaggtatagatccggccgtaattgatacttttccgatcttagtctattcggcggtcaaagacctcaagatcggaaagggcgccctcgagtgcgcggtttgcctgagcgaattcgacgactcagaaacgctgcgtttattgccaaaatgtgatcacgtctttcacccggaatgcatcgaagcctggttatcttctcacgtgacttgtcctgtttgccgtactctactttcagcggagtccggcaccgtctgttgctcctccgtcacggctgcagcgactgagtcgatggacgagtcaaatcgggaaggctctagagctgaactcagcgaatcaaatcatgatcatcattcagtggtgatcaatgttaacgaaaatgaaccgccgagaccgagagcagcggaaaaattgccaaggtcacactcgacgggtcactcgctgattcaactcggggagtgtacggagaggtacacgttaagaattctggaggaagtgagaagacagctggagattaagagtgggaataagctgaagcgttgttcgagctacgacgtcgtattaggtgggatggagagttcaaggaataatgtgtacaggagtgggggagaagggagtagagaaaagagcggtttggacggacaaggcgggcggttcgaaccttggttcttctccatgaccccgcccttcattacgaggggtggtcctgttaagtcacctaaggctggtagtgacagtgatgtgttgtgtgtatggtgaaacgtctttacagtccctcaatgaaccgttagattgtcgtttggtgggggctgaaatatttgataaagtctcagacgctcaggtttcgccatctccaatctcgtcttcactttttctgtatatattgtaaacaattttcttttctatccattaaggtaccatatttttcattccctagtaaataatgaatcatgaactccatatgcttacataatttcaacgtaagtaaataaatataggacatatctatagtacacacattagttttgtccttagggaagtttttacaaccataaataataaatctaatggtgataaatagatgagtaaataacaataactaatattttgactatacaagattgtttgtaaatttattttttaataatattttttttaaaaaataatttaataaatcaatcaaaaa

SEQ ID NO: 300711 - DNA, 1788 bp, Cannabis indica
aacaaagtaacaagtcatacggactttaaaatggacaaaacatccattgtccacgttggagttgggaaggtaccaatttattttgttataaaacattctgttgcattcaaagagtagtttgctagaaacaaagtaatgtgcttacattattatattttctataattttttttgttatatgatgacattattattactcttcaggtaagctattcagaggattttctacgtgagaatattggtgcatttgttaacgctcttctgcttgccaaacctcaaggcttgaaaaagggtaagtgatgttgttttttgtttccccaaacattattatagatgtaccaatagctatgacttgtcaatacactgctctttacttcctatactaccacatcatagcaatttaccaactattaaatgaataattccatgtttaggaccaacagtcataaatgaatttcagatgaaggaatgttaacatgtctcttcacctaatacatgcttaaaatggtaacttaaagaggattgagagagagaaaaaaaggattatattttcctcaatgctgattagcagtgttaatttaacattatacaactggccatactcgattcaatatgtttggctagttcagagtgatgtttagcaactctagatttctttgaacaagaacaagatcagaaacattttaagtttagtcttttctcagttctatatacttgtaacttttcaagctcaagtttcaccttccttagttgaatattttccttcacaaggactttagctatttgcttgcttacttgtgtacttacttttttctgcagcatccaaatacgcagggtatatcacatccttccatatatgcagcacggtcagccctcaaaaccatttctttttctgacactttacatctcattcaaatagttttagccattccatcaattattagtaacatttcacattggttacacacacagatgggcccaggattccctgtctcaatacaatcaatatccaaggccgcagatcattacaacaaagtgcaccttaaatgatgcctttgcctcttatgtgagctgacaggtccagcgtagatcaacattccatttattctacttctcaagtcttttcaactttgaagagtctcaaccactagaagaggtgtatgtccgagatgaaggtgtttcctttgtttcaatctatgactcccttggacccttatatacatcaaagcaataaacagtcaggttatgtaggggttacccatttgaacagattgaaagttttgcttgcgtttcttactcttgctgtagtatgctaagttattaaagctataaatgatatcttttaacaattacatagtaagatcaacgtcaaaaactttttttctttgtcgttttctttatgtttgtaggtagagagactattattcccctctcaacaaaacttgtaatcagatgagcaagagacagtcatgttatgacaatcaattcagattttacctgaatgagtagatgggtcgtgaaagctgtattgaggataaatatcactgtcgatgtcattcatttggtttaaaactttcctaaacgatactaacttttgtcgtttgttctataacgaaggatattcatcaaatgagttgctttatctgttgcaagcaatagcgtttgccactcagattgaaaatacagtagtgtcatgtaaatcctacattgtagaagacgaatttcactcgcattgtaactcatgtattccgatctttctaaattcatggcctccaggaaaaaaacctcg

SEQ ID NO: 300712 - DNA, 1574 bp, Cannabis indica
  modified_base (1552)..(1552): a, c, t, g, unknown or other
gtcttgggatcgtatggctgcacataaatatgacgatggcatgggtttcgtcatttactgacttcaacattgcaatgcttgctaagcaaggttggtgactgctttgtgatccagaaacctttattgggaaagtatataaagctagatactatcctcactctgacttcctgtcagcagagttgggaagtaatcctagtatggtttagagaagtatttggaatacccaatctctactttgacttggcactaggagaatgattagatcaggggacacggtcagcattctcaaccacccatggcttcctatacagcaggattcatatgtgtctactaaacaccctagtttattgaatcaacaggttaactctctttttcatatgcatagccgctcttgggactatgatccgagatatgttttacaaccatgatgctgaagctttttttggcattcctttaagctcaaatacctccaatgatacatggtcttggttaggagaaagagagggtgagttctcggtcaaaagttcttataagttgattcagaagtaagtaacgacgtggtggctgcaaactcaggtttctagcattaactattgcaactgaaaattcccccaaaagttaaaaaattcttatggacagcggctacatgtacatcccaacttgtgtttagctagtgattaagcatgttgatgttccagtcacttgttcgatttgtaactcacaacctgaaaccatcaaccatgttctcctttcttggcagcttgctcttgctgttggcgtaaatgttcaactccattcatttttaaccctggtggttcttttggtagctagttggagaaaatttttaagaatgttgcaacagatatggtttttctcattgccatgtattgctgggcaatttggaaagctaggaacaaggtagtatgaaaaaaaaagcactcctttgtcactggtgttctcgcatcagcacaagtagctcttgatcatttgattaaagctcaggtaaagtttcgttgtcaaaatggagtatggctagtccatgttgttaaatgtttaattcttttagcaatgacagcaaccagaccacttcatatgttgtacttgacattgctctatactttgcctcaactgatgatctagaagtagtatgttgtttctttcttttccatgacaccagagacttgcctagaaacacacaaaaaccaaatgttgatcttctggtgtcgataaagctgcccaatcagcatctgtgtaggcttctagtctgttttcagattctgcagggtaaaataagccttgaccttgactggttttcacacattgcaagactctttgtgcagcatggagatgattaactcttagagaggttaagaattgactgagtttattgattgaatatgctagatcaagtcttgttattgtcaaatactgaagctttctaatcatcctcctatatagtttaggatcaaccaattgttcttcatcatcttggcttaatttcagattgtttccatgggggtattggcaggtttacttcccaagtagccaaaancctcaagaggttgcaaagcata

SEQ ID NO: 300713 - DNA, 1322 bp, Cannabis indica
taccctcttcattttcatcatcttgaaggcatccaggtggtatttttgctctgtcaaaccttcattcgggagcatattaggctccttgaaatttacgggcaagggctctgcctggatctctcttgagaaaggggactcctcgtcaaagtcgtcctcttcccaattacagtcttcgaatgcggctgaggctattctccattgtaggtcttccatctctttgtctaactccttcctcctcctagtcagcttctcctgcaaatctgtggtggttggctttgccttcttctcctcccaaagagagtctactatcggcgagcgctttttagctatggccttctggtggagtttctcccttaagtctccctagaccaacttggactctgttttcttaggttgtgaggagggctcaagatttctccgagtagaaaccttatgcggggatgacttaagggtgttgcttgttgagtatcttgaagccctttcatcccctggcttgtctgtcttccttatctctgcctctgatgctcttcgtctgactagtggtatctcagagcggcctctaaggagttcctccaatgccatttgcatgtttgtgaccgtctcttccagtcccaggttcctcagccttagttcattcatttcctcatcgtgcagtcgggtccgtgaacccaaacttacagagtaggtcctcttctcttctcccagttgttagtgggaggttcccgggtctttcgaccctggcagctgtggtgccttattggggacaaagctttcgaccgttgagctctgttgcccacttctagcgtgagggaggcagtcatcccatcttgggtgcggttcactgggtcatcctcgggtcgcccattctcttcttccattgagggtctttgaccttttgtacctcctccattctatggtgcttcatcaccagtgcctcttccttcggcaactgttactagtgggggaggtattgaagcgatcaactgatggtcatcaagtcgtacctctacttcttgacggcagcgagaacatctcgacattttcgtgtcacttgtattagggaagaaacatcgcttttagactgccgcttcccacagacgacgcaaaaatgttacagtcagaactcgttaacgatatagataacttttttaactaataatattgacaaactttaatggaactttgactttaatgccaagaagaaagaacttcagaatctctaaagtgattgaaagtaatatctcataaactctctttcaatgatacaagtttttccctctggccaaaaaaaaaactccctacaatggatgggagagtctaat

SEQ ID NO: 300714 - DNA, 2814 bp, Cannabis indica
taaaagctgaactttatttataacgattcttgcgtaattacatcaataatattactcggaagggaattattaaccgaataactacgtttagtatataatcatgaagctcggataaggcgatagagcaatacgcagaaggtttaacaaaacataaatatataaacattgattaattctgaaaaacactctcttgcattcctcgatgcaacagccaaaaaaaaaagtgacactttttatttatagtaatgttgggtaacttagtaaagctgcctataatactactctataactaattagtgaattatatctttgtgtcattatagatatctgttagggttctcttgggggtggccacatgttatatgttggggtcaaatcaaacgcatggatatttcataattttatttgtataatattatttattaaattaaaatattaattaatttctcaatttttcatttttgttgcatgattaatttttgcttaaatatgagacacgtggcttaccaaacagagagagagtccaaggcaatctcagcgtttttaagcaagccagcaatcaaaaccaaaatctgataataccaagtctcaaggcagagcatgaccgcagacgcaatggatagtttaaaaaactcccaaagcccactaaaggcctccaaactgaacccattccacgtaagcttacacttgtcactcatcaaaatgtaaacaaactgggccacaactactatccaccacgaaaaactaagcataagagaagcccagaccccacccaagcttgtaaatcaacacccaactcagcaccaagtgaaccaccagcgtcccagcgctgatgtacgcgctcggaaacacgatgctttgagcttgaaggaacttttgtatcgggaaattcgctgcgtaagcgaagatttgtgggatcaatccgtacacgaacaacgctgcagccgacgctatttcctccgattctcccaacccaagcaagatgggctttgagaacgcgtagatgattgtgagtgggatcccagtcgccatgagtagtattgtcgagcgttgtagatatatcccaagcattccgtacttatgggctccgtaagcttgtccgcagagcgtttcaactgcacttcccattccaagctatatatataggagaaatttattagctcatttcacattccatcgatgtgggacattaatacataaacgaaaacgaagtgatcaataaatattttgtgtaccatgagaccgtaggcgaagacttggataccagtgttgccgagggaagcagcggcgagttggagattgccgaggtggccacagaagatctgggtagacatggaagtgacgttgttgagtaagtagacgacgacggtgggaccggctaagcggaagagggtgttgagttcgatacatgtggctgatttgagtctttggaagaagggaatatcagggtttgataaggtgtcttctagttctgaacttattggggatgatttcatagttaacatgggttcgtgtaattgtaatagtagctgctcgctactaattcttctcgaattctccatcttaattttattcccttctcacaaaaaactatgcacacacaaaaaatattcgaaagaatcgcagcacacactacacacacatctgtgtgtgtatatatatagactggggtcgagatgtcgtataactgagtgatgacttgttttctattattgattggaccactgtgataacgcacagtagctaacatcctactacctacctctccatggtgtaaaaaatgagtaactataatatctgcatcctgtaattatatatatatatatatttagtatcatcatatttatttaaacgggtacttctaattataaaatagtgtcacttctgtctgtgtgtgttaatattttcatacacatatttagtactgtacaaaatttatgaccattcaatactctgtttgggcaaataaataatttgacataatttttaagatgttgttcatttagcatacaatatctttggagctacattttatattaagatttattaaaatagaagaatcttctatatttataatactctattagagaggtacaccaacaataaagtgttgaatttataccctccttttgaaaaaaaagagttgaataatccaacattatggttagtcaagtaattaaatttgattagagcactcataaatttaaatatcatcattaatatttatttttaggaacaagttatcaccaataactttttacagacgataaattgttattgataatcatcaatgataaaaaagacactatttactaacacctttcacttacaaaatctgtcgtcattgaaacttattttttgcaaactcgaataaaattttctctaaatatagcttaataaatagtagagtggtaaatatatcttgtatctttctcttttttatttttttaattaatttattacttttttttactcatttcttgtatttttatttgtttttatcaattaaatatatgtaaatacacaatatttagaaaaaataaagataatctcctatagtataatgtaaatgtgaggtaaattaaattaagaacgtagatttttttgaaattattttagaaaatagaataaaataactgatgagagtgcttttacaaatatatgaggaaaaaaattaaaagaaaaacccttctatattcgagctctaactataaatgaattgcatagagaacttgccggatgaaagcttggttctccccgccaactacttttcctgttgcaggatcaagtataagcggcaatggcccctcattc

SEQ ID NO: 300715 - DNA, 3226 bp, Cannabis indica
aaaacatgaaaacaaaacaaaaaaaaataaaaataaagaaaattaactctattatcattatgtataattttaattttaatattttaatgtttgtttttttaacaaaaatatttactcaacttgttctttttatttcgacattcaaagtttgaaacaaagtagaaaataaggatttgatgaaaacataagttgatgtattgtagaaacatgttgagtccaatagaatcttatcatgaatcaagtaactataaacaaagacaacgaaccaccaacatttgaagttggaacagccacaataatggatgattaactttagtaaaaatcaagtgaacaatacaactaaatcaccaaaggagtcttgctcttatgacaaatgactaacacataaccaagtttccattgatgtgtaggaggagtgaaatcagtatgcactcccccaccactgcgaccaagtttccattgatgtaggagtggaataagtatattgtttatggccaacattgtcatcttctaatggtaatgtactggtttgtctttgactttggtcaaacatttcttcgtcacttagcctttcttcaccattgtcactctctaatacatcatcagattgttcagtctcgtcatcatattggttgccaaaatcttcatcttcatcagcccttttagtccttgtttgtgggcatattttcttgttatgtcctgatttcttgcaaattgtgcacttccttttattcacagccttggaaccccgcattttcgctattccttttgtctttgagatgtgtgggtcttctacagttatatcattttgcttaattttttcttcctctctgcctctcttattttctaccttatcatatttttgcaagctaatactcatgttctccaacaattgtaaaatttcatagtaagcttcatgtgttttagccccaatgtatgcaacttcagccatttttgtggttatcctactaaatcgagcctgcacttctgttgacgcattctcacattcacgataatgctttgtctcgaccttctcatctccataaggagtttttgtccaccttgttactagaagtgacttgcgtatatcctgcactttcatatacttcattgctgcgaagacatgtcgacatggtattccgaaagatagaaagtgttgacattcacacacaaaaaatttattgttagagcttactaagactacccttcttatccggcattctggatattttaataactccaacaaagttccattatcagtctgaatcttgctttccttcaagtatcttgcctccttaaccatctcctctcggactttgtaatacatgtttctcgtgtacacgttagataggtacttctcaatctgagggaagcttgttttccctaattggggagttgtatgcaatctatcataatcatctttggcctctctatatagaattaaggaaagtgacatgtcaacagctcttacaaatacatacaactttaggtttcggttgagctttttcttcagtagagcattaaccccctcactgtgttgtgtagttgacatcccacagaaaaaatttccccttagaaaagtttctgcccaatttttacgtctttcatacaagtcattggcataacgggtattttccagaatatactctgtcaccaaagcggcccatttcgcctcaaatacctcttcctcgtagtatttgaacacaagttgcgttaatttttgagcaaatccagggtcggtgacattacttactgcattattatgcatgtgccaataacatagcctatgaattgtatccggcatcgtctcctccaccattgtcttaagcgctggatcagaatcagtgacaacagtctttggatgaaccccattcatacactctaaaaattgttgtgctgcccatatgtagctttctgctgattcattgtctagtaatgtaaaagcaaatatgatagttctataatggttattaataccgatccacaccaataacggttttccttatgcattggtcttgtaggttgaatccaaagcaatggcgtgaccaaaagtctcatagtcaaattgtgcccgtccatctgaccaaaatatgtgttgaagtctgttccttttatgaacagagtatcttccaaaaaatcgatcatcattgtctgctctaagtatccaattgcacgccttgcatctgaactagatagtctcacttgttcctgtttgatattttgttgtaaatgtctgactttgtgaagggcatcttctcgtacccccaacttgaatagccatgtaagataatatatgataagtcttaacaccagcttcccttaacaatgtagcagtctcaacgtatcctgctgtcaccactcgatttgatcgaagaaattgtttgtgattatcagcagggagcgcatgtgaatgggttgtgataaactctctgcaaatccatgtattctcacctatcactcggtggaccctgaaagcaactttgcaatcaactcgagtatgtgcctttggctctctcgtcagatcattcctttgtacatgtttttccattctcttccctcatcgtgagcacaaccactctctttcttgtaaaagaccgaacttgttaaagcgcgcgtgtcctttacgaatgctaaatccaattaatttggaatacaaattaattaattcctttgccatttccagtgagtcaaaaacatggccaactaaatcatctcttgttagcagaaacggatcttcctcgtcaatttcataaatttcaaaaatattttcttcttcatcattttcatagttctaattgccacaagtattattgttgttcatcatttcttctgctcctgctctattgtctaccatgttgctctcatcatagggttcctcaccattcatatcatcttggttcatcatgaaattcttttgcatcaatactcaaaggttgtgtataaagaaaagataacagtttcactataacactaatacaaatatgaataacaaccacatcattcaaaaaacatcaaatagtgcagaacttttaggtattaattttcttttttgaaatgattcaacaaactttgactttaatattcctagagttgtgtttagttatatacgtttaaatgactacctattaagaaataaaaatttaaattaataaacaattaatcctacatacgtttgtgtgtatctaaagtaaatgatattaattcaatcttcccgggatccaccttg

SEQ ID NO: 300716 - DNA, 1478 bp, Cannabis indica
tctctccttcttctccaaaagctgccatgaacacattcaagtaacctccatacatgtttttcacgtactctgagtccttgttgctagaagaagaccaaatcttttctcatgattaatatcatatctttgttcatcaactttcttcatctcttaatctattattgtttatatttccaatgcaaccaaaatgcccagaagaaatatataataatagctaaaataggtgcttaattagcagccttgattaactttctcaaatcaaagtcttttgtctaatgggagaaaatttgaagtgtgaaatgattaatcaaacaatggtgtatatatatatatacatgaagatgaagatgatgaaagagtaagtttttatgtagagggtttggatggaaacttctatgtcaatggatataactgagtccagcttggaatttggaaaaaataattaaccttataaaatataaatttctaaaacgtgtgtccatcaagaaggaataaaacacacggtttaattaaggttttcttttattaaaaaatatatgaacaagaagaagaagaagacacggtttaatttttaatttttattttgttggtagggtctactttttctgtttgaggtcaaaaggaattacaataggctcgtacccataatagtactgtgccatgaaaatgaactttcaaactctattgtttcacatgtaaagtttttcaccataagataaatgaaattggaacatttaatttttcttgtttgctcggtaattttggaaaatctaatcaaataacatgttttctcttcacctctattcttagatactgttaattattatgttgtcatgttagttagttagttagtttgttgctgatcaaatcacttgagactagcttaagtggttaggagagtgcgtgtgtgttggaggtcctgggttcgagtctcaagttatgcatgattgtaatatataaacgcttaaaataaaaaaaaaaaataagttggttgctgatcctgtattcagctcactaatatcattagttcaataataaagatcattcaattctactttcactaatatctatcaccattagattgatcaaacaatttttaatattagatgtcaaaatacatcaaataatagaatgtattttttttttctttttgatttaaaacaaaataagttaaactccattgctcaaaaatataatgttggggaattttttaaaaatattcttttttatgttctatttacaattttatgaactaaagtttttgtttatataaatatgtttgtgaagttttggattacaaaaatatattttttttaacaaaaagtaaaaaattaactaaagagagaaattaattttgcggtaattataaattaactataaaacaaccaaacgacaactacaaaaacaagctcatgagtcatgacaactataaatacattaataataaaagaaaaaaacaatttattattttttattaa

SEQ ID NO: 300717 - DNA, 2300 bp, Cannabis indica
tgccgagcttgaaactgacagcctcttatgtgtgacaagccataaaagcaacacgaagatgtcttctacgtttggtatagttatagaggaatgtcgtttgttattatcttattaaaggatgtaaattacatttgttaaacgatcagcaaatcgagtcgccatgcaattgcaaggcactctcgatttatctctgatagttgcattttagaacaagatatctggcccgatttgagggatatcttgttttctgaaagcttttaaatcaatcaagttgctatttcattacaaaaaaaaaaaaaaaaaaaaaaaaaaaaaagttagaatttctactaatggtaataaggttaagtgtgtgtctcactttctttagatagatgaaataacccttggtacttggtgtactttatcaccaaacaattggcctttttccatttcaccaattacataagttcttaaaaatggtgctaaactccattagattcttaaaagtggtgttgaactaggggcttaaaggcaaaaaataaataaatcaatattatgaaaccaaataaaataaaagatataaaaagctatagagatctgccaacaacaatattgttatgacacacatgtgaatggttaaacttacatattgatcatttgtcaaaaaaaaaaaacatacatattgagtgcaataatttagatatatagaaattaaattaattaattaaaaaccctagagatataacatcatatattgagcatagagacactataccatgttagagtatagctttggattctctcatgtgagtcataagtactttgatatgaaaagtgacacatatagatctcaatgaatctaaaagaggcccaaatgtaatcaataaatgttgaaaaaaatgttagaacttaaaaacaatatattgaaaatatgattttatcttattttcttaggacatagacatcatatatagataagactatattatatagggactaaattatgtccctccttagttcaattgtcaaaaaagaaaaagaaatgagctaaattcattaagcttgactctttagatcaagagtcctatattttttaaaataattataaattcctaattaaaattttgtcgagttcttaacattgcaagattaaaacatcgttaaattcataacgagtcataaatatttacatctaatctaactaaaaatgaaaaaacaaaatgaccccatttacttatttttttttaaacaaaatgttaatttatattagataaagaaataatttatctttgtacactacaaataaaaaatgagattacttggttgtaattttttttcacaagagtttttgacctatgtattcataactctctttcaatgaggatttggtcatttttctcaaaaataaataaataaaagatttattctttgttaaaacgtgcatacatacacacatttttttttccatgttatgcaacatttgggattatgagaagtggttctcaagtcctctcaagaatagtcaaattattattcatatataagacatatattgttttattatataggctttaatagcttctatcttaacatttgataccctataaaatcaaatccttccttttataaggctttagtttctttacacaagcaaaaaaaaaaagtttaattctttacacaaaagtgaaaagaatagtttgttttgtataagagaccaatttaagaaaaaacaatcactaactatattagctcaaataataaggataatgactattcaacaaagtggaccacaaacaaaagtcctcaaaattttatgacaaagttagataaggacaaacactaatttacccaattcccaattttatttttaaacacaaaatgtaatagtaatataactagatgaaaagaatagagaatatcccattatccattcatttatttttaaataatttttttaaaaaaattgtgttgtgaagttagatagaaccagcttggaagatacattgaaaatctatctaattagagaaaaaggaggagttggcacgttttgtaaaagtgtaactaaatttctcaactttgacaacccaaacttattaagaccattattaattaattaaaagaaaataatttaaaattaattaataaaagataaattgtttgcccaaaacaacaaaaaaacaaaacaaagacaaacatttttattattaattattattacaaagaagattaatattaagataattaattattattattattattaacttattacaattatttatatatattatattttttaattattattatattattat

SEQ ID NO: 300718 - DNA, 1072 bp, Cannabis indica
gcatgtcactaaaaatcactccccactctttagtgacgcacacttttttgcaggtatagtgtcactaaaagggtaaattatagtagtgtggctctgacattcttggtctacaacctttcattccctactaaagtaccaaataagtatccacatgcttcattgaatatttgttattgcatatctaggatagaaatgcttagttcatgctaagtctaggatgtctaatctgttttaatggtgagatgttactcgtagaaatacatttccatggtaagattgtgtgggaatttttgcaccatgagagtgttactactgcgtggatagtttgcgtatggttgtttggactatgtagacacttgcatgcttttagggtcctagaatttgggttgaactcggttggatgaactttcaagcgaggactaggtctgttcattttttgtccattgatttggagttgctaggattccaattggccttaatttctagaattttgctttagattttgttgtggtaacttttccctaggttcttgatctataactttgagttgtcttgaagacaggcttctgggagtaatgggtcttaatgggacctctccaagaaattttaggggaggccttccccgatgcccattttgtcatttggataatgggtgtctaatttcttggctctccttatcccttcattttttcaagtgatggacttgaactaggaattaatcttgaggcggtggaaatcgatgaaaacgccacagttgccccttttgaaggaatggccactgagggagcttaggcagaagttctttaaggtgaactttgactagatattgctcttgaaactatcccagaggccgctccatcttggatattgaaaatgtctaaagggaaagggaatgccaaaattctacctcgcgcccaagtattcaacaactccatttgggaaatggacaaaaatgagaactgctttcgttcaaattttaatatcattaatattcaataaattaatatcatttttcaacttttacaatttaatttaaataaaaataataaaatttaaaagttagcaaaatatc

SEQ ID NO: 300719 - DNA, 969 bp, Cannabis indica
aaaaagatgtttgatcactagatagggcatactaaggaggtgtacgttgatgatatgctgataaagaccaagaagccaaaagatctaatcaaagatttagatgaaacattcactaccctgacgaaatacaagatgacgcttaaccccacaaaatgcgtctttggagtgtcattgggaatgttttttggtttcatggtccacgagaggtagatagaggcgaacctaaagaaaatacaagtcttgatagatatggactcattaaagaatcaaatagaagtacagtgtctaaagggcagggtggcagcctgcaataggtttatctcacgctcgacagacaaatgtcttccattctttgatgtgttgagaggaaacaaaaaaaaatttctggagtgaagactataaagagtctttcaaaaaactcaaggaacattaagggaggccccactgtttgtgaaaccagaaaaagggagaaactatttctctacttaggtgtgtcgagccatgcactcagtgtagccttagtaaaaaggaagaaaaagcagtaacaaccagtttattacgtatgtaaatattggtggatgccaaaactcggtaccctcaaatggagaagttagcctatgcactcgtggtggcttctaggaaattaaagtcatacatcaatgcccactccatagtcgtgctgaccaatcaccccgtatgccaagtcttacacaagcctgagactttaggatgcctattgaagtagacaatcgagctctgtcaatttgacatttcttatgtcccacgaatcgcgattgatgggcaagttatcggcgatttcatggctgaatcttcttatcaacctgacggagaaggaagcccaataaaatttaagaggaaaacactcaagaccatgaggaaagatggaagttacatgtagatggtgttggaatgttattttaccaggaacttagatctactcacaagtat

SEQ ID NO: 300720 - DNA, 3484 bp, Cannabis indica
ctttgctttatatagaacaacatccagagccttctagaaatggacaaccatgccgagttcaaatgcagaagtaaatatattttacataacaataaaaggtaaagtttttgtgtaacaaaaattgaaatgagaaaggtaccatgacaatttgaaattgttcagcatcattaacacccgtaattgaataacaattgctttgactcagatatttatattcgcttgcactcttcaaattcagcttttctgaaacagaaaatacaaacaaagaaaaagtaaaataacagaaagaatatatatatatatatatatataaaggacacaattcaaaatattaaaatccacaaaactagtgaatgagttgcagaattagcatcatactgatacttagaagcaattgatgaaaggaagagagatataaacaacatatatgtcaattaacccttaagttttcagtagacctaatagagtaaaggaaaaaggaaaacaacaaattatattgctaaagttttacccatcagacacataataatttaggcagtccttttgaaagccgcctaatgttctacaacttgtcacaaaaaatgaaaaaggtggcatcatcacatttgcgaaggctacttaaaagtttaaaattaatttaattgcacaaataagagcataatcatgttgaatttgtagtatgacacagcaatacccatgagacatggttaaatatcaatacaattggtcataaatagttacctctgagcgtaagaggagccccagcacaaagctgataaaagatatggtacgacctttcaccatcggtgcattggaccaccctagactgtaacggaaacccaaattaataatccaaagtagttaagtaaactcaccacatcatcaagggggaaataattaccttttcaagcaaaactgcataaaagatgtgaaagaaataatcaataatcagctttaaaatttataacataaattaataaatgaacttcaaccaattgagaaaaaaaaaaacaacatacaagtttgaattcttgcgccagatatttttccagtttcactaaagtagatctcaatcaactttccctgcaacattttcactctgatggtcatatttatgtaacaaataaaattacaattttattctatttcttaatgatccatgaatacaggccctaacctaaccataagaaaaatgcattgacctaaagaacatttttgtgaaggacaaagagcttacaaagcgactggagttgtcgtttcttaatgttttggcatttccaaaggcttctagaatcgggttagttttcaatatttcatactctatcccacttccccctccaagtgcagctaaatattgcattgctatttttgccgtctcagtttttcctgctccactttcaccactgcaaaaggtaaagattgtacaaactaaaaatgtaactttaagaaaatcacaacacactctaacccattagtaaattgtgatccatagttttgaaaccttaaaatgccatggcatttttatttttaggttaacagaagcttatgttaaataaaataaaactttctcgctatgtccaacataaacacattcacatgtctcctctggttcgatgtagaagtacaatacatctgaaatggtaaagaagcttaagataaaccaactccttctctcaataatttaagatttcttccatggggaaacaaatacaccatacaacctctaagttcactagttacctaatgtcattttgaggttaatagcttcaaaggtttcaagaccgtatgaaatacaacttgtatagctatgtctcgtattcacacttttggctgcacatacttggcacacttgatctatactaacttcattataaagataaacctagattgcaacatattcttccacataaaagattataacgatttatatttttattttctctatgttttgaaaatccaaatcatttaagtatgaccgaacccactaattcttataaatctctcacttaaacatcaccggaccctcattcaagcatgactgaacccattaatttttataaatctgccacttaaacatcaccggacccaagtaagatgtgtaaaacatataaaacatgtaaaacaacagataaaattagagttaaagaatgtaaataagcaatcagcaaactggcaacatcaacattataacaaaatggaagggaattgatcactaaccttataatgatagactgatttacttcatctggaaaaaagtatgtcagattaggactattaacagctaatgacaattcttaaggtgagattcatgtgatgaaaagaataatcttgtaaatattgaaagaaaggaacctcttatcatctcccggattgctgtgtccgtaatggcatacacatgtgggttgtcatttttttttccgcttatatgcttctatatattcatttccatataaaggaactttcttaaatggattaatagcaaccaacactggtcctgcttttgtctgcaaggaatacaatcaaaatttaaagacattagagaagagagatttccaaggaaacgacaataaaaaaattaccacaaatttgagaacatacataaatcatattttgattgtatctgtactggagattgtacaacactgatggttcatttagatagcttagctgcatgagatcatctacaccatcaaggatatcaggatttgctgggaccaaactttcagtttgtacctttaaaacctacaaagtgacattgaaataaaatttaatcatacatctcacgaaaagaaaattaaatctcaactcaaattatatgtagctctcttactttctcatcaggcagtgcaatgacagattcagtccccgagattgacaatgttttcgcaagctcccatctcccacttggaagttgaaaccaagattgaagcttctgaaacaataaacttaagaagtaggtaacagaaattaataaaaactacgtactatgttcataaactaagctccaggaatcatcaattactttttgaaaccagttcataaattaccactaaactgctataactttgtaacaaaatttggatcgctcatgtcagctatttcctcaaaaattagaagaattttaaagtacaattgcaattacgagacaatgacaagagccaaaaagcaacaacattcatacagattaaaatcaagacttagagatgaagaattttttttccatcaaaaaaaaaatcaagagttagagtacacaacagcggaaaaccataatctgcaagtacaaaccaccactatacaagaaaaagatcagcaacggattaaacaataaatataaaactgtagtttgggattttttttttttgggggggggcgccaaaggaagacgagttaatttgatagaagtgaaaaaagcatacatacagttcaagtctagatcatataatgtagactcattgtgtataacaacatcaataaaaagaatctg

SEQ ID NO: 300721 - DNA, 4046 bp, Cannabis indica
aaaataatttccaacagtggggtcttgaaattgtttggcatagatgagaatctgttgattaggtagtaggctgtttttagagcttccctctaaaatgttatgtctaaaccaaatcctagtaacatgcacctaaccctctcaatcaatgttctattcatcctctcaacaaaaccattttcttgagggggtttcgatcacagttctatatctctggattcccattttggcacacaagtccttgaactcatttgagcagtactgaagaccattatcagtccttagaccttgtgtttgtttccaatttagttttctagcagcctcttccatgtgtcaaaggttcctagagcctcatcttttcttttcaacaaataaacccagactttcctgttgtaatcatcaactatactcatgaaatagtatcctttacctttcgttggaatcctagatggcccccaaagatcataatggacataagctaacctttctgtggtgatgtgttatatcttgctaaattttaatctgtgagccttccccaaaacacattcatcatagagttcaagtctttcttttagcttctctttgaacaatccttgactttccatttcctcaagtcccctctgacttacatgcgccaatctgaggttccatagccttacttaactatgtttagtttagttaataataggtgttgccactactacaaaaataggtttcaaggactcgggttgagggactcaaactatttagtgacccttcactatgcgtcactaatgtgggtgaccagaaaagcagtatttagtgaccctttggagtgggtcactaaacctatttagagtccctcatcgcgcgtcactataggctttcagagtcaaatattgttagactgtgaaagcaatagctactctcaatgagtgtcactatatctatgcattttttttttaaaaaaatcaatatttaatttttttagttcaaattatatattataaatttataataatgatttaattaattatatttggataataaaataattaatgagataatttaattactacataccaagagttaatacattttaatttgcctataaataaaaatcaatataagaaaaataccgcaaaatatatagtgaatcaaaaaatagttaaatcaaaatttatacctcacttgaaggacaaaataaatataaaacaaatgggcataaacatcaaaaccgaaatcccttaatctttacagaaaaaaatacaaaaattaatagaataaaaatctaaatgcaaatctcaatcccaaattaataggtaatacaatgtcttaaacttaatcagaaataaaattacaatacaagatatgaaacatattcaagaaaatgaaatctcaaattcacgataaggcctggtataatattgtgatttctcctccatcacttcacttccttaaattttgtcctaatcatcacacttacacaaaaattaacaccaaaatgtcacatatttgaacaacccataaatcctactatggacgagtccccatcaatctttaatgaaaaaaatacaaagatttcaagctgcatatggctcgttgacgatgatggctcgtggatgatgatgggtaacccgtcgttgggaaagaagattggagacggaggagttgcgtgaagcttgggttgggaaccagaggttgagaatgaactgtcacgtccgatgaagtcttcctccgttgatgtgtgcgaacgaataggtcgtcacccatcgaggcctacgaatggtcaatggtcatcattttggtttctaggtattgtgagcaccatgatgtggtccatttggacactatcgtttagagggtggccatcgtgacctaacagcaccgtcgcataagggaagagagaaacagagatggaagaggggttatgattttttggggtagagaagggttgttgatggccagaactagccatggcttacaatcgctacaccaaaacaaaggagagatagagagatagagatcgagatcacgagagagagaatggaaatttagggtttgtttctaagaaaaagttagtgggaatggcattagggtttcaacatattttttttatatcttatttatttatttatttattttctttttcctttatttcctataataaataaattaagagtaaaaaagagagcctagctagaataccatcatgtgtcccatttcaccatgtcatgtcctttattttatccattttttattttatattgagtctttagtgatccgcattgtgtgattctgaacacttttagagttccacaatgcacgtcactatatattcatattttttaaaaaaataaatagataaataaataagcttttagtgaacctctaaaattttagtgacccacattatgaaaaataatgtgaattttttactgtcacacaatgcgagtcactaaatattggttaaaacatttagtgacccgcactttttgtgcgagtcactaaatgtataaattgtatcagtctgcactacaggttattgtctttccaaccaagaaatatagtccattactcaattttcctctcatcacagttttagtgtcttgtgagatttttattacaccttactcaactttgacaacatactcccgtttatcaaacatacaattacaaaaaagatttcttttgagatctcgaacatacctgacctgctacaaggtgttcatgactccatcatgattcaataacaagattattcccacacctttaatctcacaagctttgttgttcccaagaagaactgtgcccccatgactctttgaataagtcctgaatagttctttgtttggtgtcatctaaaatgaacaccttgaatctagaatccaatctccacttgaatctgatctagacatcacaagtgcatcaaatgacactaaaaatgcatcagatgactcatagccatctgcaacatcaacaagtccatgccttttggacttgtgatgattttctcttattagtttatcctataaagccaaacaatcatctctaaagtggccctccttcttgcagtgataatattgctttcttgtagttccattagagcttggccctcctgtggagtttctagaattggatcttgaatggttacctttgtatccatttgagttttgatttcacttgtatactatctttgggaattttgccttaacaataagtaatcattcaccattggtctcttctttctcatctcctttcttctaaatttctttagaattaattgtagccttaacctttgtcatggtaaaagtttctttcccataaaagattgtatcaataaactgctcatatgtcttaggaagtgaactcaattggattatagcctgttcttcatcatcgattttcacccttattcagatcaagaataattctattataataatctagatgctttgtcaattcctttggctgatccattcgaagtgtgtataacttcttcttgagatacaacttgtttgtaagagatttcttcatgtaaattgaagccaacttattccagagacccaaggccttattttcatctgaaacttccctcaaaacctcatcactatgactgaggagaaaggcactgtatgccttggctttaatctcaagtttcttcttcctttcttcaataaattctatggctcaacatcaggtgcgtcatagatcccttggtgaactggagaatcttttattttaattctccataagctaaaattatttgaactagtgaacttgtccacttcaaatcttgttgtagccattcaaactaggttcttgattgcttgattatggttcttgaaagtttaagtttgattcttattaaaatgttgaagatgaatcttattggttggctgtgattattaaactttaaaccctgagctctgataccatttctagtgaaagattactctcaaaacactaatattacaatagtagcgatgtttatgaacacacaattcaaactagaaccaatcacaaattaaaaactgaacttagataaaactaggcaagaataaacttag

SEQ ID NO: 300722 - DNA, 3229 bp, Cannabis indica
aatcaatttatttaccaggacatacgtaaatatctattgcagatatttaatttacgttggactacaggcatgacatctttccagaatgcaaatatcttttttgtaatgtttactcatgcttgtagatttaatcaatttattaacctggacatatatgttaatggcaaatcagtattcagcgcatgtttttgttattctgctgaggtgcaaaatggtttgaatacgtttagtcattctcttacaccaactcattgataaggatgtatacattacgtacttctgaataagaaaatacatgaatgttaaattctcaaaattctttatgattgtttactagacaatgccacttgaggctaggttgggtaatgtattgggtttgggattcaaacctcacctaggactaaaaattttaagttttaaagaaggagtttagcagcaaatgaattagaagtatagatactggtactatattttactagcttgttataaacgataaaactgacaaaagcctcaaaaaagatgggaggggaaatcaggtttttcttagtgctatctgatttcttgaaatttgattgaaaattacttttggagtatagttgttcaacactttgaccttgtgaaaaggtaatttgtcagagggcaagaggttgtttggctggaccaaagttttggtctcctatgattggactaaactaaaactagattgctcaagacaaaaagtgctgatccattttcttgtcgattgacttgatggttctagcttttgatttaatttaagataatgtgatttatcattttctaagataacagtgtttctgtatatttgggttttactagtgtgaatgtaacatcttaccagtcactaatgttacttgaaaactacttgtaaaactgaaatgcatcatggaacagtataatgaaacaaacataatttgtatcgatctaaaagatcactattatttttcttgttgggcatgtgttagatcctgaatattttttttgaagggaaaaaagaaaaagaaaaccttatattctacataaaggtaccattagcaaaaaatgaaaatctagatgaaataagctgaactcaaaacacagcttactcatccatgaaacagaacaaatgtatagcaaaaacaaaagctgttgaccactgtctggtgattcaataattagtttaagagctcaactcaaattgtgttcgatatgaaaaatgatgtgatatatgaacctatttggtcacaatgggcactacagaattataatgctcaccaaggccaaatgcatgcttgtggtatgaaagcctaatagaagtatcagtcccactgttggatttgtactccttccccatctccacatcaggaaaggacccagagaataccatgatatgtttcctaaggtagtgagttagagcctctaactctagctgacctccccaggcagctgtcgtctccacttctttacagtaattctcgaacttttctgccagagaatcatcagaaccatcatcttctactgcattttctgagaggaaaaatgggagaaaatcagatgcgtttttcctcatataagaagccaccagttctcgaagttcttgatagttgtgaggtgatcgacctccagaaaggacagctagttgatcttcaacggctcgatagagacagtgcccatctggctggctttatttcagctacagccaagccaagaggttcaagctttttctctagttttgcatcttcaataacacggtcacttacaatgttgctttgttcttcctgtattctttgttctcttgttgcttcttcctagcccctctttcctcgcctccttgaactcttgctagactttacttggtcaggttggttgctcacagaaactcttgctattgccttcactaaattctccagtttacttttcttatttccatttttagtgtcataccccaaggaagcaagttcttcagcatgtttttctttaagttcaaaagaacgtttagtaatctcttcctcgacctgttttttcttggctttctgctctgctttgctgcccttagcagctgccttcttcaattcgatttccttattttgtagtgttgatatctctttcctgtatacaacaagtatattcagcaaaataagtcagaaaacatgccacttatgcaacaagtcgataactactaaactccttttgattttcaatcacaggactggtcattgaccaaaaccacaaacagtacaatggtttatttatttaatttttaaaaaactagaatctccatctaaccctataataatatataagtaaccacgatagactcgaacctcagaacttgcgagagcaaactacatgcctggccatttgagctaccacctcttgtcttaagaggtgcaatggtttagttgattagagagcctgccctctttcaaaagactaccaaaaaatctaactctgtcaatatcttcctcatctaacagccacacaaacttgtagcagaataaactttgcaattagtcactcactgccttccctttttttttttaaaagcctcttcctaactgtagaaatatctttgtaaatagctttgtaaagttatatttagggtgtttttgacagcttagtttaggttgtatgttttcctaatttccttgattgttgcctaattctactatgtaatcagcctatataaaggccacattttcatcaataatattagattagaagtatcattcacaaattgctacatggtatcaaagcatttgtagtaaaaaaaaatcgtttcttttctgccttttttttttttaaaaaattagggtttagttctttgaggcacaatcttaaaaatctggtacacagtcctcttctaatctcacctcctatccaaaaagcttaccacagcaccgatcggcaaaaccccaaagttcggggtccataacagtggcgcgtgagccacacgcgccgccatcctccgacgtcatcacccacgcgccacgcgcgtgcaggcgcgtgagacatctccgacttcgtttttcgacgtcttcctccctggcacctccctgcttcggctgtgactcttcatctagggttcttcgctacaacagattatttctttggctaagttttcctctagattcattttctttttgtttcatttcaatgaatcctcttcgacagtctatacaacagccaaaatctcccttaatcaaggcaaatgccagtatagtgtgtcatc

SEQ ID NO: 300723 - DNA, 6542 bp, Cannabis indica
atttgtttgttgtttttttgttatatgtatgtttatttttgtttgttattttgatgttattttcatgttacttttatgtaattttcttgtttattttatgttactttcgtgttaattttttaaaaaccgtaaaaatgtaaaaaaaaaacattctttgaacgtaaaaatataattattttataaaaaattgtgtcttatgtaattatttcttaatataagggatatctcacaaacccttcatgggctgcccattttcttttgtctctttttcattttttaattgatgatgcatttgtccattagaaacaatagttttgggcctttataaattcataaccattttgcacaaagtattaggctttaatgagtccattaattttgatgaaacatctttcatatactttctctcaattttgataactagcccaaaatgtacatttaagttcatacaaaaataaataatattgagaataatatttttaacatgggaaattaaataaaattgataaaatattacaaaaattaactaaaattaatctaaaaatactaaaactaatatttatgaaatattaagtaaaactaattaaaaagtcactaaaataaactaaaaatgcttgagaacaaaactagtttaatgtacaaaaagagctaaataactatattttcatagagttatcaattagcaaacaaataatcagacattaaatgaaatatgaactgagtaaatattgagatttttaaaattacaatctttaaaataaaagaaataaactacagtaagaacaatctctcttcttaagaattcttctttgttgtttgttgatgtagctttaggaatctcacataattctccataatccattaatccaccaccatgtaattagaagcaatttttctaattattaattaattttaataaattgatttaagcccctaatcttgtatttattaattgtgattaaattaataaatagttgaaatttatttaattatttaataaaaatatttctaaaatattaattatttattaatttctaaaattaattactatatgtaatatataacatatatatagttaagtttttaaaataattttaatttactaactataagataagattaatgtgcattagtttaaaataatattttattacaaatttgaaaaaagatttatgttaacataaaataaaaggataatgcacaactcaaaatatctcatattttatttttcaaaattaataattattaaataaataaaatataatgtatatatacatgtatagatatattatactcatatttcaagtaacaatatggtgttcacacgtgcaaagaagctcgaatatgaaccagcccgaattataaaacaataatgcattcaaataactcgcctcagaaagtgcagttagtagaaatattcgaacttacttttttaaagataatggcgagctatgtataataactattgattgatgtgaccagtgagttgagcgataaataaagaaggtccatctcgggataaacagaaaagacaacagaatgataatgtttggaaagggtagataatgaattattcagatagctcacatactgataagtatgttgaaagactaaagacaacattctcaacatggttcatctcgcaatttccatactatgataaacgtctcgcatatgcttcactcaatatttatggaagagcgcgagaagtagtacttgaaatatacttaggcactgtcgatcctttttagaatcaagtgtcttgaagaaattggttttattgggagaagaataaggtatagtcagcataaccgcctatagataaagttaaaagagcagttacgagtaattatttgttattatcccatgtgatgtaaatgtgaaacatggagattgtccacgttttatgaacgattacaatgataagatcccaagaaaataactgtcatcttaaactcctataaatagggacagaacccagggaacaaatgatggccaatttgagaaagaaaaagagaattacatcaatctttcattgtattctgtataccatttattatcccagaataagatggactcatgaactataaagaattaactttaaaaccacgttcaaaaacctcttgacatttattattatttctattgttactcatcttattcttgagttcatttataacaaaaaagcttatttgttagttagcaaaaatttgcgttaacagttttgtgctttcattgagagccttacaagtaaaaaaaactcaaaaaatatcctccttgaaacatattcaaactttccatccatggcagatgatactccttgaaacgaagagaatcaattagaagtaataactcaacgtccagggaaataacacaaaaattcccataggacaaatacaattgagactcccctctctggaacaggaaatagtagagaatttaaacaaactgggggtgaaatcctagaaagacaaagtggggatacctatgatcccactagatacgttccattagtaaaactagaaaatagacaactttaacaacgactagctgagtcaaattgaagaaacgggcaattggagcacgagacagcgactgctagggctgcttgcaacgatgcccctcctaactaacttgacacatcgactaggcgatctcagggaagacctagaggctcgaggaccagaagacatgggaaaactcctaggggtgataattttaaaaatcccacgaatcctcagaatgatcaacctgggaacacgagggatatcccagtggatgaagagaacccccaaaatccaagaaacactggcaatagagaaactcaacctaacacccaggaactttctgtggaaatacaaaccataggaatgtataatctgaaaacccataatcatcttacatgaacgtggatgccagacaaaaatgacttggggatcaagggttcgctcaggacgatgtgaggggtgtaggcaatcgacatgtgataggtcgaccacgacattcgcgaaggccaatccaaaacgatagagacaacacatatacctacttaagtagaggacatgtgtcaaatctattttggagacgaaggccagtgtgataaaaaccccaggaaataggctcaagcactgataccagtgggtcgagatcaaggactcatgagcagagcagatcaactagaacccatgcacgtgaaggatgaacatggtgtggggcaggtacacgtttccactatcaatatgatcaagaaagcataagtaattctcagaggtatcaatctgagagttactctataatgaggtcaattagcaattacgaacgaagacatgaaaggcgacacgaccctgatctacgtgaacatttaaaccgtagataactggacttgtgcgagcacttgaatcgtaacgttctagatctttgagaccggtagaatcagaacccaggtcgccaacaacaagtcgagcagccacccacggatccaattcaactaagagtaattttgtaatgccttaatctataggaacaccacatgtgtatgtttataaactattttatgataataaactagcaattggataaaatgtgatttaataaaattttactaagtaatctaaataaaaaaatcatggcatagtcccttttctatgattggggatcccctatttaaaatattacaagacatgccattacattattatcataaaaatacatataaaagttcaaaacatttgaaatacaattcctgaaaactcgacaccacttgcccgataagctaatatgtgcacttgctggagaagattcctaactcatggttgtccaaacgtctctacctattacttgcaccacatagcacccgtgagtcacaaggactcattaagaaaagtaataacaataattatataattcactatacaataccaacaagtaaactcacatcatcaaaattaaataatcatacatacttatatatttaaatttaagtcaatacaaatttacaaacataatgaaagttaatataaagatatacatttatatacaattaccagtctaatgattgttactatagttgttactttataaagtaatcattctcaatattttttcagcaaagtaattctaatgcctcacttggcatactaatgtacttaccgttgtttaataaaatcatcttgatatttaaaatttataatcaagtgtactgtcgttgttaaattcgacaatttgaaaatcattctccactattcataaatctcattgcctaataaggcaagacgatgtgctaatctggcatccatatataaccttgtctaataagccaagtcagtgccctaacttggcacccatatatcacattacataatcaggcaagtcgatgccctagcttgacatctatatatcacattgcctgattagataagtcgatgtcctaacctacatccatatatttctgtcactgtctaattaaacaatcgataagtaggaaacttgaaaacattttctatttatagtcatgacacttttaatactaacccttcggtatccaaatattgttgcctaataagacaactcttttatcattgcctaatcaaataatctttacatcgttgtctaataagagaaccttttttttatcattgtctaataagacaacttattttacattacataatggtaatcatcgtatcttaatctcgatatcaatctattcacaaacgataataatcatatctcaacataacatgctatgtagtacaaaatacttttcttatcctaaatccagattcatacaggttggccaactcaagtggagaaatacccgacaatctcgatcctatatcacaataaaggcaaatcaataagtattaattccaaaatactgcctaatattcacataaaataatcttggattttctaccaaaccttgtggtaaaaataccctgaaataaaatgcctcacactgtagagctcttcacaagctttgaaacattgtatagaatgtctaaaacggacacccgagtaaaaagttataacgaaaatatgaaattcggtatttttcaaaaactaaccaaacagaatttcgattggtaccatctggaatttctgcttagaacagtttgaagcacaattttcctcaacttagctactaattttttaaaagaatttctagaaactttatagggcacatttgtaattaatttttatgaaagacatattattttttttttaatgaatattcataagctttattaaacttcaaattctgctaccaaacatgatagcagctcagttaggacattccccatactgaaattacatttaggatataaactagaagctcttgtaaaagcatgaaccactacatttgctgaacgcttaacaaaataaaaaaaaatattttatcacaaaatacaaattcgttgccaccaacattattgaaatatcaattaattcattgtctataattgaaaggacacgaatatataaattaattacaaccacattttacaatttttttctcaatctctgcattcgaaagtacatgttaaaatatttttaattttttttctatatgacaatgttcgttacagtcaaagtattatccctgtaaattttgaatagtttacagtatcgagaacaaagtttttgatatttcaatttaccatgtttttgacactgtaaactattcgaaatttttcaaaaatttaaaaaggtaatattgtaactataacgaacattgtcatacgaaaaaaaaaattaaaaaagtattccaataagtatttcggacgtagagattaagaaagaaattataacagaaagttgtaattaactcttttcgtatactaattacttaatgaactctataaccttaacattttcaatagaacatgcaaagttgatagtactaaatccagcagcatttgctattgcctgaaattcatgttggtttctctctttgcctcctggattttgacttaacataaccaaatctaactgaaaaatactcttagctttatgagtagtctctgccattattggaacaaccatatcaacaacaataacctttccattgcttggaatagcttcataacacttcttcaatattttcacacaatcctcatcattccaatcatgaagtatccactacaaaattaaaataaataaaatttacataataaatcaaaaaaatttaaaaatatatcaacaccgaaaaaaatttcatttttactgtttgaacttttttatttacaaaaatatactcttcagcaaaaataatatactattttttatttgttttatagttgtcatgatgttctttttagtttgatttatagttgtcgtgagattaatttttcgttatttttttttttgttttttactgaacaaagtgtatttttgtaatttaaaactttataagcgcatttttgtaattaaaaattttaagccataaaataaaaaaaaatagtatttttgaaaatttctcaaaaatatattcatcgaaatactaaattcaattatgttgttatagttttttttttttttat

SEQ ID NO: 300724 - DNA, 3442 bp, Cannabis indica
gggtaggcgaattttccctaaaggtgcaacactctggctggagaaaccatatacgagctgggggatttgagagggtgcattctgaaaaccacacttctgatctcttcttcactcagaatgttgcagattgcttcattctcctccacagtaacctgatctgaaaatagggactcgaaatctccatcaaaaattgggtctgcggactggtatagctttttaaaattactctggaagtaatcccaaatctgttcctctgcctaatccacaaacccgtggaagcttcaatgcaactgatacgatttcatctttgtcgaataactattgatgcgtgaaaaatttttgtattgttatctccaaatttcagccaacactccctcgatttttgtctccatattcgttcgattctctcctccaaaatctagaatttccaattggatattggcttgcttttcaagattttcctaagagataattgcttgttgaatcaggcgaagatcagttttaaggttttttagtctcttttcatagtagccgaaactcgaggcgttcaatttcttgagttatttcttcgtatatttcaattttttgcaaaggattgtgccctcactcccagtcgcttcagagttccatgctcgagagatgatgtccccacactccatggaagtactccaaacttctaggaactgaaagggatacaagagcttttcattatctcccacgacttttagcaagattggagcatgatccgatccatatattggcagatgcacaaccgtaaccctaggaaaggaaacacaccattgatcatccgcaattgctctatcaagttgtttgcggatgtggtgggaataagaccttgtattttgccaggggcaaggggcaccttcaaaccccaaatcaactcctcccgtgtttaaaatgaactccttgagaatgttaccttcacgtaattgatacggtcgccccccaagtttttcattttcatccataattacgttcagatcacccattacagcccaagcgtctgaacagagttgcactttttggagaagccaatcccaaaaatccttcttcatgattgcatagggcgggccgtacatagatgcagaacgggacccgttgtggataatctagaattgcgtttattttgaccttaaatcccatatcataaacctccatgatatccacttgcaccccagctctccaagctacacagaaaccgcccgcagtgcccaccgcaggaatacaacaagtgtttataaaacccagcctattcattaattgaaccatgaaagttgtgctcaccttagtctctgagagaaaaattagatccgcatcattctctcgaatgagtccctagagggacctttctgccgagggacgttgaagtcctcagcagttccaagataagcacctcattggggaggtgggggtatgcttccggccgcctcctcgccttggccaaaattctgaacataactgatttggacttcgatccagttttcaagcacatcttttaagttgccaatagaaatttgctgagccgatttcctcttgcttcttgttttaaccgttgagtttgcactttgcaatgctttcttttctttgatactcctcctttgtctactcttcttttgagccttcgaattatctccttcgttttcacttcccctagtgaattttgcatttgagtccaacgatagtagaggctctattcctgggatttgttctgttggaatttttattattttgcactgagagggagacggcacggcgttgtacaaagtgtgggccttccttttttgtgtaccaagtaaatgagtgattaactcttaaaggttagtagggttggatataattgtctgttgggctttgaatttgtctatagcatcaggcccatagagcttaaggaacatttcctgaagttaaggattgtccgtgggccagacaattggggtgtcttcagggaagttgtggggcctttgggatttacaaacccaagcatgtggtatttccaaagactgggcaattgaagggccaatatccaggacaccattctcttgccccatagcaaagtcgggtctaggtaaattcaaaaagttttgcccaatcgaaattggaacgttgggattcaaggggccatagcttcctgcaactctttccattgcccctctgccactcagtgtactattttctatagcgcacactgcattcgtacctgacggttcaccaacatccagcattccacatccatctttggtgtcctttgtactattgatcggagctttgtgtcctccagtaggtttgtcgcggcctcgatttcttcttctccaagtccccttcgtttcttttttctttttcaggccataatccgtcatttgattcaatctggagacgagtaactcccttaccagctgcaactaaacagttacttctatctgactccgtttttatccatggtccatacataggggcagcatcacccacctttggaatgaccattgccattagagagttgcaaattctgtcaaggtgggcgagcttcccacaattgaaacagaggtacggaagtttctcatacttgaactgaatcaacaaatcttcctttcctaccatttttaaggaaaaaccagcactgaagggatgggagatccacacatccacccaggctttcaagaaaccccgtctgactatctccactttttgcttatcatcagatttaacaaaggctcccactttcttagcaataataggagtgttatcatcggagaggcgtctcatagggaggccatggaactgaacccagaatctcgcaacttcgaactcagccacatttaattctccttctaatggccatggtctgaggttaaggagaaccccattcaccaaccatggcctcttctccattacaaaggtgcagtcctcctctaaatcgaagaaaaatcccataactcgttctccgcactttttcattctccagtatctcaaatttttccatatgcccaacaggatttttttaccaccgattgtggcatttctttgcaacccattacctttccaacacaagctttggtcgccaccacatcctcaagtgtaatgccttcgaagagttccagcatttccatctccatggcactatctcattccatggttttgctattgacagtgtcaatatggtccactctaatgtcgactagttcttgagactgattctcaatagcacttgaaaaaatgaaaaaacgcaacaagccctagaaagaacttagagtaaaaatactcagcctgaaactcagactagaaccgactaggagccattttccctcccgtcaatgagggagaagggtttgatgagagaaattgatgatgtgaggatctatagtagtttaatggagcaaattgttggaattattttaccaggatctagatgttggaaattatttta

SEQ ID NO: 300725 - DNA, 1022 bp, Cannabis indica
taccaaacgacacctatatgtttagtttttataccatgtttatgtttttccttcaatatttatgagtgtatatattatatttctgtcgttcttcacttggtttttaatttagttatttcatgtaatccattttttatttacttattttagcttactgatttcaatttagttatttcatgtaattagcttttgtgtgttaatttttaatttaattgctttacaaaattgatttctttgtctcagatttttttaattagctaatacatagtttcagtttctttaattgaatttttttctaattaacatgtttttttttgtgcttcagtttatcttttcatttacgtgttttatttatataatttaattttcttagcttatcgtattaagtaactggtttctgtacatgtttaacaattgtttctttttttcaattaataagttggtattaagttttaattttttatcctgttattttaagtaactaatttttgtgtatagtttctattttagttactttatgaaattagtttttctgtgtcatatttttaactagctgataaacgtaattagtttttttgtgtcagattccaacacgtctaacttcgacaacaactctgacatgtaactctgatgacttttcggtggtgatgaaaacttcgtcgacttttcgaacgattttttttggtggcgataacaactccaacgaattttttagcgacaatgacaacttcgtgactttttcaataacgatgaaaactatgtcgactttttccaggagctatggttactctagcaatttttttggcgatatttattcttagaaatcttattaaacatatttattgtatttcaatgtggcagattcccattttttttttaaattcctctaaagttatcatatttagtggcataagtttgtatgcccataaaaatgcaaagtgttataaaataatataaagtagatgagatgaaagaagaagaagatgaagagagaaagagaaagtgaatgagaatttctgagt

SEQ ID NO: 300726 - DNA, 2249 bp, Cannabis indica
ttgggattaagcttcatcccgtacttcctgactactttaaagcatttcatgagatcttctgcatggcccatacttgttttagatttgatcagcatgtcatccacatacacctccatgtttcgctccagaaggcctttgaacattcggttgaccatgcattgatatatggctcattttttaatccaaagggcatgactaggtaacagtgtacccgttgtcggttctgaagctggtacactcttggtctgcaacatgcatcttgatctggttgtatcctgaatacgagtccataaaggataataatttgaaacctgaggtggcatccaccatcaggtcaatcttggtagcagaaagcaatcttttggacaagttttgttaaggttggtgaagtttatacatatccaccatgtcccatttggcttgggcactagaacaaggtttgctaaccactccgggtaatacacatcacggataaaaatgttagacaacattttgtccacctctttctccagggcgtccgacttcactggatctaacagacgccgtttttattgaactggaggcatgtctaggttgacaatcagaacatgagtaatcatgtgaggacttatgtcggtcatgtctccatgacaccatgcaaacacgtctatcgataccttgatggtatcgatgatcttgcttcactcctccgggtcgagaccctttcctaagcggatgaccttagttgggtcctgatcacatattcctacctcttcaatatcctccattggttctagtacagattcagagccaatgagaggatccaacttggcttgtcccgacgaggatgctgcctcaatcccttggattgcaaaaatggacaggtgcactgtagcattataacactatcttgcctccccttgattaccttgcaccgtttctgtcccagctgtctaagtggaaaacttgaggcacagcacaagtgcctgatagacgtgactgctctaaagccgaccagagctggtcgacttagaatggcattgtaagcggtgggacagtctactaccaccaaggtacaatacttgaatgtactctgcggagtgtctaggcatagagtgatatggagtctaacctttcccataggaatgagtgtagtcccgttaaatcttgtgagttgtgaactactaggggagaggtctcgatcagtgagcccgatggtcgtgaaagcctctttaaataacaagttcaccgaactttcgttgtctaccaatattcttgccacaatcttgtttgcaattggggttttaatgactaaggggtcatgatacgggaagcgtaccaacttaggatcttcctctgtgaaggtgatggattgatcaataagtctcggccgttgagctagaagctgagtaacttcacatatctcaccatcatgctccaaagccatgtcacaacactttagctcatttctcgtggtccctcatatgtgaggacctccagagatcatggcaacccttccattcgttcagggaggtttttcgggcacctactgatggggtatacccccgggaggtatctgtccttctggtaccattgttggtccccccagtggtacttgggcttcggtttgtcctgggttcaggtgtgggagcctgtttttgatccattctataaatgacctaatcgaattaaattttcaatttcatccttcaatttttttcactcattagtggtgtgactgatatcattttggtagtcacaccttttactggatctctccagaaactatctcggtacaaaggaggaagttttcgataatgagtgtttcgtcgggtcgcgaagtatactcgttcctgagtatccacgagcttcgtgtactacaaatactaaggcgtataacctctcctttgcctcttatcctcaggtcgggtgctaccttttgaggatctcttgctctatgagctttggggggctcctgtcatacttgtggctggtgcagattgagctgggagttgtgcagtcatcccagaggtgggattatttgtgggcactccaaagttagattgagccagagcaatagtgaggttttgggtatatcctgaagttgctgaaaactgtactccgcttgtttggggcatgacggggaggatagctccaggaagttgcgttcctggcatttatcctagcccaccggttagatagtacccaccgtaagccactatctgtgcttctgccaagttgatgtacttttggacccttttttggaagtc

SEQ ID NO: 300727 - DNA, 1457 bp, Cannabis indica
cttattcattgaaaacattacagaagcctatactaagaacaatccccattacatggcaaaacaggagctcttcaatgaaaatcacagtaagaagaagaatacctcaggaagaactcgaaaatagtgcaggtctcccccaatgatttggaatgcccgaccatctttccagaatttgtcagcagaaatttcaaatttcttagcactaacctggtaaaatttcatgaaaactcttaggctaacagcaagtaataagaaaataaacaaattggccaaattttagtatggtcatgaatctaacgaaaagagtctacacctatgtatctttttcatttctcatcggagggagcttgccccctagaaatgagagactataatcaaaattgcacataaaagagcaacaaagtagacctctcaatcactagttttattcacatttggcttcctcaacaccatcgagcaggaaaacttatgatcagctaacgtagacaaaagatcataaaatacaagtaaagaaacattttttcagtgaggcatatgaaatgttccaaacccaagtgacccagaaagaaaaaccgaagaattacacggccgaaagaacagtttcagttcataattggaagaagaagaaagaaaaagacgactgacctttttaattggggtaggatgatgagtggagtgagaagaaagaggagggaggagagcaaagacagggacaaagataccgaaggctacaagagaaagaaaggtgatgaagaataaggtgagcctcgtggttcgcttcttcgccattgctgaaactttggagctccaaatccactccaactttttatgattgccactactaattttcattcagtcaaccccaccctttcctttccacctcacctcacctcacctcgccaaaccaatgaccgtttggcttagaataatctgtgtgattttccctttcactatttacttttcacatattttccttttgataaccttaatttgtacattttgacattttgaaaacaagatttttttcactttttttattaatattatgttttcattttaagttttgggggaagttttttgttggatttctccgaccatggcgaccgacaacaaaaccgataaggagaccaacaacagctatgatgaggaatcgagttctttctcactaagcaagtaaaatttctaataaatctttgaaggatttttcgccggataagtcttggcaccttaatatcaattatagagtgcataatatggccgggccgccattggattgcctttcacggcacggcagcgacattgatgagccaatttgccggaatgaatcctctgtaaatttgattcatgaaaagaaaaacgtacgtaaacaaccacttatagtaaaagctttactaaagtcttaggttcgaaccatcacctctccctttttcccactccctccctcaccactaagctag

SEQ ID NO: 300728 - DNA, 1407 bp, Cannabis indica
acacgctaggcaagtggggatatatttttccagtctctcctagcgtgactctataggttaagcgttttttaaataaaaaaataaaaaaaaatatatggatattattttttaatgacacttcaaatttttagtgacccacattataggagactaacattgaaaatttaaagtctaattatgtgtgtcactaaaaattattcataactatttagtgacccacacaaaatacgggtcactaaatagtgtcactaaaatgccaaatcgtagtattgttcatataataagctattttaattttgtgagtttatataattaataatagtattttctttcttattaaagtaattaattggatataataattgtcataatttagtaaaataatgagaataatttattacataagaaatgatgtaatcaactattatactaaaacgtgattgaaattaaaattaaaaaatatgagaaaaacctgaaataataataataataataataaaagaattattgcatttaaaatatatatatacataaaaagaaagggcccaaccgggttcgaaccggtgacctcttgatctgcagtcaaatgctctaccactgagctatggaccctatgtaataagcttgttctttttcttacaatatatataaatcattattagttttctctcgcccaggaaaaagctgtttcatggtcattatgttagtaagagctccaactccattaattgcattcatgcaaaaggctcttgacaaacttgccgcctagtcagaaattatactagtaatcacatcacatgcaagattaccagggaacactatcacaaaatattatcttttttctcaaaatttaattcaactaaaacgtagctatatataaataaatgttcatccaaatttgaccatataataaacttgtcaattcaattgttacgtgatgccctaaattaaaaaagacacaagctcattaatgtaagaaacatgattacatgcagggatcaacgttaacatcatatatattattaagccaaaagattgaatgggaaccgaccacgaattgagccgtgaagactgcattggatcgcttaaatagtattcttaccagcctctttgaattacaacttggaaaatgacagtaacaacgatatcaccatcacaaatgtgatctccactgcaaataatgccaatgctattgtcgtcttaagcttgaacaagactttacgcgaaaattaaattagacatttttaacaatattattaattttatggagatttattgcaattttattttcagacatttaattttaaattcttattattaagatttttaatttttatattattcttcacatgttaattgtttttttttttttcattgaatgaattttaattcatttataaaaatctt

SEQ ID NO: 300729 - DNA, 4352 bp, Cannabis indica
tatatctgttccagcattatagattataagctctggatcaaatgcgtgtgcagcaacctaatgtggtggacatagaagaaatccctcatttccagatatgataactagtaccaaagaaaccactttcatacatgtgacaaagcattattataatgactttcagtagtcaaataaagataaaaagacaatttaagattatgtgattatatctcttaaagataacatcttatatgctctaaaacacatcctttcttgttactttgctgctttgtaggcctaacatattgaactttgctttcacttaccacctaaaaatataaaaccaaaaataattaaacaaaacgaaccatcccgtttacaagttttgaatgaaaaagatacatcgtttagaaaataaaatgactggtcatttgtttcttcaagtagaataatagcaactaatgttgctttacatgttaaaatcattttcattcagcttcaaaagtgactgcttgtttgttgtattaaaaataacaagaacaaaaacaatgatttcacactcattacaggaagcagaataacaacgagagtactgagtgtgaaaatcaacagaattcaagaaacaatgttaagttacacaaggagggggatacaaatacataagcataaaacaggaattgtagcacaatatttgcatgaatcagaagagaataaaagtttaaaagctttttacctcaagtgcttcgtctaatttttgcaagtactcgtgtgttctagtgccactctggtcaaaattcatgaaaagcatcaatttattgtggtgcaaggaagatacaattacaattttcttgagaagatgagatattaatcacttaccactacttcgaccttctgatcaatatatctcctagcctcataatccttataaagaaattaggaagggagaacaatgttaaagaatattgtaattttataaaggcttcaaaaggattcaatcgagaaggcgttttttcggtacccaaaatcactccctaaccccagctctcattacatttaaatcatttctgaaagaatccatagaaggagaataaaaagcaggtgacttaccaatggatatattccagggttgaacatatccagaatatagactcgacctgttagaaaaaatgaagttatttcggatccaaagagaatcatataaagctattaagggaaggatgagagtaaaagtaaacatactgtcattggcaaaatctgtttcatggccatttccttgatgtgcatcaagatcaataatcatcaccctgaaaaatttggagactaagaccaagcccatacttaaaaaataatataactcttaagtgaggcatctgttactacctagatacgtttaatcgaacaaaggcaaaatgaatgcaaagggtaatgtcagcataaacacaaaatccccctcctctccctccacaacaatgatgaaaccctcccccaacattgatggcccatccccgctcttttgcaagctttgcagccacaatagtacctccaacctgcagttaaaacatgactagacaatcttctctattatcctttcggaaagaatggaagaaaacaattcaatagcaaaaacaggtctgaagaaaaaatcaaggctgaatgacacaatattattacctggtttctgaatggatgaagaactttctgctgcacaatacaattgggaaataatgccacaggaggtacctatgtgatagtacttaaaatatgtaaacaatccttgaaacatgatcaaaataattgttatgaagggaatgatatcacctatgtcaataacataatctaaacaccagaacaatttgaccagtaacaacaaagtataaaacaaagaaatggtacaaaagatcgaagagcagggaatgaacaatgagacttaatctctttattgaaagaatgaaaaatctgagaacaaaaacaatggagtcaagctcctcacatgaaacctcagacacatgtgaactccttatacaaccctccttcctacttttgctctagactaaaaactcagaaaacatttgtattgataagactaagtaacagaataataactaacaaaactgttttttgagacaccaagccgagtaaataactaaaatgcagagtaggttgcatagtcatttagctaatatgataggtaacaagtcctcttcaagataggaaaaatttccaaaatacacttctcccaattgaaccaaaaatctattttctcattccatatccaataatagctacacaattacatatatatatatatatatatataaatatatagattttcacactatttacaaattactaataagcatcacactatttgatagtgtaacataatatgtgagtaatcataacacttacaaaaacaaatatgagtattcaatacagaaaatcaaaatgcattattacctcaattatcatggcaacatttgcactatactttaagctattcaagtatgactctgaatgaacctgttcaaatcaacaaacacccacttccttcacctcaaacatttacacaatttctcaaaaataaaatgcttaacaatctaaaataccacaaggagatcattctttgaagcttccaatggctcaacaataccatttttgtcaagaacaccatccttgattaaaaacccacatattctaccccacttagcagaatcaaatgggtgcctgaaattcaatcacaaaatcatatatttgtcctttttcttttcttttgagcaaacaatgctggaaattttcacacaaaaccctaatcttacagcttttcaatgccaagaaatgagatgtcatacttcgaagagtaaatcaacggtacctgattcaatttcaaaaacaaattcagcataaaacagctcaatttattgaacagagactcaaattggaataccttggagattggaacatcgaaatagagcttgctagagagaatacgctgtacggcgtcgtttggagacgaagaagaagacatagtagaatttcgattgagaatttgagatagtttgaatgtaaggaaggtgatgagcaaaagaactgttgatttaactgcgattccgagttgactcggccaaactcggtcgtacttgactcggcagtagttcatctttcatcttcttcgactcagaactcgaattgagttgactcggtactctactcactaccgagttcaaagaaacactcttttacagtttgattagtgtctaaaaaacgaagcaaatgtaaaattatagcaattttgaaatttgataaaactaagaaagcccagcccagcccagcccattacaatgatttcctctcttatatttgtacggattattttagaaatacaagaataaaaaaattataaaaataaggttgtactaaatttcatgtatttttacggtttttatgattttatttaccgaaagtacagtgatttaatatttttatatttttaaatattatactcttgtttgtattttttgttatttgtatgatgttttgatattatttgaaaagtttattttcttgttactttcatgtgagttttttattatttttgtgttattttttatagtaacatttttgaaaatgtaaattatataaataaatatttgactataaaagtgtataaaattgaccaaaaataatattttgtgtaaattttcctctattgtattaagggcccagtacctacttttgaagagctccttcaatttttgtacgagaaaaatacaaattttatgggttcttttacaatatataacattataaattagaaaataatttgattaaatagacgggaaaattacagtaaaagcccttaaaaaatttattttgatgcaaataagttcccaattttaaaaaacagcagtaatagtctccaagattgagattcttataagtcggttggtcctctttttaacacattcgttaattcttccctaaaatgtcacgtgttgatattattatggcataagtccctaaaaaatttattttgatacagataagtccctaaaaaaatcagcaaaagctaaaagaaaaaaaaaagtttgtttaagctttaataagtaaaatagtaaaatacagtttaaaataaaaaaaaaaattaaataaaaaaagtataaatataaaaaatttctattatcaatgtataaatgtaaaatttaaaataaaaattaatatttagtgtaaatttctcaataaaatatagggtagttctacaatggacactctaatattggtcacaaccatgcacccttcaaatcttgaatagtggttggttataatattgagacacatgctattttagtggattgtcgaacatagaatatttattc

SEQ ID NO: 300730 - DNA, 3061 bp, Cannabis indica
aagtatatataaatattaatatgttttgtaacactattatttttttattgatatttttaatattggaagtatgtttaattttaatattcttaaattttatattttttttctcaaactattaaaatttaaatattatttttttaaaaaaaataaaaaactaataagtaatttcctttaatttataaattttacgtgcatagcacgtaataataacctagtaaacatataattataaaagcttacataaggacataataatgtaaggtaatagttcaagttattaaaaacaataataaaataatggtaatagtttggggtccaaagaatctaatttactttaataaagtatggtttttttttttaattaaattaattctatatataagatacatccaatgcttctacgaaagtactatatataattgaataaataatttaaagaaatgatgtcataaatcatctataaatttaattaagataaatatactgtaataagttacttttaacaagataaaatctgtcttaaataactacaaggagtattttcaaaatagtattttttttttttatgttttatatacaattttgtagcctaaaatttttaattacaaacatactcttataaagttttaaaattacaaaaataaattttgttcagtaaaaagttaaaaacaacgagaaattaacctcatgacaaatataaattaactagtagcggattcaagatttaaaatgaggtgggtatagaatttatacatatgaagctaggtatagaattggccgatcgagagatattttcacatttggattttatatatttatttatttttggtttgaatgtaattatcttatatttggaattttttggttttgtattaattttaagaagcttatttaatataggttgtaacttttatataataaacatgtaattcttttgataaaaaagacatatgtataattataaaattatcaaagattatagcatagggccacttgaacttatattatatcgaatctgattgctttatgtgctattattgttttctagacattattgttacaaatgtcatattttaatttgtatgatttttttttaatctctctcccatttttgttgttctcttgctaatgtgttggataagttggctttggtgtggctggtgcctactgcctggtgagtttgatagtgtgactatccttattatgttaattttgtaagagaaatgttaaaacacagttgtgtaacacttttttaagtgtgatattattattggtacaattaattattaggttttatataatttaatttaataattttaagcaatattattaagtaattgcaaggtaccacttataacttataagtgatgctttgtaatgattttttttggctgaaagttatttttgtaatgattgatattgaacaatatcaatgacattttggtatgatctttttctgcttggagtttccgctcattcctgtttttatatgttatagatatagtcgtagttagtactataaaacctagttagtactatataaacgtgtatattgaatataatgatggctgtatttcttaaagactaaataatacctaaaatcaaacttaatacaaatctcatagaattaagccatatataaaaaacaatatatatatatatataaatatatatataaagaaaaagcaaaatccagcttacattactcaattgcattttatgtgatgaaactgaaaattattaactaattatatatagtgaataattgtttaattacatcatgactaagaaactacatctctacttaatataatttgacgcagtattctcagccttaaaattgatgtgtgaggttcatagaatcatttatatgaaactatgaaaactaaaaaccccaacactactcattaatcagtaatctatatatactgtatatatatatgatatatattatctatattatataaatactattagtactacttagtcctaatccacgtacgagctcttagcagatacatgtttcagttgcccagagaaaaattatcttcaaaattttctctaccatatatatgtagttttttctttgacaaatttctcaaccatatattattattattattttccatatcgatgatcagtatatcaagtcctgaagtctctgccatacccttgaggtctcaactccaaccctagaaagcttcacctgtaaattaataatttatatgtgtaaatattaaaagaaattacgcacatttatatatgtgtatatatatgattaatgatgtatatgtgaggattatgtacctgggcatgaagtgtgtggaaaattttgtcatcaacaacagaaagactagcactgacaacttcagctccttcttgctcaagaacacttataatttcatacaacatgaaattcttatgtaatccacttatcaaaaccacttctatgctacaacccatgtcctttaactcaattacaggcaacatcgtcatcttggtcgtccttggtctcatcgcatcgtctaaaacgacgtagtttctattaatcatcatattattattattattattatcaccaccactactgctactacaaccaccactattaatccctacttttgatgctattgacgacgttggtgggggcatcattattgcttcttcctttcgcttctttaacttatctattctttctctcaattgggttatatacgatgctgcaagatctaactgatcttgttgagtcaacatttcctatattaataataataattaaaaccccatgatcatatatataattaccaaaaaaataaagaaaaacaatatacaaatgtataccttagggtgatgggaagggacgagggaagcaagcttaaagcaaagacctttcatgtgaattcttctgttcttctctattgtcttacggtcaagcttattagacgacgtcgtttcaccggaactcttcttcatcctgaatataaatatttttccaaaaaaaggataatcatcaatatatatatatttaagtatagggagtgagagagagagagagaga

SEQ ID NO: 300731 - DNA, 1400 bp, Cannabis indica
acttatttttttttcatatttattttcaagctttatgatatttttgacaagtattgctcaagctttgctgtatttgcagtgatagtttaattattcaatgatcagtccaaagcgcagaaattgtaaaaaccgcaccgcaccgcagtattttttgcggtgcggtgtctacgattttttagttttgcggtgcaggtgtggtttgaaaaattagaaaaattgtatgagcgggttggtttaaaaaattggtcaaaaactgcaccaatcgcatcgcgaacactcctaatgtgtagtgagaagtatgagattctatatcttagaatcaattactgagattataaagtgatcaagtacctcatactactaaattaagttgcaacatactatcaaatcaatgtaatagtctttaataacttttataagaagggtgcttaattagtatttaaaataacaatagagcagtgcagttgtggatgagagtgtttggttttggcattatataattggtgattaatcaatgaggagtatatttatgcttttatagcttgtttggccatttaatagagatagcttgtgccttgtaccatcacataatttggataatgattttgggctataatattatttttcatatattgactggactattgatctatattatactatattttaattattagtgaatatggttatgatgttgtcttgattaaagacattattattagttggaagtagtgtgttattatatattactattctctcaaatatccaagaatgtggcagctctagcaaaataatgtgatatgaactccttatttattgcaatagagggattctccttgtttataatttaagagctatatagaatcagattctagtgctgctgaaaattttgtaagtgttaggtttttgataggggtgttcgcggtgcgggtggtgcggtttttgactattttttcaaaccaacctgcacatgcggtttttcaaatttcacaaaccgcacccacaccgcgaaattaaaaacccgcaaaaaatagtacggtgcgatgcggtttttgtggtttatgcggtttggactatcactaaataatttaattttcacaaatacaacaaactttgagcaaaacttgtcaaaataccttaaggcttgaaaaaaatattaaaaaaaaaattaagtgtcaacaatacaataattagtagactttaagtttttcttttgaaagaatagtagactttaagttgaatattcacatattggacctaaataaatataaaaattaatatttttataatatgcggtgcggtgcggtttgaaccgcatatattaacaattcaaaaccgcaaaccgcaccgcaccgcgcggtttagaaaaaattcaaactgtgaccgcaccgcaaagaatt

SEQ ID NO: 300732 - DNA, 2301 bp, Cannabis indica
ccgaaattgtattttcaatgttgatttattttatatatattgaatagagctgtaaatcttgttttcgattgatctcattgaataatttcatgattgtttgtacaatgtatgtgtgattagaatggtgttgctccttattttggaagcattgttggccgagttgccaataggatcaaacatggaaagtttactctgaatggagtggaatactctctaccaatcaacaaccctcctaacagtctccatggtatgaaatttcatcttattttgttgtcataatattagtacaattctagctcataaaacacaaaaccttacatgaaatttctatggattgtatcaacaattgattggttattagactgaatccaataatggttacattgagttgattcaagaggttcccccctttcccaataatcaaaataactcaccaatacaattctcagtcccgctcttcagtcaatctcggctacgcttatttacaaacccttcattactttagctacccttatctaagggcaatcaacaactaacttcctcacagaaaaactatcaaaacagagagcaaagcttatgtgcttatcatgttcttcggtatgtatgaaactatatactcttgtaaatttctgcagacataataaatttaggatcttggacaatcttgtattctatttcttatagttgttttacaaatatctcaatatggttaggtgtaggattgcctgtttgtttggattagtttgcctcaaatggtagaaaattattttctgagcatcatgtttttcgggatattcctctaagaccacattactagaccgaatgattggacagaagctatatcagaattttaattgtgttttgcttcagttaggtcttctcaattgattttccaatgtgtactgttactctttactgtgtttaggtgggaagaacgggttcgataagaagatatgggaagttgttgaacatgaaaaaggcgaaaaccctcacattactttcaagtatcacagttgtgatggcgaggaaggtaaaatccatgttttttcgtgttttaatctcgtttctctatcactttaaccaaacccctttaatcatttttgtgattttcttggttgtaggttacccgggagatgtttccgttactgcaacttacacacttacatcaagcacaacattgaaacttgacatggaagcaatgtgtgaaaacaaggccacaccaatcagcttagcacaacatacctactggaatttagcaggtcataactcggggagcatactggaccataaaatccagatatgggcgaacaattatactccggtggatcaaaccagtatcccaacaggtgaaatacttcccgtgaaaggaactccctttgatttcacttctgagaagaggattggtgatgatatccaacaggtcggtcttggatacgatcataactatgttcttgatctcggggaagaaaaatcaggcctgaaacacgctgcaaaagttaaggacccatcaagctcacgggtcctcaacttgtggaccaatgctcccggggtgcaattctataccgcaaactatgtcaatggggtcaagggaaaaggaggagcggtttatggaaagcattcggggcttgtttggaaacacaaggtttcccaaatgcaataaaccagccaaacttcccctcggttgttgttcaacccgacgataagtacaagcacaccatgttattcgagttttcggctgagtaaagtgtctaagtcttttcaagtggctgtctaaaatgatatttctctaagtatgaaatgatgacagttctatatacttatttgaattttctaatcattctagtcttactattattgattgattgtgttgatgagattgccttcttgttcataaataatatttcatattctaaattttattgtcttagttatgaacagccaaatgaaccgaattcttctgtctctatcctagaacataggctgtgagattatgttatatgagttttactatatatatataacataatattattttggtgcaaaaattataaatgtggagattttgtaatcaatgggaggtggggacattaatagtgaattggggatatttttaattttattctaatattgggaaaataatgaaataaatagatagtaaaggttaataactattgaatttattgtttttttttacagatagactccaatatgaatggttttttaataaattaaatggctaaaataattagaaggttttagtattggttatgatgttgatattccaacccatttatatagata

SEQ ID NO: 300733 - DNA, 1919 bp, Cannabis indica
gtattggatgtttatataggtattcttaaaacgagtgaaatgttttgtttattaatattatggaagtttccacaaacctccaactctctcacctattattattgaacctttcaattaagctttcccacttgagaggaaattatttatgtaatgggaggccacttggtctattatgattcttattgatcatgcatttttacatatgcatgttgaaagagtctaattgtattaatattggagaaaatagaccataatatataaatatcaatggattcctaatatcatgaatgattcttatttagtagttgttaatttctatactaagaaaatcgtgggagaaaacttagtctaacatgtacataattatatataatatatttatctcatttggacatacattttgatttttgaatatttatttttgagtaataatatatgcacacacaatatacattttaatttaaatgaataataattaagaaaatttacatttctagtattttttgtgtatatatatgtcaaccattaattattcaaaatagataaagataaaaaagaaaatcacatcaattaattattattttctgcattttctttttctttttctttataactaagtaacttgaacttgtattatttcatttcatatattcatacttcttatgataaacataaggatattattaaaaataaataatattaataaaaataaggataaattcgttaaatcaaatctttttgttttggtagaattgctaaataaaatcaaatcacaaaagatgatgtatatattgtattgtttggtgagattattaaaaaaataaagaataattgactatttcttaaatttagaatatttttatgttatttttaacaattgtgatgatacaactaatttcgaataaaatatataaacgaaagagttcattttcaacaatgatgtacttgactatccaataataacaatattgtgtttattttatgttatcattaagagagacaaagtctaataataataacaacaacaacaatgataaaacatattataaaaaaataaataaataaaatgtttaactattcaaccttcatatataactctaactatatatgtcggtgtataatttattttctttggggaagttctttcttctattttgtattctctcaaatatttttgtttgggagtgtttgtgatggggtgtagtttttgattaatttattagatcgtactgtatattatgataattttttaaaacggtacccacaccaccacgtaaacttcaaaaccacactacaagaatacaatgcggacgatttgcactaattaccaatttaataaataaaatgtgtaatttccattaaaagggaatttttatttttatgatttttttgacaaaagtttacaaaattttattttattgggaaattttttttaaaaaaaaggttaaaaaatatgagaaaatcaatttataaggtaacttgggtttggggtcgtgttcggggcctaggtgcggggcttaagcctatgattggggtccagggtccatctgagggtggggttggagttcggactcagggctaaggtcagagacaaggcccaggatcagagcccaagtcaaggtcagggttcgagctcgggcccaagcctgggtttagggttcgtggccgacactgaggctggggttcaaggtttaaagtaggggttagatttcagagtcgaggttgaggtttggcttcgcggttcgagatttggggtcaggatcgaagtcgggatcagaattagaattacatataggtcaaaactaaacatagtattagtattgtattgtattatattgtattaacacaatctattaatacatgttaaaatcaaacatagtattagtattgtattaacataataaaagaaaattttacat

SEQ ID NO: 300734 - DNA, 2738 bp, Cannabis indica
attaaaataaatattattttactaaaataatgtatttctctctttaatattatttaagaataatattacatttaactaattaatatactaaatagttaaataccactttattatataattcataattgatataattattcaaaataatttccacaaaattactatttctgccttaagaattatttctcatagaaattaaatctttctcaaatttattaatcagtttaaacattcccctatacagtgttgtatagaggtgatttggggactatggacatatatttcaaagtttcaataaatacttgattattattgaactcatcaatagaataatctcatcaatagaataatctggtttattaattctattaaaacctcactataaatatggaattgcactctttgacaatatataatcatatttacagaattcttacttgtagtctattaatataatcaatataagtagtttttcctccaattattagctcataattagagttggtcaaaattatttgttgaccttaaaaattgccaactgactcggagtttaataaacattgagtaatctgcaattaagagataggaataataaataaatcgaaaaaacacacaaaattatagaggttcgacccccttagatttgggtaaagacctactccccttttagttgtattgattatgtgataatagcatgcagatcactaaagaagacacaacaaattctagctacagctctcaagatgcttttagagaatatatagcaaagtgctcttagtgcgtgattatgattttagatcctttcccctatgaattcatttactatttatagggggaaggttgttacaagtgacagaatgtaaatatccctatattttagggtgcagttacgatctcttgaaacccctacaatctcaagtagatcaatcggatccgcatttgcaaaatacaattagagatatttatggaagttgttgaagaagaaatcaaagcttctgtagctttatttaacattcctagcgtcgtttttccagctggccgacatattaacaattcggccaggtctttttcgagacttgtatttcttgagagaatacttgtaaaatattcttgtaaggtgagtcaatcttctctcctttggttgacatgttgatggccctgccagatgcttcttagaatgcaatcttcatcccataaataccagccactataagaaatctaactttcacctacaaatatttttctacaaatatatatttttaggtaatcataagttactaataattattttcatacggagtttgatatatttgttattaatatatgtgtagctaaataattttttataggtgggaatattattttgatttggagccaaaagttagcgcccaattagttatggaaaaagatattgccgccccattgagtagtgttttagatttatgaattcgaagagtaaatgcgtgaagcttggtctgaattcgaaaagtcttgtgtggaaaactttgacctgagggtgtttccaattaggcttgtaccacatatgaactgtcactccagatagcttaccactagtccaaagatgcactttctgatagcttactgccagtcttggttgttcatccgagaaggagcgcttatacgtatccagatagcttgtcggtataaagcttccggattgtttgtactgaatgcgcattatcaaagttgacgtggattgttgttgctggtgatgagttggatcatttaaggcggtgtaaatgtgccacaatgattttagagataatttttggcaacaattaatgtaaatctataaatagctatcaatctttgtaatctgtgagaatcagaccatttgttgctggagtgaaaatcatgatagtgtaaggttgagagagagagtctaaactagagagagaaatatttctcgtaatctctgagagtttgtgaatattaaccttgtaaagactaatttcaataaagatatggttgctgctctttcgaccgatatgtaaggcattgcatatggctcgaactcattaaacctgttattattccattctgttttactgcttaattcattgcttaaattctaagatctcttgatttattggttcttaattgtgtttcgtgtttgttaatggttcagtatactaaattgtaagttattgatagtttccgtttcgtacaacaaacatgatatcctagtcaccatttaatggaagttaatgattgaaaatgattgtattataattttagtaatttttggtagttttaattgtcctatatctattgataaaaatcctatttgacctaaaatcgttggatgcgagaatattgataatataattctttttttttttaataaaaacgtatattttatttttttttattttgggaaaggaaattaggactttttttgtgaggagaagtatgaaaccattaagctatgatatgtctatggccactagaagtatatattagttaggcctttatttttttttaattaaaaaaatgtataatgtataaaaactaataacctcgagcaacacttcattctaatttagaaaaattacataaattactaattttggtaaaaaaaattatacttttaccttcaattttttttaacaattttacggtattttataaaaacatataaaaacaacaaaaaaatcacattaaagtaacattacaaaaaatactactttaagtcacaacaaaacgtgtgactaaaa

SEQ ID NO: 300735 - DNA, 1802 bp, Cannabis indica
tatgtaattatcccttaaaaaaatttagcaaaaatctatccattctctatctctattatagagaattttttttgtatagttggaggtttttttttttggtctcactctctctatttcaactaaagaatgtgtttaaagaacatggttatagattctcataaaaaatcgagatccaataatgagaaatgctcaataccagaagcacacctcaaagattttaatttttaaccttgaaattttcaaaaccattttccaaatccatgaaaaattcctaattttgattttaaaagaacctcaaaaacccttaaccttaaaaatttagattagaaaacctacccctacaacaacaatgataatattccatttcccccaacacactttattttcacttacactccaagccaaaagaaaacaccaaataaaacattgaagaattaagataatgaataagggaataagataacattttaatgaaggaatttggaaaaatgcaaaatatttaagattttttcatgaaatgtgtggtgtgtgagtgtgaccattgcctttttcattttcatttatcataatattataatattagtcctattcatataataaatatatatatatataaattataataaatttggatttttcttccaacaaaaatattggtatagaattgtcacgtgaaattatattctagctgttgttcctactatgagtctatgaatggttgattggtatttattattaattaatcgtgtaattcgtaaataataaatattttacttgtataaatagtggactggctttgatagtttattttatcataggataacataaatattttgttactttatttacacacaaacaaaaaaaatagttacaatggaagtagtgagagttcaaactttatcatcctttgaagaaaaggagataccagaaaagttcatccgacctttaaacgagcggccggagaacagtaaggcaatagaaggtgtgacagtacccgttgtatctctcactcaaccacatgcatcagtggttaaagagattgacactgctgcgactgagtggggattctttgtgatcattgatcacgggataccaactgagttgatccaacggttgaaagaggttggtgagatgtttttcaagttgcctcaaatagaaaaggaatcctatgctaatgatccaacggttgggaggtttgaagggtatggtactaagatgactaagaaccgtgaagagaagttggaatggattgactacttttttcatgttatggctcctttgtccaaagttcatcatgaattttggcccaaaaatccttcttcttataggtaaataaattaatgtttcataactatttattcaagtaatagtaataaaaaaattccatagtgtacatatttatatcaaatcataaatattataaaaaagaaaaatgtgaaatttaattatttccaaaaatatgtgagaaatcaataacaagacgaatatatatagagcaagactatggtaagttccctaccggtaaggaagcttttttgaccattgattttagatgatgtggtcattaagatataaggtgtatattcttacgataatgcttgtatacaattaaaactttatatatattataataatatttaattatatatttatttaaaaaataaaataataattaataattaaaattttattaattttttatttgaaatattattattttttaaaaaaagttaatttaaattgtttttatataagtatttatttttttaaaaaaaaatcattttacttacaaattttgctaa

SEQ ID NO: 300736 - DNA, 2187 bp, Cannabis indica
tgcatatcaagatgattcaatccatatatattgaaaagagtggtgttaattacaaccttctaatcaatctgcaggcctgaaatcatatgcatgaatatttttttttcaattttttttatagcggtatgcgttatagttataatattatttctgtaaatttttgaaaaattataaatagtttacagtactaaaaatagagtttttgatctttcaatctatcacgaatattcaaaaatcttcaaccctattttcagcacggtaaataatttaaaaaaatttaaaaaatttactgagatgatattgtaattataccaaatattgtcataaaaaaataaattctaatacatattttggaacccagagaagcatatatgagtagcacgataacagtcctcctttaaaaaaatctacaaatatatgagtagcattatatcaggccataaaacaatataagttctattgtgtgccaaattatttcttagaatagacctaaaatttttgtcattatcgaattcatgtcatttttacttaggcgaaccattttttccaaaaattatacaagcttgttttcttatacgaactcgaacccatgttaaatttataattaatgaggaatattatgatcacacttacaaatcataaacacacattattttgagtaagcaaatttcatctttaaccaaaaataaaatccacaaaatacaacaccaaatataattctataaacttaaaacctccatattcctccccataatactacacctcatcaaacttccaactgtattaactaacattttagcatccttccatctattaccatccgctaatttcttatacaaataactctcaaacgtcattctttgcacatactcatccccacaaagctctaccaaagcctcccttgcagcattattaccataaaacactctttgcaacaaatccaaaaacctaaatgttgttacatattgtctatcccattccttcaaataattcctttttaaatcttcttcttcaatcatcttttgaccgcgttctgatgccctaacaattccttctccacacattctacccgatttcgcagcaaaataaatcccttctcccgaacatttagtcacgtaccccgccgcatcgcccacgagcgccactcgaccgcgaactctcaccggtcgagggtgctcggggatcgggtgggcctccacctttataaccttgccaccactaatcttggggctggccctttccctaatagccctttgataggccatgatatctttcttggcccgcacggtacccgtacctactgccacgtggtcgcatttgggaaatacccaagcgtaaaagtcgggcgacacgtcgtttcccaaatacatctcagcacagttctcataatactccattttatcgtccggcaatctgatcctctcctggaacgcaatggcgctgacgtaatcaccggcgccgatcgacttcgcgactcggctgtttgcaccgtcggctccaatgacgacgtccaccgagagccgttcccggcgagcctcgccggtggctacgtagtttatgacgtacggcgcgttcttcgaggtcggaacctcgagactcgtaacgaggccggagataagggatgcgccggctgactcggcgcgtgagcggagaaacgaatcgaggacctcgcgacggagcattgctatgtactcgttggggagcagggtttgaccgaagtcaacgacgaggtttgaaggtgagatgattttcattcgggtgacgcggcggtcgataaggtgagatgggatctgaaactcgtcgagcatacatagagggattgcaccaccgcaaggcttggcggcggaaggggctcgttctaagaggaatgtctcaatgccaccggaggcaagagcttcggcggctgaagatccagccggaccaccaccgatcacagcgactcgaagcttacggccggagatcgatggcagcttcaccgagttggaagccgccatgcgagggcggtgggtttgaagcgagagtgaaaagccggcttgtgccgccatcatggtggattagttagggtttgggagtgaagagcttgagtgagaaaatgccaatgtaaatgaaaatgaaaatgaaatggtttgtttacttttttatttggttcgaaaagaaaaagaaaaaggttcgatgatttgaaagcat

SEQ ID NO: 300737 - DNA, 5102 bp, Cannabis indica
gggcataaaacccaacagtggttcccttagaacttttctatcaaactgaatagtgagtctattatagtcgaatacacaacttaagactcaatattcgtcaaagttgttgcacttgaaactttacttcactgatgtccaaccttttacaatgacattatcttgcaagtacccttgggtacggttgcccagtgttttgtttatggcatggaatctgcaaggaactctacctttccttggagatttagcccagtacgtggttcgtataggaactctttctggctcttctctagatgtacaattcttgcaagaccttcgccttatgcagttgaattaattttttattcatattcagccttgaggctttcatgttctttcttttggcctataagcattgtatttttgaacactactactgtttagccttaaagccttttactatggacttataaaaaatataaggtcattcaaatagcctatattacaaaaaaaaatataaggggtttcagagtacacgcgatagaaaagcccaatagagtagaaacgcaattcagaatagattagatcacagaacttacaagaacaacaaaagaaagataagtcaaattatgtctggaagaagaagaaacatgcatggctaagtaccttcgagatcatgaagatcttcggtaagaagaactttacgaaatccaagctcgaattatcaaaaatcatttcctcaagtggaacaactgacatcaattacttggtcattcacattagaaatattggaaagaggagcctcaatagtagaagagggaacctaattattaaaacgttttccacctttcaaaacacaagagataagacatatcatttagttcttcttctatcatgataagagcagccgatgatgtaaattttctggcccagggatctcctcatttcatcaaaattcttaaatggtcagaggcatagttgagctgaatgtagtgtttcccaaggaagacaaataattatcaatatcatagttcccatatcgaatatccaaggactcttagaacttgcggaacatggcgatacattcctctgtaggtgcctcataagatgtaattgtgtgcatatgtgttgcagcaaaaacctcaactacacgagcaataatcttctggatcttcacccattcttcaagtttcagtcgagtgcattcaaaatcaaactcatctaatgtctagtattcaaaaagaagaaaattgagtgcaaagcaacaagagggaaaagatcagaagaacttatgaaaagagaatacctccttcttcaagtgtgaaattttttcttcccactctagcttctctagaagggactggctaggagtgaaattgttcggttatggtaagtttttacaaatttatagccgactagttagttacgatttttattttacaaaaaccataactgattatttagaaattataaccgtataaaactaaccgtacggtttttagcaatttttagtggttttttggtttggcaatttcggacagttttttgttggttttgggcagtttatggcagtttttagcagttttggtagtttttgtttaaccatttttttattttgaaaacttaaactgaccgccatatcaaaaaaactgtaaccaaaactgaccgccaaattcggtgatgacgtggaaccaaaaattcggttatggtctggttatagtttgatggtcggttctgattttttagtttttattaagacccctagtactggaaaactaagagctgctcaaccaacaatttcttgtgagtttcaccaagaagattgtccttgtgatattagcactttgatcattagagagttttattaaaatatttttacttctcatttctcttttattaaagaattatctaactcttttatggtttgatcactcttttgaagcttgtcttctgctaaataaagagtgtgatccttctccttcaattttctctcagtagcctctaaatgctcattactctcttgaaatttcagatcaagattagtgaccagtctctgaaacacatagcaagttatttttcagccaactcaagtttataagtgagctgagaaatctttaggttgagagcttcacgttaagttgtaaagtctgataaaggactgccaacaagtgaaaagagcttttgaccagaagctaagttctcattgagtaaatcatgaagactgcgttctacaatttcaaaaagtttcttggtctctgccttgaattttttaagcatagaaggatagaagggtctaacttttgtagactagatgagaaccaataaacatgtcaatgccgatgacaatgaaagagaaaaaattgaggcagaagtcatcatcaattaagaattagaagcaaaaacccgaggagaaattgagggatcagggaaatgatattaccaaaagagattggttaagaaggttttataggaaaaggttgaagcatcagagcaacataagcagtaatagaacctaacagatttacaattgaaagaggattggatacatcataagaggagcaaacaatcttagtattgcttaggaaaatggaagatgttagtgaataagaggagataaaaatgttacggatcaaattggtcgtggggctgtcatccaatattaaagggagaaattgaggagaatcccttactcccctttgaaggttcatttagagaactttaacccagaagcgattgcaacaattttaagctcataattggccacactatatttcacactcagaataaacgaaatatattcagttggttttgattggatagatttttgaatatatacaatttgattagtgatgacctggtgcgggaagagaaaatcaaactcagataaaggggtgatcaaccatcgaggaaagaaagtattatcaagggtagcaagaccttgatctacaacatcaatagtttaatgattttttcacctctgagtcaaacatgtctgaggatggaattcttagcccccttgttctctcgagaaacttaaccttacgcaacaactctccttttcctgttcttagaacccttgtcttcaaaaggaacgtgaacatgggtaaacatttaagcttgggatttggaaagagaatatgagcaaacaacagtggaagcagcaatagagctcatctacatgtagaccttaggttgggtgtagagtctgaaggatgaggagctgggtccacccaattaatagatcatcaactgctcgcaaaataaagacttcctccctgtgtagttcaaatgtagagctaaaactttcaccaccaaatttttgagaaatctcttgatcataagcatcaatttttgttcttagtgctgcaatctaagaaggaggaatttccttgacaaccaatgtaccatttcgaacaaatgagctttgattttgagatccaaaggttccacaacatatgaagagaaaagggtagtaggcatttggagacctcttcaataagtaatgatatcattaatggagtatgtgtaatcctttttactatgaactatcccaaatttacaaagtgaggtattgtcaattgtaagggaatttcttgtaggctcgaagatggactcaacaatatggttactggcaggaaaaacatcaagattgaggaccttaggaaatctttttcaaccaatcacaaaaacaaaggaatctgaactcttgttcgaggaaggaagtcgttgaaggaaataattagggcattttctgataatatatcacacaggttaacagttaggacaagatgttcttttgaagtagtaaaaaaattctgaagtaaggaacgatgtacttttaagagtatagacagaagcaaggccaatgaatatttgaacaatattgggaaggagtttaattagagaaaccctaatgatagaaaggatgcaactgacggaggaggaataagaaacttcaagagtaccatatgtttttttcttaaccaaagtttccccttgggctaattaaaattgttttaaattaaaatctacttcttttttttttcttttttttttcgttttttttttttgtgtaggcatgcaaaaagtaaaaaaaagtaaaaatcaactaatattttcaattaggcaggttatattgagaaacaaataatttcatcaaagaaagagaattagagcgggggatctcaaaagcgaaaaaatttgagctctgaataaaggggatgcaagacagagcttaaaaagaataagtgcaatgagcaacgagtaagatttaatacacgtggacaaatcagaggagacgagagagaaagaagtagacattatttcttgccaataaatagatgatcccctaattcaaatagcagacggattcttgatcacaccagactaggcgaaactctatcagaatacactctcaaatttctacttgaattcaaagagaagacaacccaaacccgactgaaagaattgagagtaaaattgcttaaatctaatgaaatgtaattcgaataaatcaaacttgcggtaaagaattcaaagtagtcttaataacaacttattattgagttaatttttaacatcaacagtaattatgtaataatataattattattctataacaattttatattttttccttttttattactcaacttaacaaaattttagaatttcttcatagttttgttaataaaataaatatataaaactaatattttaatagttagtgagcccaataatatgtttcgagtttttttttttttttgaagaaaagcgtgcaatatattagcataaatcagttagacctgtcggtcattactagaaaagattgtcgggcaatgaggtcggagacaaagttccaaacctctgatgggaaaaggcccacttggccacattatgggccgcaaaattacaaagtctactaacatgttcaaaactacaaccgataaaagagggagagattctgttacaaaaagagacatagttctcaagctcccaaggggaatctttcccattgaggacattgatcactaccctcgaatcattgatgtcgcagttcagcttcaaccaatcctgagggggaggacgccaaacatctgacgagcacaacttggggcaagggagta

SEQ ID NO: 300738 - DNA, 1361 bp, Cannabis indica
attagcaaagacaacactgtaataaaaaaagcactgtagcatgccttagcattagggcgttacactttatctcagtctagtatagcttacactacttcctttttgccatgattcctttaataagtaggtgtgaagactgaatctagataaattcaattccatgcattcataatttagtttgaaactaatacatttcattatgtacttaagattgcactactgatgcttgtgatctattatgttgagcctatgcaaattcttcatcccatcttctcaattatactcgtagtcttcctaattccattatcaaatcattagccttatgtgctattaccttctatagaacatcaagcatctatgggtgagtagaaaaactcatccttaaccccacagtttttgatcggtcctctcacatggattataactaatcttctagtagcgatagcgagttcttacaatattagtctaaacgtgagaaagagttgacttaataaaaatagaagagttttattctaagtagagagaactccatatgcatatctaaacttaacattttcaaccataacatgtattattctatctatcgaacaaagtcttatgaattctcaatataatttatttaaaagaaaagagcaaggtccttcctagtattaaatcatgacaataatgaaatctaaaaattattcatcttcttcacgtgattttggtttctactcttttcgatcttcttcctattttatgtgatactaggtttttcattgttggtcaagacgtaatcatgatatttttaatggaaataattttaacaggaccttagttactattatgtatgttaattattaaattaataatccaacaacctaaattatactttttctaaaataatgaaataaatccattaagattacgattttatattgggaacacaataaaattaattgacttgttccattcaatcactctaacctttgaatctttttttgtaacaaggtatggaaaagtgatgagcctgaatttaatttttctcaattaccaattgatctcactgcagtcttccaaaatatcttcaatataacctttgactagtaggggctgaatatcaaccactattgtatactataatgggtgagagagagagagatgggagaaatatataaatagccctaaattaggtctagatttgaactagataacatatccggtcttcgcgcagttatgctttgaagtgttcagaaaatataaaaggaaaaaattattaatacagtaaaaataataatttaaaatattgtaattacatgagaacaactccttaaaattctcaaaaaaaaaaacctccttaaagtaatttctatttttatttt

SEQ ID NO: 300739 - DNA, 1261 bp, Cannabis indica
catgttcttatatatggatcatctctaccattattccatgtgggacattgtccacaatacatgccaatgataaaaggaagaggagaatttgggtctccctatctagccccctcttagcatggaaaaaccatgcatggatccaataaggagaatagaaaactgaggagtgatcacacattccatgacaatattaataaacatctcaggaaactgtaaggcaatcaacatttttttttaataaaatctcattccatcgtatcataggcttttttaagatccatttttatcatacaagatgaagaggtatgcttcctaccatactattttattaaatcttaacaaataaggatgttatgaccaatgtatattccatggacaaaaattcccttgattttctgcaatattacttggtaaaacagttctcaaccatgtacataacaccttagtgattgttttataaacaacattacaacaagcaacgagtctatactcataaaaactattgggataatttattttaggaattcgtgttaaggtagtagcatttacttctttcaaaagctgccataagtcaaggtaaagaggacatcaactataaaattatcactaataatttctcaagttttcttaaaaaagcgactagtgtaaccatccgagccaggacctttctcattaggaataaaaaagaggacaactttgatttcatttgcatcataaggttgagaaagattctaaattcaaatagtcagtacctacctcctttgagtcattttagatcccaacaaatgattataaaactcaaggaaaatcttagtgacttcaggagcaatatttacccattttttatgttcatcatgaattgcatacatcgaattctccattcttctaaatttgaagttgatgtgaaagaatttagagttacaatctccttccttagcccaagctagcttggatttttgcttcaagaaggatagatgatgtttagtagcttctttaaaaactttcttagcttccttttcaactgagaatagtgccaaattcatggggtctttctggattgcattttgacaatcttgaagagttgatgttgcttccttttcatgctcagcaatgtcactaaagccttctttgtttagctctttcaatgctttacagcttttaacttttggcaaagtctaaacataggaaatccttcacaatttagagcccaagcattagggttgttcatcaaactgctcaaaccgcccgcactgcaaaaaaa

SEQ ID NO: 300740 - DNA, 2382 bp, Cannabis indica
ccacacaaacattgtattgacagcacaccacctaaacaaatgaataataagtttcatttcttcacatgtttggtgccaggtacttatctaatttttgatagatctatcaaaattcgtgaatttcagggcctttttgtttgataaaaaatattcaccttgaaggattgtgatggagttaatattttttgaggttctatatattcttactaccaatattcatttctcacatttttatgttttaattttgaaatgaattaaggggatctctttatggtttatgcaattctgtaatttttaaatgtcctttggattagttttgagtatactttatagtcataatagtcttgcattatcttctatctaattgagaaaatataataagttcgtttcatgttgcagaaagaaaaactgtaataggtgatcctgatgcttctacaataaaaactttttggttatattgatgggagctggccattgttctctgcaagatgaggtaatcactcagagaaacggtgatataggagaatatataccacataaaactaattatatagaagaaagaaaaatctgggctttagttccccttagcaaggtgggtgcattatgttttcatttttttcttatatttgtcctgttattccttgtaaagtactataattatttctttgtaaattttgctgaataataatttaaaagtttggagcaaaaactaaagtttaacttggaatatatctttagatgctttaatggttttggatgtgccctcattgtccacgttgacactatcttctttaactaacatgttgacgttgatgtctttaatagacgcctcattgtccaccttattggtattttttaactttatttactctgaaataatttattagacacatattaatgaatgagtaaattttgtcttgggtttggtataggatatgatgaataaattacgttttaatatttcaaatttgtggtaatgggatgatgatttggtacagaggtccttcatttacatgggaatgttgctcgtcaaggtgggatgatgattacgttttttagtttatatatatatgtatatatatatatattaaaagaggagtataggaagaggcaggttgcagcttaagtatggttcggaaatggtagattctcgacttttaattatttatatcttttttactctaatactattaattattattatttttagtcttgatattctcacatttcaagtcttcaatgagtgaggtgcactcattttttttcctttttctttcttaccttatttagtcatctgtgtgctttcataacttgaagattattttgtattttttttcttaaaaaaatatagtgtgaaaattaaggaaatcaattttacatataataaataattactaatagatatatgtattatgccatatgataatttcttaacttgatattctacaattgagtaggttttaaccctctaacactatactaataattattaggataataataattatttgattgtagattaagtggttaatattaaaattcattggtatgtgaagttgtaatgtgactatttaaagttctttttggaggatacttatcagaactcaatagcccaaatttttcaataacactaggacttaagctattatatactgtagtttaaatgaggtgtgtcttgtttttcattttcatccttaaatgaaagatgttgttaaataatgttatatagtgttgtaattgtatggtatactaatcatgattcactcacgatgatcttttctttcttttttttttttttttttttggttcaagaagaagaaataaggcaaatcattgaaaacttcatacatctcatgatttggtattgcaaatgaacaaattgaaggattaaagaaattgattctcgggtgtccaagtattcaagagacaatggaaaacaattataacatcacaatccaaagtgcaaagaattagatgccacagtaactactttatatttaaatttataattaaaatctaatttaaataaaagtaattgccattgaaactaatagttataattctaaaatttggatgatcttatgtgccaagtaatattatgcaaatattataaatattattattttcctttccatttaaacatataagattacaaaaattattaatatatattttgtcataaactatgtaaaattaattcaaaattacattttttttaagaattaagtatacatgcatatacatgtaagattaacaattattttaaaatgtgaacgggattaatatgagaggattcaatatttcaattctacttatttaaaattttgcctaaaattcttgaaaactaaagtgtataactagatatacgtacattgtacgtaa

SEQ ID NO: 300741 - DNA, 2257 bp, Cannabis indica
agaaaatgtgttagaaattaggaaaaataagaagaaaaatttataaaatgacacataaactcttcttgtgctttcctttatattatatatagatagatatagatagattataatttagagattatttttatttataaattataattggtggtcaatttttatttttttttttaataaatgagatgttattcttgaagaataaagtactgtttatatattccacgacggacaacattcctactctccttgtactacgcctctgaagagcaaagtcctccacttcttctccccttgaccattgcttgtactatatgcccaatggcggtcggcgatggtgccgttcaggaggaacacttcgacgtcctcaccaaaaccggtcagaagactggtctttcaaaaccaaggcaaactcacttcacttcactaatataaatcaacaaacagttgaatattctttcatttaaccgtttcttcgatcttactctcttttcaattattgactttctcttttaaatgaattaatgtgaaaattgcagaggagaggttcatcgagatggggattaccatcgagcagttcatgtgtggatttgggcggagaatacgcaacaattgcttcttcaacggcgttctgactgcaaggattcctgggctggattgtgggatatctccagtgctggtcacatatctgccggcgactcctcgcttcttacagctcggtaataactttatctagcaccaaatttccttgaatcatttgaaatggataggatttcaaatcttgtttttttttttgttaatacttttgacaaaaaactaggtgagaaaattgctaactttgttagaacaatagggaaaaaaaaattgtgtctgttatagattgtcaactttgatcataattttatctttttcgaataagaaacaaaacttttgttggtgtgaacgaaaagaccaaaatgaaaacaagaggagggaaaaaaattacaaacaaaagctagaagaaagaaaaactaagtactactaaacaaagtgtttttctagtcgagagtaattaaaaaagctgtatcctcaaattgctttgccaatctaactaaagaattatacggtgttgtgagtttgtttaggaaccaatcgcttgttatagattgttgaaagactactttagttttgtgggttagtttatggatacacttgttcctgaaaaattgtgacttgtggtttcaggagggagcttcaggaggagcttggtgtaatccttccaaaagatgcatttgaaatgatatttgtttttcttcaagagtggttagtatattagtctttccttttttctctgaggttttatcacttttatgtgctgactattttagcatgttatgaatgagttttatataaattagccgatcaatatgactgtttttttctttctcattccatgttctctcagtctggcatattttaggtgttcctaagttcattaagctaatgtgcttcctaatgatagtaatgagaaggtttagggcagggaatggtaaaattcatattattgggattccgtgttgtgctgtagaagaaactcattttttgctataaagaccttactaattctttaacaaaactcgactgcgcagttaggaaagagcatatatgttggagtcacccattcaggatctagctcctcagctgcctgtaatgtcaaagaatagttgcaatgaaggaatgggtgtatgtttatccgtataaaaaacaccattaaatgacagtgcattcgataaacctttctctcaaatgcttaacttacttctaagtttcagttttgttggttatttccatatggagagaccacaacctggggtagtttgcagaaaaatggagtgtaatctaagagcaaacatccctgcccttttgatacgttggcattgtcagcatagtcacctttataacaatgctgggttcgttttaagaaattgtaaaaaaaaccttattccttagtttatgtccttatatcatgtggaataatggagggctacattcaaatgtttctgtaaaattgataagagttttgagtatgggtgttctcatgctagagtttgagctatttttgtctcaagaggaatagtggagataatatggctttactggttcatttgtttctgcttatactgggtttttatataatgaataaagggctcgtttggaacgccgtattaggccgtattgtattgtattgtattatattgaattgaattatatatcatatttt

SEQ ID NO: 300742 - DNA, 2790 bp, Cannabis indica
agaaaaatttgtatttttttctcttctttttacattcccgatgatttaaaatcgtcgcctatatcctgttataggcgacaattttaaaccgtcgggaagtccacattagcaacggtttttaacagtcgcctattttgcccgttttgcgacggtcgtataggcgacgattatagaaaacgtcggaaaaaactatttttgtagtagtattgactcagttttgggagaaaaattagaagcttgaacatatgttggccggaagagtgggtccccatcttcctcctagagcaaattatttaacaattatttctaacacattcttttatttttactcttgccaaaacaatactataattattattttacttttatttgttgttgttgctttttttttttcatgttgggaagatatttaatagctttttctcgggcttctattatccttatttctttttgaacatacttttttgtgggtagtacttatgaatacatatacttaaccatatttcattactttttattatgtatttatacttctagtatccctctaagtgactttaaaataaattttgggtcacttagtctgaatgcaaaaggataacatatattacattaggtccttagtttgcaaaaagtgtcattagcttgaaaatttaaagatgaagtcaaataccaaactccaaactattaatagtacttgcggaggtgatcaacattccatgctcttagaattagagatccatccatgtgctttagcttgtaggtcccaaagcttattttatcttcaattttgtatggtccttcttaatttgggccgagtacccccaatcctggttcttgagaagcaggaaatgctctccttaagaacagttctccatatgcaagcttctggtctttgacttttgagttgaaatattttgccactttcctctagtatgctaccatgagtatttgagacttctcccggagttcttctacgagatctagtgattcctgtaataggacttggtttgtagctggatcataagtagttcttctatggaatgggattgtacttttcacagggaccatagcttcacatacatacaccaatgagaacggggaatgtccagtggttattcgggtgttggccctgtatgcccatagtactcgtgaaatctcctctggctaattatttttgcaggccaagagttttttcttgagggtgacttttaatattttattcacggtgcccgaggccttgctactgtggagaaacttttaataactctgtatttctcacaaaattctgtgaatgcatcacagtcaaattatttactattgtccgagactatcttatggggtagtctgtactgacagacaatgtttttgattactaaatccaagactgtcttggctgttatggattttatcagctctacttttgtccacttcgtgaaattgtccactgcaattatggtatacttgactctacatttttcctttgggagagaccctatgaggtcaatgccccatattgtgaagggttaagggcttgtcatcaatgtgattttatttggaggggcccttgggatgttcgcgaacctttgacacgggtcacactttaggatgtagtccatgcaatctttcttcatggtctaggtcggggttggggtcggggtctggagttgggatcggggtctggggctggggtcaggctttgagtctgtgtccgaggtatagggtccagggtctggggtccgggtcgaggtcgaggttcggggtcgaagtctgggtcgaggtcgaggttcggggtcacatgggttctattgtccgtgtctagggttagagtatgtgagcaaaaaatataaaatataatatgttcgacaaaataaattatttttgaaaattaaaaactacattttaatattttctgttttctaattttttaaaactctatttttaaaaactgttttttaaatttttaccaaacaacctttattagtttttaaaagttgtttttcttttttaaaaaaaaaataatttttaaattatgaatccaaacagtctctaaatctttggccaatagactaatattgttttagtgttgtttaatattaaagtataattttgggcaacttgtggctcactaacttgcattggtgatgctataataaccaaataaataataataacaaattcgtgagatatataattaaaaacacacatttttataacatgtatttgcaaattgttcatcataaattactataaagatggttgttgtacgatcgagatgaggatagtgctatataataatataatgttaaagttagtacttgtgtgtacgttattaattataaactgatttacagtctgaaactgctttattaattaggaagttaccatgcagtttcgtaaggctacaaggaaacagctagggaactttcatatagttaaatccttatatacaaagctagttcctatatatattttttataactaacaaccatttatagaagagagtagtactattctatatcgatcatcttacataattaatggaaaataagtctatgcgtttgtggatgttggactttgcaaaagctctaataataaccacttcatgaaatgtcacggagagcaagtgaccaagtgggaatcgatccactatataatatattaatgttcgatgatggcgtttcctactatatataaatattgataggtaacacattacaacaaattttacttttagtcacaataaataaatttgtgattaaagtgaaaaaattgtgattaattataaattat

SEQ ID NO: 300743 - DNA, 1668 bp, Cannabis indica
cacctgaactcgaagaagatgggtttggtggtggttggcgttggttcttttgtacatccaactccttcattgatcacaagaggagaaagcagcaagttgatgagtaagttaataaaattttcaaacaaattacataactgtctgtcagtatcaatgtcacacacaattttaatctttgcttatagctttacctgagtgggagaagaaataggttcctcaagttgcagagcaatgctattttcagcagcaatttctttaaccaacttcattctgctctctaaggttggctgcctggttgatagcttttgtatcaactacaaaaacccagtgagtaaaaacattaataacaccataattgtcaaaaatgaaaattgcaatatcagctacattcatgctgctataatataccatgtcagtaattttatattgtatagtgtgtgtatagtaccgtaagattaacaccgcagttgttgcgtaattcaatagcacgagcagtgaattccttgccgaaatgagatgtgagaaccccacgaatctcttggagctctggaaaatccccacatcttgaagctgcataaagcaagcctgatgttgcctctctcaattcttcaggacacactctacacacccaacaaaaaaaaaattagagattgatcgatcatatatagatattataaatttcaaatatatacaaacaaaaagaaaaggacaaacctttcatgttcaatcagatgaattctttcaaccaaaaggttgcagtagccctctatcatgtcatacacatctaacatattctgctccttgatcacatgctccgcctgtcaatgttatgaaacacagaaaatcaaaatctgggtctgaaccaaaaaccaaaaatacagaggtcacatcaaacttacccgaagaagagctcggtcatggtggccctgttggaggaggtgaacggcatcagagcgggcttgggagcacctgacttgacgctggtttttgagaacagcaaggcgagagatggctagactcaccaaaggcttgaactttgaggtcttgatcaaacttctacccaacaaagagttaatcttgcttttcatctttaacccaaccaaatactatatttctttcctgtatatttggatgagtaacaactacccaaatggaaagaatagtacgtactagtttatgaggatgttctggaagaagagcaggactccgaagagagagagagacaaatgagtctggccatttgtacctttttattatgtcacaacagatgaactaataattattatttgggtcgacaattaagattttgtgttcatggagcatatggaaattttagtattattttctttcttaatgaccaagtctgtgtgttaccgagtaagctaacgcggctgggctaacaacttcgtggaaattgagagagagaatatattacataaaacacaaaacactgtttcaattcttaaaaagataaatgactgttttcacactctattcggttttgtttacggcattttacaattttatttatattattttaattaattacaaaatatgttcaaaaaaaacttattattattttctcatacatttttatatataattaaaactttttttcaatttttgttataatatatagggaaaaaaacaggaatattctaaaaatgg

SEQ ID NO: 300744 - DNA, 1814 bp, Cannabis indica
agtccactgtggcactttaacggtgatttttggacggaggtgtgcagaacaaaacggaagtggagttcaggtagtttagccgctaaaatttgagttttggtggttaactgtcacaaacccaaaagtttggggggtttagccgccaatatccctttattttataaattagactatatgtaccatttttatttattattattgctaactaataaactcagtgcccaagtaagtaagcaagtaatatgacattttcttgattaaatatttattgtcctttgaaaaaaatgaacatttattgtatttaagttagttggttgatttagaacttctcataatataaaaattgctaaagtactttctttctttcaaaacaaacaaaaaatctcaaatttatttagctatttagaatttttgttcttaaattatgacttatatattattatgcctccggaacttttcagctatttaaaaatagattatgaactattcacggtgttgtaaattgattattctgtcaagctttgtcacatgtagcaaataaaatgatgaaatggatatttaatcagttgtcacgtcagtgtcatgtcaataacacatgtataataattaaaaaaataatttatttttttgatttaattttacgtaattttcttaatcacttattgatttttagtttactaattttataaaatacataatttttatattttaattttaaattatatacatagcattaacatagtaagtggctaagtagtcatgttattattttatttgtcatgctcgataaaatttaatagaatgaccaatttacaacagtgtgaatagtccagtaactatttgtaacgggctaaaaatttcaaggagcacaataatacataagtcatagttcggttagtaaaaatttaaaataaccaatttatttgaagttgaaatgacatgtcgtttattttattaaacgacaaaggagctccataaaacgttgacaaattaaagtatttgtagttatccttaaattttaagacaagtagtgaataaaagcattttcaataatagatgaagtataatagcaactaaaatattttataaaatcacttctagatgatgatttataatacattaactttttagtttgttaagaaaaaaatattccacatttttctactctatcatttaaaaattaaaatacattattaaaactctacatattttttctatttttctattttacagcatacttttatattataccatacatcaaattctttaaaatacatcaccaaaattttactttttaaaaattttattatactttattcattttaaatatataatattaatacatacacatatttatacaaaaattaatcatcaaaacttaaaacaattaataaaatatgtttagagtaatgaatagtattctataaatgtagaacataaatagtatattttaaagaaattttaaaatgaaagagtttaaagcatctgttgtgacatgtttttaatgcggtttttaaaatttttaaagcttatctattttagagaagttgttatgagtgctcttagttcataaatagtgaatctctatatcgacatataaataagttttgtacttacatatcatttggtgtggccctaagtatatgtaggctagacctgtgcttatgatctacacaatttaaaggcccaagaaaaaaactctttataaacacacatattttttcactagttttaaaattattatatttctttctaaaaagactataattttttttggaataattacataaggcaccatttttttgtaaaatatt

SEQ ID NO: 300745 - DNA, 1110 bp, Cannabis indica
aaaataagagaagtaattataaagtcaagaatagcaagcagaatgccaagagtaaagacataaaacctaaaaccataacaaagttttgtgatcatcatatcttattggttgttacaaataaattacttatttcttttatgatattaaacaactataattaacaattctcaacccctcaaaaagaaaatgtttctattacatggggtcaattcaaatggttaaactaatgtaggtccgtccgatcacaatggagaatactcgttgaaaaataatttagcttagcatctcagcagccgtcttttaaaatttaactcttatacttaccagctattacctacggggtaaatgccctccaaaagtaacaaaccatgttgattataatggacctcctgaaaaaaaaagaataaccatgcacattatgttaaaaaaaatatgatcagattgctttcaaaaagctagaaatcaagataacaaagcagtttttacatagacttttttgtaaatcctaactcatatctagccaaactgatatggtacaaaaataacacacaatattttttaatgaaaaaagtaatttgtgaaaggaaaactaaacttattgggattttgaactaaattatgtctttcatcaaagaatataattcacactcaatggtcgattatattctgtcaagaacccaaaactctagtaactaaaaaattaatataaatgaagaattaacaaaataattgaacttaagattaaaaaaggaattaataatatataatgcacgcaactctttaactagtattactatacacttaatgatttggctccatgtttgatctattttcaaaagttgctgagttcaaatgtgggaatgcatgagattgaggagctttcaagaacttcatgggtacctttgaaccattaatttcaccattcttcaaatcacacaaagtcgaaaagcaaaaaaatagtaagaccaaatgacagtttttggaccatataacatgttgcccgtaaccatgaataaaagtgaaccaaactatcgctccagtagactaacaaaacatgatcatgttgggttttgtgccctaaataaaaccctttacaatctgataagttat

SEQ ID NO: 300746 - DNA, 3079 bp, Cannabis indica
ataaataatttcctgattaacataaataactgctaatttccaaattaactaagcgggctttacattggagttcttaataaggattttttttcttcaaaaaacttctttaatcgggtgtaataaagtctatggtaattaataaacaacacgtaaatattaaattcaaatattgtttattaaatataagtaaatataatattattttttgaaaagtaatgaaaaatttattagaatgaagcttgaagcattacaatagataaaagttcatttggagcattatttttgataaaaatacgaactggatagaaataagagctacacgcaatactatgcgcagttttgtttacagatcgtttaacaaaatgaatctcaacagactttaaacagtctaaaatgagcttacaatcctagaccaaaagaccaaagggtgatggcatatagattgagctatgcaaagcttggatagcaaccaaacaatcattttcaagttgtacatccatccagccctttctcttaatccaactaagagtctccttaatgctgacgatctcaacgatggcagcatcaacacaaccagacttactcatagaaaaagctttaagaagctgaccacagtcacgggccacacctccaactcccaaccagcctttcgaaagaaataaagcaccatcaacatttaccttaatcttgttcaaacctagttcagtataatgctcaagtcctgtgtccaaacccgaagaaaaaaaacaaagggccatattttttagattgagaaaccttccactgattaagaactgatcttgctgaaagcaccacatcagaagacgtagcatactttcccctttcaaactacatcattgcgggcattccaaatcgcctagccgagcatcgctgcttcctcaaaaattgcatcagaacaaggcttctgatgtggaaaatggagagcttccaaacaaacttccacatagccacatcatttacatccacctgtaagcaatcttctttgtgctagtattcatatgcatccttcaccaaataagtgccataaatattaaatgagcatgctaagaatccataccagcagaactatgttgcaaactgagaataatctcacaatcccttgaataaaaaatatcagtaatgagctccgcatcccaactttgactttctacagtcatcaacctatcaactgagcagtcatcaagcccaaccagatcagaagtaacaaacagatttttcttgttagggagccaataatggtcctttagaaccagggccaatattacatctcgcaccagccttaattaagtgttgattttcaaaattactttttcaaataaagcttagattatttctaaattcagttgtaagaaaagtacctttaggataatactgaaccttgtaaactcaacttacaagagacaaatcattaaatctaataataatcgattcaatctaattataatctaattattttcatgtacaatttaattgtaattaaatatctaattttttttttaattaaaatgaatttaattgactccatataattagattagtttagatcttatcctcctttaagtgtgggattaaacccaagagtcttcctcctttagtatatacctaattttgggtattcatttaaattttacctaaatttttacatttgaagatataaaaatttaggtaaacttaaatgagtactccatattttttttttaggtgtaaggaaatgagtacaccaaaattagctatatacaatataattatctttttttaaagaacaaaataaacatttaattatatttcttaaagagaaattcattaaatagaagcaacactacacatgaaaagacaagtttgcttgtaaaacaacactcacaacaaagggatcaacccccctttccaacaagcacaagctttcaaatttaaaactgttttggctaataaatgagcaactccatttgctttccaaaccacagaaattatcaaatatcatttacaattatatcattgtcacaacaacctttatttagacaagtttgattgtttgaaatttttcctttaaaaggtgtatcttaatgcaataccaacctactccaggcttggaatgatctttggctatgaactaggggattgtgctttgtgtgatgaagtgaataggaataccacaagcaatcttttgggtggatgtgacttgatcaaaagactttgatttacaagaaagtggaatctgagaattgagactttgaatttggttttgggacaggagcttctcaagtggatccttaaccatcctttcctcaagaaagaagattgcagcgaagttaaaatggagtttatctttgcagcatgtctttatcacaaaatgtggaatgcaaagaaagtaggggtagtcaaagatggttttggtaatactatattatcgatggtttattgatggcaggctgatattttcttgctaagtaatttaaatgattatcgatggtttattgatagtatattggtggtttaccgattattctgtcttgtgtgatacttttgttatttttttgctatattttgtctagagtctaaatagtatcaatgtaccattgaaaaattatcaaaaaatttcatcccttaccttcttaccttaattatcgagaagatatcgatatataatcaaaaaaagcatcgataatttgttaaaaaatccagtttgacgacaaaaccatatctcgctattttaaaggataatcaacaaaataacatcaatgcaaacaacaaccacacagatctattgaaaataaactacatattaatctaaaggtttaagaaattctttgaacagcacttacccattattgagataaatgtgtacgattcttttcgatgatgaggtccggctaggggtgtgcataaatcgatccaatccaatgagaaccgaccgatccaattacaaccgaccgccaaacattggatatccaattgtgatcggatcggattggatgttatttttaaatatccaattggatcggatcggatggtggatgaagtgtctaaaaatccaatagatccaacatccaatcgaactaat

SEQ ID NO: 300747 - DNA, 1557 bp, Cannabis indica
gaattatatttttttgtacaagaaattagtaatctttaatttattatttctttaattctagaatagtaatcttttacggtctcagtatccttcattgtctaactgagcgtagcttcactatttcttggaactcatcctgtagtgtgtcccattcttcttttgccgttgttgcacccataatccgtagaaagagattgtctgttatagcttgctgtaagtagtataatgtatagaatctttttattgattattcttcaatgccttctcttgatcgtctaaaagagatgatatatcttctagaatagtgattctcttttcaacaattttccataaattttgtgataaaaaaatggatcctcattttgatggactaaatgtaattttctccatgaaaaattggaagaggtagaatagcggttggacaccaaactcatgttgatgagaggaaattattacacccagtgatatgatcgaatggagctttgataccactgatggtttgttaaattggatagagtaaaatagttgttatttgttttaggtgatagttttgtaatgtgtctagtgactagcgtggtatgatgaagataatagtatggtgatgacttgataattggttatgtatatagtagagaatggtttggcttaaaaaagaattgtatgagaaagtagtaagtttttagagaatttttcttttctaaaaatgtgtaaaaaaatttagactaaagttttgtataaatgtgcagcacattctaataaagaaaagttattcaatggaataaagttgctcttggaaattacgtctcgacaatatctaccaaacaagataattttatatatcaagtggattcataatgtgtatttggggatgcaaaccggtgggactacgaggcccctaccaacaatagttggtattggtcccaagttgtagatatgaagaacagtgcaaaatttagtttcaaagtctcacgacaggtaaatataatattagtcaaggctacaacgcactgtcaatttgaaaagagaaaataaaatggcaggggaaattattactaagcataaatttgtactgtggatggctgttttaaatagattacaaaccatatagaggctttacagattccacatttcagatgatctaagtttggtgtgtggaaatgcgagtgagagttctttgtatttattctttaaatgtaatatgagtgccaagtgtctagaggaagtgaagatttggctgggatggaagataaaagccaaagtattggtgaagttaataagagggattagccgagccaaaatggagtaagttcaggaaacaaacacattagcagcagcaatcgcaacattgacttactggttatggaggagttgaaatgaagcattttggtgcctaactatgatgacaattactgcaattgtttaaacactgaaaacaaaacttaaatatagaattacaaagtattattccaagacatatcaatatagaggatttagatattggtttgatggtttaaaaatgtgaaagtaaatcatgcttttgattcatcacaaataaaa

SEQ ID NO: 300748 - DNA, 3266 bp, Cannabis indica
agaaaatttaattccaacaaccattaaacaatacacactgctataagcaacttaataaatcaaaaactatttaaaatagtcattacatttttctcttttgctgaaagtttcgcaaaattaattacagcaataaattctagcttttagaataagcaaactctaattgctaaatattttagctgagtacagactccatcaaacaggcaacgattccagttgcaccagataaaataaataacaactgctaccacgacccaagataatgaggcaacaacatctgtcccaaatctgaccgaattattcaaccaatccccacgacaattcggccaatccaacaagccaaaccaagaagtaatctcaatgattaccgatcactataaaaaaatttacttttagtcacaatacaacttgtgactaaaaataaaatatattttttttttgaaaaagtaaaatatatagttgtgactaattataaattttcattcctattttatgaataaaagatcagtggctgaaggtataagttacaaaaattacaatttgctgtgactaaagctaaattagtgacaatttgtatctaaatactatgttttagtcacaagtaactttttgttgtgatcaaagtcagatatagtcacaaaaaatttatgttgtgactaaatagttgtcactaaaagtagctattttttggagtgaatctagaaaaagagcaagtaaagaagaggtgaatgtgagattcgggaaataaaccacataccacgcataaaggtgattccacaatcaagaatctagcaagaagatctcgagttagaagatgctcattgaccgcttgccacaaaataaaacggtattttggaacttttaacttgtgccagacaatcttgtaataatttattgtcttaaaaaaaataagggataaataaaattatttttctttgaatttccttgtacttagcaaccaaaagctctcttttattgatggtatttttcagctcaatagttttctaaagtaccaattaatatttacactaggagagaaagaccataaatcatgtacccttcatataagcaccattaatccagcgaaccaaatgacaatcctgcttagttgaaatggctcatatgtacttagctatcacaacaaaattccactttttcccttccctaaaaccaataccaccacagttcttgggcaagcaaacatgactctaggaagcaaagtgcaattttcttctattatcaaacttatcccaaaggaaattacgacacaacttttcaactttatctgtaacttactgctggaagatgaaaagtttcatctagtaattttgaatccccattaaaaccaattggactaggagagcccttccaacaaaagacaagtgatgatcacttgactaaccatgtaaattcttttggattttctctacaatccaaccacaatctgacacttttcatttggtaggcctcaaattaaccccaaaatttttgaaagaaaaagagccttttatcatcttagaagccactagtaaagactgcttacaattagcatccaagtccgccaaatagatagaggactttacattattcgcgaccaaccctctggtactacaaaactcttcaaatgcagactgaataatgtttgaagaaggtagatttcctttacaaaaaatgacaaagtcatccgtgaagcaaagatcaacaaggtttagagacttacacatggtatggaaaccgaatcctttagtctttgaggcttaaagaaataatcttgtgagataatccataatgaatagaaagattaaaggcgagaagagatcaccttgcttaagacctttctcacctttgaaagagccatagacacacccattgagcattaaggaatcagaggtaccacataagcacataataatccaatcaataaattttgaggaatggaaaacccttcaaaaaattagcaacaaagtcccaatcccccatatcatacgctttattgaggtcaattttcattaagcaacaagatgaaatatttttcttggtatatgctttgagcaaatcttgaaaaattaggatgttgtgagctatcaacctatttttaatgaaagcaccttggttgttatgcaccagccctagaagaacttcatttaatctataacaaagcattcaagatgcatttgtagatcgtattacaacacgcaatgggcctataatccacggtagaagtaggagaattaaatttaggaataagagaaatcatagtttctttaagatcacttagaattttcccttcccataaaaaagtgaggatagcactagtgattttctttccaattttggaccagagacccttaaagaaaagcttctccataaccattcgaacctagactttttgaagaatgaatgctaaaaagaacatttttaacatccttttttctatggtgttagatcatttaatgtccaccaaaaccagtcttattcaaatggaaaacatcgaatatggtgttagtttttatggtccatatcaaatttgatacacagtccttactcaagtaagtatacattctatctctttcgttttggtttagccctcgtgagtgtatcggtggacgccctaactcgagatgtcgccttggattccttgcattatgatgggtgaatccctagtcaccatgtcacgtttgcctattatttgcattcatacaagatgactttggattgttagggtgaacattgtcgtgattcatgttaccatgtgaagttcttggatcattaggctgagtttccctattgttggtgtttccttgattttggggacctccagtgtccactaggatatccctcgttgtgatgccctaatctatagggatgccacatgtgtgatttttataaactaacttaatactaatagattaattagttattaaaaaccgtgataatattaaaaacttaactaaaacaaagcactaaaaacgaacattataacgacataaaagcgtgttccgggaattcctgttataaaaagttttgccaaagaaatatatacgacaaccatttaaacacaaaatcaaaatacacagcagatacaaccatcccaaaacaactcctggcaactcggcacgcaagccggtgaggaaatatgtataatgctggagaagactgtcacctcatggttgatctagcttttcattgcctttacctgcaccacatagcacccgtgagtcacaaggactcaacaagaaaagtaataataacaatcatatagttta

SEQ ID NO: 300749 - DNA, 3676 bp, Cannabis indica
aatcaaatttccctttcaaattactaaattttttaataattatttttttttttttctgaaaatatcattttagtctcggtttaaaactgacactaaaggagaaaatatatatgtatactttaagtgtcggttttcaaatgatacaaaaactcaatagtatcggtttacaaacgacaccaaaaattaattttttgtgactggaactaacactaaaagtataagtctacagtttaaaactgacaccaaaagtacaatttattttattattaatttttagttaacatagaaatgataaatactcaaacttttaaagttggaaaaccatatactagatagaatagctcaagatatatagaactcaaaaacaattcaatagtcttaatagataaaaatattttaaatattataaaatttaattttatttaaaaagaaatttttattattttaaatattattaatagataaatttcatttttaaattttgttacataataattattatattacatatttaatattaatttattgtataattaccaactgtctcactgacaataaaaaaattcacttttcaaacataccttatattttaaaatacaatataaaactatacaatataattacaccgcatagtaattaaacggttgcttccaaatgcataccctaaagaactttcttctataaatcaataaatgaattgtacatacaacaaagaatcaaacaacaataccaggaacatcaatatgatgtaccaccataaatacaaagaaccaactaaaatgtagcttatttgagaacaaaattcaattcacccctttgattttgcgaaaacttttctgtttttgtagctgaattaaccgaggaaattcgttggaaacaacagaagtacttgctggtgtgcctccctagcagcttggattattgtcaggagttgagtttgtaggacttgaaggggttaagtcagcagagcttgaaggggttaagtcagtagggcttgaagggcttgaagagctgccgttactatttccaggacattcattagcgaattgacagaaccgacatttccaacgctcttcctcgggagtgtaacttgcttcccgctttccatgccagaactcaagactaacatggatttgtttctgaagccaatctaagtcatacgcaaactcatcttcaccgagcagtgaattgtcttgctgggactcatatctgtaagaaaacaacaaaataagcaaactagtacataagaaaatcaatgaagctaaaaacccttttgggataagaataatcaaagattatagagaaacttatatgtaccttaataacatgttgtcataagcaagaggtaacacactacatgtatttgagtagtacttcatcacatcctctagggtctgcatagatagatgaatttaggcacacagacaaagtaaaatgtgtcagaaaatcttaagttcgagaagcgagaatcttttacctgcgcagggaatccaacatttcgtgttctgtcaacgatttcttcagacaaattgttatagggattcaagttatagaagtcaaaaaactttttggttgggaaattatcactcactaaactatcccacatacgcttgtaacacattaattgaaaccttccgtttcttcgctgtggttcggaaggaagtgtgggtcgaacacgagtcttcgtgtcaactagtaaaggatgtttatcagtttctgtaataggcattcgaatttcatcgatcactcccacaatccaaacaccttctacaaaacttactctgatatcacaaaacaaataatccttatcagtagatgaaaagggtaagaagataaatgcaagagagaacacataacctagcaaaatgcatatcaaacttacaatgggagctcacgtgttaacccttcaaatataattggtttacaccaattataaatttaaaaacttcaaagcccatctatcttcaactgacttcacagtaaccttcacttttttaacaacctatccaaaaaaaatttacaataggctttaagattcatcaaatttacaaacaatacacttgaaaatttaaagtaaactaaagatttcaaagagttaaatacctcttcttcaagcttggcatggcgagcaataccctttttcatagccttattgacatatcgcttgccgagtagactgaactccttttgtttttcacaccattcctataataaaaacaagagaagattcagactcaattcacaaattttctcatctccaattacagaacaacaaaacaagccatcaatagttctcaactccatcatcataagtgctgatataatagtcaggagaaacttcattaatggattcattagatcaacagttaagaaatacttcaagaatgaaagtggctaaagaatcagcctttcccagaatatcctaacgatcaaaaattatatacaattggctcttttaatactattatttctaggccttaatatctctaagatcaataaacacatcgaattgaccaaaaatggaaataaatgaaatttccatatccaaatcattcccagattagcaaattcatcataaccataagagtttcaaagaaaaaagtcaacaattcagcaaaagaaataacaagatcataaatttttgtttattttaaagcaaaaacataaccatatatatccatatgagtttcaaataatagaaaaagaaataacaaaaatcaaatttttgttaatttattgtaacagaacaaagaaacgatcgatcacccagaaaaatttacagtaccgtgtcagtaaaatcagtaacgaacaagcctttattcttccgaaaccgaagataatacgagtcaagcaaccggcttttcttctgggtatttctgaaatcgcccaaatcctccatatccggctctttagagcccggaaaacccctttttgaaagagcagtaattgactgaatggacctaacatgggtatgaagatgagagtgacgaagaacagggatggccgaggaggagatgcaagagcgagcagaaaccatggcagcttcgagtagaaccatttcttcctcagtcacgatttcgattgggattttggagatatgggtacagtagtttttgtggtggtgttcttcgtcgtcgttatagagagctgactcggtcattttggttgatccggtgagtttggagaaatatgaccgttggagttgccacggtcagaagcaactcatattctattggtatgttttgtatttggtcccttgattatcttagttcttgctatttcatccctagacctttatcttttattatttaaacccatgaacttacattttgtttgcaactagctgaaattaattagactagagtattgttattgggcactggtgtctaacaccttctacacgtatcgctttgtgattggctagtaatactctctaaaaaattattacattaaattatatgggactcgatacttagttggactaataatgatatgatacttaagagattctataatgcatccccttaacatttctcaatcaattatgattattttttcaaaagaaataaaatagggaaattctataatgcatccccttaaaaaggatataccgatatatctctatctgttttagtatccgaaataattttttagtcaaattttttctcatggttat

SEQ ID NO: 300750 - DNA, 750 bp, Cannabis indica
ttctatatattaaagcacttttaaaatctggagtgttttataaatcctaacaacttccaagtattctcactgcaaatacaataaatttcaaaaatttatatatgaatctaaattaatcatgtattcactattgagtaattattagggcaggacagtgcgagatgtgtcttttgccccatttacatctctattaatgtattccaacattgaacacttttgtttagtgtattttgattattaacaaatgtcaaactagctaacagcctaattaatataatatacaattacaagggttttgtttaaggtatctcataacatatatattttctttataatatataaaagatgaatctttgtaccttggtttgtagtattaggagacaaattacaaaaagtgaaattctagctaataattaattttctctcatgtgctctccacataacattttttgttccttaaatgctaatatcttctttcctaatataaactataaagaatataaattaattgaatctgcaaaaacattctgtctactacataattattcaatcaatcaatttttttctttaaaaaatatatagatttcaggagatctctccaccccaattataatttatggttgttccatacatataatatataaaagaacaatttcatagaaaaaaagtagccaataaaggtaccacctatgcatatataaagaatcaagatatatatatatatatatatatatatataaatgatatata

SEQ ID NO: 300751 - DNA, 1755 bp, Cannabis indica
atttgattatcatttttaaggcaatcagtgaatcaataagctctatcaacctaatcataaaatcttcctaatcccaataaaagaatatgtggatattgataattgtgtgtcaccgatcagtaggtgggaagacagacaggtataatatcaaatgtttgattactgccttggatcaatattgttaattctcagatatatatatatatatatatatatatataaatatataaatatactgtccaaatgtagaaggataaactttgacgttttagccacaagtaaattaaaagataagactaaaaagaggaattcaatgatgttaaaggatcatgcttttttggcaaaagaaaatgtaaatgtcataataacaagagagagtcatagattcctatatgagctaactctaaaagatatagcagcctaaatttatgattatctaatctgatgtctaggaccaatacatgattttgacaatcgaagaaactatttgcaaagtaattagctaaaaattgcttcagtaagagtaacacaaacaaaagtgtaatacaaaatttcaacaattaaattttaaagacttattttttttttttaataaggaaggcatgccactactgtttataaggaaacatgttgttgtattaaatagaacaaaataataatgaatttggaaatataaattatactctaaatataatatactggaggataggaaccattttttggcccctaaaattgaaggaaactaatatagaacaatcaaaaatacagaataacgataacaaaaataatttttcataccaactgcaacaataagaaaaataattaatatgatgatgatgatgatgataataatctacaattcttagtggtctatgacatctattctgatgaagtcacctatatttttcatacaaagtttaagatatatgaaaggtctttactaaaatatcaatatttcttaggaattatgaattagaaattctcaataaaaaaaaaaatcaactgtagtttgtattggtactgaatgaagattaaaaataaattaccacttcctcgaacccaatagaaaaatctaagcaagacgtcaaatttcaaaacagaaatagtgtatataaaaagaaaatccccagcaaagttcatgcattaaaaggaaaagaagaagatgaatgatatttataccagaagatgaatgcattaaaagcgaaatccacacacaaatagtgtacatagggcgcacgttagcattgaagcacgttaccttcaacaattgtgcttacttaccactagtaagcagcagaagcttgcaatgaatttcagtacttcaactcctcaacaacaccatattattctcttcatatcactttgctctgccattaatggaccttccctccaaagctttaaaaaaaggattaggatcagaaattactataaaaatttaaataataataataataaacaacgatctgaaagaagagtaaaattgtttggtataattattacgaggtagaaacgtgaagagtagaggtcggatttgaaggggtggaggggtggtttcgcagagcattcgagagttttagggctggatgcgtttgcactatgcacagtagacgcgcatctaattaggatttagggattttaatgtttaaggtagggttgttcatccgatccaatctgtactttttttatcaaacaacattcaatccgcattaagtgcggattttattttttttttatccaatctaatccgcacaatag

SEQ ID NO: 300752 - DNA, 938 bp, Cannabis indica
ttaatctaacaatatcaatagtttaaaagtatttttaatgaccttaaaaattttgaaagcataatttgatacatattaaagttcagagataaaattaattagcctaaatatatatatattacataattacacattatttttatagcgaacatctcatcaattttgatattctacacattctaaacatgaacattaaatatcaatttagaaagacaaaaatcatgtcaaactaatatccaagtgaaatatatatcaccaaaattttaatcaaaatcatcacaaattatcgcgaaccatcgcaagtgcaattttaggcatcttctttgacattgttatggcgtcaaaaaacaaatatatgatactatcgcaaatgcattaagcattgcaaatactcttttttgctcaaaatttgttcacgacatcattgcaaatatatcgttaaacatcacaagtacatcattaaatcaaatttgcaatttttcttatccattattgacttcaaaatgtaatcaattttattggaacctaaatatcaaaaataaattcaaatcattattctaaagtgttcgttgtcatagattcattacatttgaactcaaaaaatagattatttttttttggaggaagatatggttgtgtggtggttgacaacgacatttacaaagaggaggctttgtggtggtcaacaacgtatgcgaaatagttaggatcccaaatattagtggagtaggagagagacaaatcgagtgaggcaatgagagtaagtgtggttatttgaagataaattatagcaaatggtcttaaattaaatatttttatttcaaaattgagaaatgatattttttacactatttattatttatattgtcttttatcacataaaaaaaattaataatttttttttagaattagaagcaaattacttaaagattatggta

SEQ ID NO: 300753 - DNA, 6700 bp, Cannabis indica
aggatcttgatcctaagcctataaataccaccttcacttatcctttaacaacagactgaattacatgagtttgagaactctgttaaggtaagattgagagtttgagagagaaaatattgagaactagagagagaggtgcagagaaagagcgagattgggtttgggttttctgagaagaatcttctgtagatgaagaagattcttgggtgtgagagttaaaatactttgtgagaactcaatggagaatctcatctcgaatgtattgtacctattcttgctcaatcaataaataaggattatggtggtgttctagtattggagtagagccatagatcacatcgatctgttggatttgaaccagtatatatcttgttgttttattgtttctggtttaatactctgtttgccctttttttgtcgattattattcatggtttagtaatcttgtcattgctaattatttgattgtttaaattttagttaatttgatgctacaccattagtcgtaattttctcataataatatgtaaacaaattgtaggacatggaacctctgcaaattttagtacaaaacaatgaccattgggatgacaacaaacactatattgattacaaatcaagtggagaattactatcaatatattgcacttttaatcaactagtgaaaatagtgatgggggaactacaatacaaccctgatacaacacaaatacaactaaaataccatctgaaagaaggattccaaccactacaaatcaagaatgataaaagtatgatgttccacataaaggtattaagcaaagaaattgattacacacggtacctgttgtgtgtgaacaaaatgagcaacacggagagagaaacctttttggcacctaactaatcaatgatgttcaacaatatgatgatgacaacatatcacaataattgagcacaggcagatgtgcaacatcattgtaacaacccaacaataacaaacaagcaacaactatctgttgcaacgattggatcaattcaagatgatgctattttagtcgacactatgactttaatattagagtcaaccatacaacaaccagaaaacaacaacaataaaacttctgcagaagatgaatacgtgcaaccaaaaatggaaatgttacaataacttgaaaataactagaaagaagaagaagaagtcgacaacacagaaatgattatcatcactgataaatgacacgaaacaatagaaaagggataactttacaaagacaaagatacattgataagttccctatgctactttgcaatcaagaaaatatttcaatacaaagtagtataatcttgctctaaagaatacaatattgtttgtttggactcaaattgcaaatggagtttaaattcaaaaaatggaaacacgaaaacatgcataataaggagttatcaagaagaacacacatgtgcagttccaataagatttggagatctacgaccagaaactgcaaagttgatagaagattttgtaaaaccaaagttcttgaacctaaaaacaaagtgcagccctgcagatataaagggagaaatgaaagacaaatacaaaataaagatgaattacatgaaggcatgacgtagtagagaacgagcacaaagttagctacatggaaatgctaaagaatcatacaatctcttgccaatgaagactgttggattgggagaccttagacattcctttgccacgtgtctccatcccaataaatgagggataatagtatttaaaccccctaatacgaaatggtttttactcatttccctcccattttcatctttctcccctcttcactcaaaattttaaacctttaaaattcttatggatttttttcgaaattctttcctacaaagaacgattccaaaggtttcatcacttgcaagatcacttaggaagaactgcatttcgaggttagtgttttatttttcctataatcactttctctcccttgagtatttatatgtattctatgtttttaggggtagaaaatgtatgaaatgatagaacgtacgaatcgctttctgtagtttaggcaaatatggtatttttctagcaaatatgtgcctgaaacttgaattattgtgagtttcaagaagaactcctcgaatatttgtgagtttcaagatgaacacctcaaatttttacgagtttcttgagaaacacctcgaatatttgcatataatacttatcccagagctatcctttttgaccctattttttttagagttttaactcttaagccatcttttgccttagtttattttgatgtgcaaactatcttagttctcaaaatggtgggtgtgtcacactaacttaatgtccatgtaatcgtcgcatgtcccttgggatactgtggcacccccagccatttcttgagacatgcagttagtttccatttttcttgcattttattcattgtcagtactgactagattcttgaagtggtgcgtgtctccccgttacttaatgttcatgtagcgacatgacccttaggatattgggaaacacccaaccactttagagatatacagccagttctatgaaattttactttgtatttaataactcgggtgagaacactttacttgttaaaatcgcacccgcaccacactaaaaagatcttctatcttttagatgagtaacctatcaaactgccaaaggtaggactttggagaggtggccttcgcagctgagtcagaaaagagcgacaactttatactaatctcactgtctgaggatgagaccccttatagccagggctatagggggcttgctgttgacggatgagatagacatgatggttgaagagttagcagaattggtcaccctagaggtgcgcgatagcgaatccatggtatcttcacaaggctattttgctcacccttaaattaattctcacagcatggagtgatgaacatttggatgtttataatcatgaataaaaatttctaaaaattttctaagtataaacatgcgaagaatataaaaacttcaaaaattgtaccttgaaaatttgagaattcattagataatcaatagtacaatatatggttataccgtcctatacttaggatatttatgaaataaattaactaagtatatacatgcgggtactattgatagtagtactttaaatgttctccattacaagctctatcaaagactgagtgattcagatcagataattggtaagttgtgtcgctaatttttttagcgatgaggtaaagaccttcccaattgtcgctgaataagccatgcatagaattgtgtgtattgggcatgactttttgcaatacctgatctcctacttgtagacttctttctttaactttcaagttaaaatagcgagatgtgcgttgggtctgcattcttaatctgggcctaatcgtgcttttattctaagaaattgagttgtagcaactgattttctgtattggtttcgatgttgaaaacctctcttcttagcgatccagctcctacctcgattggaaccatggctttgcacccataagatagtgaaaagggggtttcacaagttgttgagcgaggagttgtgttgtacgaccataaaacttgtgcaagttcttttggcgaaatgccttttcatctccagagcaagctttaatcctacgattagagcttcgtattcagctttgttgttcgaggcaggaaattcaaaccttaaagcattgtgtactttaaatttgttaggacttattaataggattccaccgcctaaaccttcactatttgatgtgccatcaacatacaaagtccatccttctcctgatggtaccttaggatcaactcattcttctgtgataataacaacctcgtcatttggaaattcgagaaggaaatcggtaagggcctgacctttgatagttgatcgtggtttttatcttatgtcaaattcgcttaattcaatcgaccatttgagcagtcatccttatgcttcaggtttagacaatacttgtcataagggatagtttgttagtacttcaataatgtgtgcttgaaaatatggctgcaacttttgagaagctaccactagtgcaaatgtcagtcgttccatttgtggataacaagtttcagcgtttagtaagcatttgcttacataatacactgggtgttgtctaccttggtctttgtgaattaacaccaagctaatcgcgtattcagatactgctaggtagattgacaatacttcttcaggcattggcttggatagtatcggtggttgccccaagtgcgttttcaatgcctgaaaagcttcttcttatttgtcaatcctttgaagcctattattgcattttagaatctgaaataattctttacactcttgagaggatgggatacaaaacggtttagtgctacgactttacctgctaggctctgacattctttaagtttggtgggagatcgcatctccaccagtgcttttatctttgctgggtttgcctcgattccccattggtttaccttaaaaccaaggaattttcctaaccccactccaaaaacacactttaaaggattaagtcgcattttgtagtgtcgcaggattataaacatggaatctaggtgagtgacatggtcctttgcatgttgagattttatgagcatatcgtcaacatacacttccatggttttccccagtaaatctatagatagcatgttaactaacctttggtacgttgctcctgcatttattaacccaaaaggcattactttataacaatacaaacctcgatcagtgatgaaggaggtgtgctcctggtatggctcatacatcgggatttgattatatcccgagtatgcatccatgaactaagaagttcatgacctgcggtggcatcaatacgttggtcaatgcttggtaaagaaaagttgtccttgggacaaggtttatttaaatcggtaaagttgacgcatgtgcgccatgagccattgggcttgggtacaagaacaggactagctaacaggtttgggtaaaatgactcccttatgaagctgcatgccaacaaacgatccaattcctttttaagagcttggtacctctcagggtccattttgcgacacttttgtcgtactcctcgcactttggggtcaatgttcaactggtggtacacgacctctggcgatattctaaccatgtctgaatatttccatgcaaaaacatccagattctatttgagaaaagtgacaagcttttctcactactgaaaagttagtttggaaccaatttttaacactttagtattatcaaaagaatcaataggtacctcgattgtttcttctacaacttgcgctgtattggtatagtcaaggatcctaggatcaaaatcgggcttttcaatatggagtatctcctcgattctgaaaaattcatgttgagggggaggagcttcgagcagatatatgacgtttactaacttttattttctgcaagcttcaatgctgtattatagcattctcttaagtctgattggatccctcgcactgatcccacacccacagaggtagggaatttcatagtgaaatgataaattgacgtgactattttaatctctttcaaaatgggggtgaccaattaccgcattatatgcagaatactgatcaattattgcaaaattgtccatcaatttgggagtaacaagggaagttcctaaatttataggtaacttgatcattctttttaatgcgatcgtatcactggtgaagccatagatacttgaagttactggtcgcaagtctttttcatgtaaccccatttgtttaaaggcttgaaagtttagaaggttgacggagcttccattgtcaactaagacatgatgtacattgtctcctccaatttttgcgactattaccaaggcatcagcgtgagggtgatgtacccacatagcatcactctccatgaaagtgatatcgtcgcactcttttttgaacaacttctccggtcgttcacctaaattattcacattggtaaggggcttttcttttgcttcctttgcatagtgctcttgcgcctttttggattccccaccaacatgtggtcctcctatgatggtcaaaatattgcgaggggtctgaaagccactcacatcatttgtgttgtcaccatcatccactcggggataattttctccattctttttgtattggctaaattttccacgtctgatcaattcttcaattttgtgttgaagaaaccagcactcgtcgtctctgtggactgcgtcttctggggctttgacctctagaattttttcctttcaggctccgagaatgcgagcagggcacgggggactcgcgtttctccttccctctctccaactcgaccaaagaattctcaattgttttatgcagttaagccattgcgaagaattctaccaacagctcgggtcgttgtgcttgtagttccttccaaaaattggtcctcggcaaaacacctgtgatcaacatgcaaacttacaaaaacttgggggccttctcgaacttgtttatttcagcgttaaaatgtttaaaataatcctgtaaggactcaccaacatcctattttatatttgccaatgttgtgtatggaagtttgtacgtcatcatggccttggagtgcgtcacgaataggtctacgaaggtctcccatgttgatatggatgttgtgttttgtgccctaaa

SEQ ID NO: 300754 - DNA, 1113 bp, Cannabis indica
ctcaatcgtagctctgtaattgtttctcttcttagggataccatcggtaccttctatctcacccacgatcaactccgaacccattaatacgatttttttgcattggaatggtgttaccatcggtaccttcttcacctctttctagcgtcgcatctctcgactcctctctctctcaccgatctcggccgacggcgacactttcagctgcacgcctgccgcgacgtcgacgtcgacctgccagctcctccgtcccttgctattaatctcagcagctacctcacggtaataatccgtttgttgtgaaattttgatctgaaatttttaatatgtttattactaataactgaaaatttgatctgaaattataatctgtttgttaccagtgactgaaattttgttcggaatttttcgaactaatctgttttggtacggcattattgtggtgtctaggctctgttatagctctgtcactggttagctttctcgattattaattaatcagttaatcattatattattgctgaatctgaaatttttgaaatagtattgttatgttctgattagtgttactcattaatttgaatctgtgttgctgttaatttgaggttgtggtttgaattttgatgataatctgtcatgttaattagtgagtgaacttttttgataaaccaattttcattcctccatgttttaaatggagttctagcctttaggaatggattaacctctaatgtgcttatttgtatttttatttattattgttaattgtaattttttctctccaaattatctgttagtaatcattgttattttttagcattaatattcgaatgttaacaatttagtcagtggtatttctttttctttttttgtctatcaagttcttagccattagggacccagttaatagaatgttcaatttgcatttatcaaatcaaggccaatgtattcgagtctggattatactacttttagttgttgaaaattctaggcacaatcaagtttctccttgttaattttatcaccctaacattcttgaattatatttgggctaccatcggtacatgcttggggagtcaattcatgggtatggcatgaaaagataatatagat

SEQ ID NO: 300755 - DNA, 5761 bp, Cannabis indica
tggcaaaaagacaaaaccaaaaaatagtggtctcttttcctgggcctttaaatggatacacacgtattccttttcttttccagacagatgtcactacataaatacacatgcattactatttctatttccctatttatataaaaacaaaatataattcacacacattccatttccatatatgtaaaaaattatataatatactctgtctctattctgtgatcatataaacaaaccccctcttgcctctgctatttctcaatttatatttctaagaaccaacctctccaatttcagctctgaatttttgaacccacatatatatatatagataataacctaatattttactaacgaaaagaacaaaacaaaatcttagtcaatggtggtggtggtggtgactgacgactccagcggttgtcctctcccttatcgaatacccaattgcctaataaatatggaggctgagcaaaacgacgtcgttccattacagcaaaataggcataatctggcgccagaagtggtagtgttactagcttcggtgaaagaagagaaagaagaagaccagacgactgcttgtgttattggagctagagatggcggttcatcttcgtcgtcttctgatattccctcattggaccatcctcctcagataattccttcatcgccttcgtctccggtactgtcgatggagggttttgttgatgaggagaataagtttggtcagttatcagtcaaaattgaagaagaaatcatcggtaataatgtgtatgaaaataaggagggaggtagcatcgttaatggtgggtgttcttcttcgtctcctctcgattctccggcgccgatggaagggttacatgaggctggaccaccgccattcctgaacaagacatttcagatggtggacgatccaggtactgagtcaatcgtttcgtggagtccagctcgagatagcttcatcgtttgggattctcatgagttctccaaaaatcttctcccaaaatacttcaaacacagtaatttctcaagcttcattcgccaactcaatacttacgtgagtagtaatcttcctctctggaaatatatgtatgtatatttttagttttgaattttaggttgatgatgatgattatacttcaggggtttaagaaaatcgacccagatcgatgggaattcgcaaacaaaggttttcaaggagggaagaagcatttgctgaaggacattaagagaagaagcaaatacaataaacaaccaaacggagccataattcctcccacgtacgattcaatggttttggaatcggaaatcgacaatctgaagaaggatcaaaactcattgagagacgaaatctcgaatctgaaaagagaacagaaaaattcccagaaccaaatcatctccgtagaagagcgaattcgatgcgccgaattccgtcaacagaagatgctactcttcctcacgaggaccgttctcagttccaagttcgttaatcaactcatccagaagagaaagcagaagaaagagaccatcgatgctagccaaatcgccaagcgtcgccgagttcttccctccggcgaagaacaagaacaggttacgattcaatctatccacgccgaaacttttccggtgactgataatggtccggcgccatttttgagctccaccgaagaggaatcagatagtggaagcggtagtggttctggtccggaggtgttgtcggtttataatgtcgtatctgaggatcttctgaacgacacgtcgttttatgatgaagaattggcggtaaacgactcaacgatttatcatgagttggaggatttgattgatgagaagcatgaggtggactggaatgctggttgtattggctcaactttttgagtttggttaagctcactcactcacagttagtttctcttttaatctttttcattaaattaattattttttaagtaatacttttcactttatttattaaatgaatttatattaattttaatggtctacgcaggtgacggtcagacggtatgtttttgaaattgggagaacatattacgatatggctttctctttttctttttttttttgtggggattacatctagcttttcttaacagtgtccaaatcttgatatcataagattatagttttttgggtgctgtcgtttaatatgtagattgtcgtttaagagcatgaagttatgagcatatataaacttcagctcagatgtctgtgcataatgtttaggtactttatgaatcaagcaagaatgtgtaatagagatatattccaatatcatgtctcgtttcgtagatgaaatctttacaattttgattaaaagagaaaggaagaaaaaagtgcagaatatctgaatgagaatatgaatatttgaaaatatcttaataaggtaattttgtcgtattcgataaagacaatttggaatgatatatcatctcttttttaatttttttttctttacttcctgacatccaacatctgaatttttttatgattatccactgtctctatccttcaaaccaaaacataacttgatatagaggagagggagggagcccactagaaggaaggttgaagccagaccacatttttaatgggacaacaaaactagtgttcattaaagttgaaattgatgagttaatacatcgtgtcaatcaaaatgtgggatatacttgaatataagcaaatagatgcccaaactcgatcctgctccaattgaggcgatgccttttccaaaaatttcaattctaatcttaaccgcacacataatatatgttaaagaaaaggaattggccccactcacccaacaccaaatgttcatttacattttacagtaagtctcgtgatgaaaacagtcacaactatacagtaggagagctacacaaaatagcttgttaattatttaactacttgcatagaagaggaaaatgaaattaaagcactgacatcatcactatggatcatgcatatgtaatcaatcttttatgatttttctttttcacttgtaatttttatactaattgataatataaaaaattatatagatgtcaaggacttgctatttctttatgctcggcttaccattattagactcctgaccaaccttattgaagatgaagataaagaataggataaaacaaaccgatcaatttgttgttagtcctcattaaatgcttttgttagaacttccttgtatcttctttacttcattagccgttctaatggagtgtcgtgtcccaaataagccaactgtgacaagtcatcactcatcagcactcgttctttgattcagaaatcagatttaagttatttaattcctaaaataaatgttcaaatttctttttatttggtttattaaattctcttacaccaaacaatcctacaatcacaattaagatttttctctcttggctttaaatatatgcaagttttaagtattgcatatctgttaagtgagaggcgagccacacacttctaaaatcaaaagcattttaaaaaaggtaacaagtaatttctggggaagtagtaatcttagtgagctctaacctgattttcgtgtagttcaacatagcacaaggattgatagatgtacttacctgttcaagagagttgttgtcctctccagctgaattcttgaccttagcccatttagaaaagcataatcatcaattaattagagccttagccagagaagacaaaggaaaataatgcctattcatatccaaaagataaccgtgtaaagtaaatgagatgaagcaacaaatgataacaaataaataacctattatacattctagaaatcccccaaactcgcatttgtacaacaccctctcatatttttgtgtggagatagagtaggaaaaatatcatcaagcaggtgactcataatgagttgcacataacacacagatttattacatagcaagcaatttttaatttttcatgaagggggagccgtaaaattaggaatgaatatcttaacatcaagaagaaagaaagagttatccttggagatttgaaccttttggcgcatgggagaacaacagggagttttttctatgcacatataaagtaattacattacaacaatttcctcggcagatgatgatgcccttttttctgcttgctctaatatatctctacactcttggagaactttgcctccctcagtagggttaaagtaatctgcagatccagttaactgctgtgctattttaagttcttttgttccatttcagtgtaagatcagatggacttgctccctttattaaaagagatatcaagcaactccagtaccttatggattatctttacatgttaaatgcttgtattgtggcaaagccttatcaagagtaactgcattaattttgaatttaacaatataattgcagcacatagaaccaccgagacatcatcaggagcaattttgtcgagaatatatgtataaagtgccagtgaaaacataactatacaaggcataaataatgtaaatgaaaacaacccattatgtattcccaacaactacgagcagtatacgagcattataacagtatgttaaggatgttattattgtctaccacaccaggaacaaagtttaaccaccattacagatttaatccaaagagctcaaagatacaaagcccacctgataaagcgaccccaattcggcaacttgaaacgtgaaagaagcatagctctattcacacaaaaccgccacagccacctcgtaatccttagccatgtccttcaattcgaacctagaacatctaccctacgacccagcatacgcactccgaaagaactcatttccccctcgagaatgcaccggtgtgccggaattttcctacctccggtcacggcgaagctgggtttggtgaagaattcaaaatagaagagagtacagattctgcgataagcgatagaggccaacatcggaaggctcaggctccgatgagacttgccttaagtaacgattattggttaagacctccttataaataatcagaaaatctagttttggtaccatgctgctaaatcccaaaacttgctataaacataaatcggacctccatagctagatggactcgaagggtaagaggagagaagcttaaaggagttggggttgggttgacagtgaattaagacaattatatatactttttagggatgagtgctcattacaacctcttaatcaaccttcacgttacataaaattccgaataatttaccttactgaaaataaaattcttgatatttcagtttaccatgcttattcaaaaaacatcaaacgtaatttcggcattgtaaactattcgaaatttttcaaaaatttacagtgattatgttgtaagcataaagaacactcccgtgaaaaaaatttgaaaaaaaatattccgacaaatattttcgagcataaaagtagactaagaggttgtaataagagattaatagtaacacacatcgtactttaggtgcttgatatattttattctaatttatttcagtaattttatttgtaaaattttgtatttgtaaaatttgaaggaatttgaaatatatcaaactttcttttcaacttgttaaaatggtttgaaatttttaaattttatatttgaaataactataacctacaattaaactagaaactaaaaaattctagtgaaatagataaaattgttatactatatatatagtatatgtaatatagcatatacaaatgatatgaaatgcggaaaataaaaatgtaaatcat

SEQ ID NO: 300756 - DNA, 856 bp, Cannabis indica
aaaaataaaaataaaaataagaagtggtgtacgcaacagatgacgcataattgatttcactaataatatatatgcctgaagatacatagaatcaaaaacttgtttttgttgggtatatagaccagagatatatataattccaatccaatgtttaatgctggtgcctagctaatattattaggaatatatagatgatgcatttattattgataattttttatgatataataattattagattatgtagaattatttgatattaaattgcacgaataatgacacttcaagaaataatattaggaatcatttataaattataagattgaattaattaatgtagatttcatggagattgttttggactggacgcccattcagtacttttaaataccaacccaaaaccactagatcataatttgtacaagagattaagatcagtactactctataaatcaattctgacaacctacgaaattgttagggcatatccttcttctgtcaaataattaaatcacttgacaattataaaaaaacagaatttcttatattaataatttcgtgcaatccatcggcaacccacaactcccattcccaatatcactgccattaatgaattacaaatcagattgctaactcacacgtacgttagctaactaggtgatcagagttgaattgatcaataatttttgcaatcttatatatataataataaaaaaagagcattgctattgggcaccagtggtgcctagcaccttctaaatgtgtcgacttgcaattggctagcgatactctataaaaattattatattaaactatatgggacccgatacttaattgcaccaatagcgatattgac

SEQ ID NO: 300757 - DNA, 1936 bp, Cannabis indica
ataacttaatttcataattaaatcctaattatttaataattcatcatattaaaattatacggtctttttaactattcccacatatacaaatgcttgatttactcagattattatgggatttgagatctgtctagatgatagtttctgaagaattagtctttagccaatttagctctgacttgatttggattgtatgatagggagatatactccgcctaggaccaaatatatacaatatagtttattatattttcctttaaaaaatattttgtgaaaagaaaaagacataaaaagatgtttattcttttttaaaaaaaatcaagttgtttattcctttaatcatagaattaaatgaatgttttaaaatgtatcaaagcattgttattgggtattagtggtgcccaataccttttataggtggcgttctacgattggttagcgatattctttaaaagttattttcttaaattatatgagacttaataattaattatactaataataatatggcatggagaaatgtgttaggtaccaataatatcttctagcaattctcttttaaattaggaaattaacatagaactcttcaatagaagagttgttatattattattatatatatatttatataaaatatataaaaagtgtgacaaactatattttgtcatgtgattagaagtcaaatgtgtagatgctagccataatgaaattattggtaaaaattaatgattttgtggcactcgttcaagtttcaagttctaaccagaaactaaactttataaatggtgatcatattgcttactcattgtacacttgtaacaatgttaaaaaacacagaaaatattgcgataataacattgataaggcactaggctagagcatatataggatttgagagtttccctggtatttaattgaagaaaaaaaaagtctcttaaaacaaaaatctagaacattgtttaaacattgtatgtatctccttctcttctttgtgactacatattatagtcttttatattatttccaaagtgttgtaattcttcactatttctctcaatagttattgccatgtatttttttttttttttggaaaaatgttgtcatgtaatattgatacaatacatttatttgtaatattgagtggttgtagtaactctcttccctttttaagtgtaatattctccgacaagaatgaggtacttccactaaaaaaaaaaagagtaaggtactttatcttggtgattggatgtgatgaaattttggaggttgaaaagaaatatattatagataaagtttcaaattatagacctctaaattaagatgactgagttaaagtttaaaaattaattgcttcaaaaagaattttttttaaattaataaacaatggtcgaaatagtaaatggacttattatggttggacttttagcttttgaggaagagcttcttaagaaatctgcagaagttgacatttgttaggagtgctttttagtactaaaagcttaaatttttacctaattaaaagtatttttggagtttcaaaaacttaaaagcatttttaaaaatccaaccaactaaaattagtgttgttcagtaactattaaagaataagttttagtttaattaactagtttaaactaagaagaaaacaagaaatttcgtttagtaaaactaagaaaaataaaatattattgaataactcttaagaccatcttcaattagagatataaaaattgtgctatatatttagcacaaaaaaataatcttgtaatatatttacattaattttagtattgtaatacacaattacaaaacttaatgtaaaatttaatttcaattaatatttttatttaaaaaataataattttatcaataattttgttatgtaaaaaataatatatctttatatattaaaagtgcctatctaacggcatttctt

SEQ ID NO: 300758 - DNA, 3908 bp, Cannabis indica
ccaaaatatgattcaccatcaaaaaataagtaaaaacacacttgaggtgtctgagaacatgcacaactgagaaccgtcactttgacgtggtagtggttggatttggagctgaaaagtacatactatcgttcggtaaaacaggctaaactctcttaatttttatccaaatgacttggtttaacttgaattaattggaaagatattttcaagacggatctaagtgtgcctcatggtcatagctcaattgtgaagttatctggctcaaaattggctcacaagaccgaatagcacactttacttgagaattgattggttttattaagtgtgagctacaacaggatgttggaagagctatgccacagcccatgtggcatcatgactgagattcgctctcgctcttggatcttgggcattgccttcttttccgggtataatggctctaagtttatttataatgttctgctatgtactaatctcagtcgtgattcagttaaggatagttgtactaatttttgttcttgttttggttgagtgataatggtgaggaaagcacataggccatttgtcacgacctgagtcttaggctgtggcagatatgtaatacccataacttagatagtcacactttgacctttgttatgaaataatgcttacaagtgatttttaatttatataacaaacttatacacattaaaataatagaataactcttataataaataaaaaataattgcaataaaataggaccactcgtcaatatatatagaacaataatattctcacaaatatgtagtcaccaaataactagatttaatagtttgtaaaactccaaaataatacttgttatgcctatatttttagccataaatacgaacactacacgtgaaaagttggacacaaaaattgtagaaattaagctcaataataaatagctttagtcttgcatatgacattggtagtaagatcgatacataagcaacatatggcgagatgataataatagaagtcttcttggatacagtagatcaagactgtattgctggaaagggtagataatgagttctctaaagagcttgcaatttattgacacacgtactcgtaagtttgttgaaaaactaaaagaattaagcataatataatttatttcaaatgactaagcctaagaattaccctggaaaggctataatgaggacaaacatttcaaatatcatcttccaaaatacaaccagctattccccgaacactatcgaataagagccatttctaggatgcgtcatctcagtaagagcagactgcttccaattaaaatcaaaagactgcttccaaaaattttggaactaaaattgtaaactttaactaaattgaggcaacaagaaatccatctaagtattattggagttttctttttcccttataatttttcattcttgtctcaaagagacttaaagcgcactaaaattaccaaaaacagagatttctcaatatttctcctaaaaaacaaaaatcaagcataaatctgcacaataaaataataaaaacactaaaatacacactaaaatagactataaagataaccctaacaatcatcatcatcatataaataaaatagaaagaccacaaataattacaagagacaagctacccgtgcatatcacaccatctactagacccctagctctcaataccaatcatagaaaatgacattctaaaccggatagtcgcacttgataaccaccatattaccgaggcttggattcaattcacttcatgtacaaattctaggtctttcacctacaggtgagtgcacacccgatctacctatgataacacaaagactagttcgtggaacaataatatgtacaaaatcatgatcaccatggctttcattagtaatcaaaatttaaccaaaagtagacaaacaagaataacaaaagaacatattctctttttagtttagaaaatcagacaacataacagctgtagtttgaatagatcaaaaaattataacctgcataaataattatacaaaaatatatttggcatttagtgtcccagaatagtttagaaaaatatgcagattaagtttttaattttttaaatattttgtagatcaataaaattggaatatgtcaaatgatattcatcacaataaaatcaagcccaataatcaagttgagtccctacctctttaggatcgtcaaactttctccaaaagagacgctcctaataagcccccgattcttaagctccaaatagcttagttaaatcaaaagtcactttgtatactctgatcaactgaataaataattattatcattgtaatgtactcttcaaatcgagtcgaacgacatataagatgactatatttgtagtttaaagttctgaaatctcgcctaatcggtgcataatagcgatcggtggtggtagaaattggtgtaccaaaaatatcaccgaacataagggtagtatatattaaaacaaccttcttgacaagcagatcacgaatgtgcattccgttagcctaaacaagcaccagaaacatcactgaaaattggtttcaaagttccagagatatccaaatctcatcaggaaaaagtagcgagctgagtgaaatgacttagtggagattattctccttgagacgatgattccaatggaaccaaccattcgttaaatggtcgctagagttggtttcaatgttgattagaagttttaacaacgagactttggagttttcgtacaagcacgtcttagcttctgtttctatcaaactcggggtgtggggtcctcgctggttggtgtgatcgtgcaactctgacatgtttcaaaaatggccgctcgaagggtgatggatctaagcttaggcaatgatagttatggtgacttttacgaaagaaaaagtaaaagaaataaaagaaaaaagagaaggagagacttgtcggaaagagagagagaaaaaagtttttttttttttttctttttgtgggtcccacaccctttatagaatatatataattttttttattttgtatttaacctttttgaccagtactctcacacattgaatatttttttactctgtaattttttttatgttaataggtaatgtggcaacaatggttataagtggaatttattcaagaattataggtgaaataaaacttcacttacgaaaaagtaaaaaaaaaacattttttttatttgtatgtgagacaaaactttattttgattgatcaaagtcattctttaaaatatgaacactaaaaagggtcaaaacaaaatataagaggaagtagtcctatataaagggtataactgtcattataaatttttataagaaaattttatttacactaaaaaaaattaaaattcagctttgagttgtcatatcttgtgtgtgggttacataagttgagtatttatttttttaaatgttattacaacaaattatattttgaggctctcatgaattggttgagttggagttattcgaacactttacttgaatcaccatcaagtacaatacaataggttgttaaaaatatactaagccaaaagagatgaaggcaaatacatgaagacttgtgtgtagatacaaaaacaaaaaaataaaaaataaaaattataaatgcactccatttaaataatttttattttcaataaaagtatatatctttaattatattagtttctcttaattcttttcttccaatttatattcttaaaaatatacttatcaaataaaaataaattatatttaaaatattataataaaaaaattatgtaaaactttattaaaaaaaaaaaattgtacatgatttgaaaaaattataaaaatgaatattaaaattaacacaaaataatatgaaaaaaaaattaaaaaaaatattaggagtattttaaaaaaa

SEQ ID NO: 300759 - DNA, 3731 bp, Cannabis indica
tttttttttttttttcaattgcattctactttgtcttaggtttccttttaaataggataggacattgtgttttaaatttaatcatttaacatatgtatagtatattattgatgtccttaatacaatttgatgtgttattgtgttgctatattaattttctttttaatctttacaggacataaagcggagggaggatgctatttctaaaggtaagcatctggtcataagtaacaggaatccttccatattctgaatctctatagtttagggttgactaaatttactccctatactatttccagctggtgttcccattgacgataaaaattggcctccattctttccaattatccatcatgatattcccaatgaaataccagcacatgctcagaaacttcagtatctggctttcgcaagttggttaggtatgggaattccagtttgctgtaattagttattttaaagtgtgctccgatttgattctctgcatctatcttattttttttctttctcttttctgagagtgctaaccacttgctggatagtagccttaaatgtatattgccaagctttgagataataattttcttcaaatttgactgttaaatttttcacattagcatttatagtttttgctcgtagaattttgtatggtgtatgctgtatgctgtacagacatcaactattttggttttgttaatatgcttcaactgaatttatcctaacattctttgtatccttttgtttcttggtcatttatttatcccaaactaacaattattatgtctgatcaaattttaatgcaagttgtggactcttgttgtctgagagtttatttaattgaaactttggagtttgcttcaactgaagtgatgtaatcttctcctaaaggcctaaaagtacatcaagttaagcctaaaagttgttatattggctctctaggtttgtttttacattattaattacaatgctagataaaaactctccctttctgtatatgctaatttgaagttggatacgttttgctccaaacattatttaggctttagtcaaattcctgtagtcagttattgcattataattttgagcttacattgttgctagtttatgcacatttcgatgtatacatatatatatttatgtaatactcatcttaatgttgtatttacaactattacagagccattgttgaatatatatttttaataacacttatgttacatctttaacaactcattcgcattcctttcaatgggttttgcaggtattgtcctgtgccttgtgttcaatgtacttgcggtgattgtatgttgggtgagaggtggaggtaagcatttattttaaagataactgctaactataacaattccaagcttatgggctataatgcagttttaaacttctgatgtggttttcaatcttcaggtgtaaaaatattttttcttgcaactatctatgctcttcttggatgccctctttcatatgtactttggtataggccattgtatcgtgcgatgaggtactttgtaaccttgtcagagtatgatatgctttatcatatttgtatctactgagatagaatatttcttgttaggattgataaaataacagagcaaatatcagagtaaaggtttttccatatcaagaaaccaagttttgaaatgacttaaatgtttaaactcaacatatggtttgtaaattgacagttcttgtaatcattagcaatatttattattatatatatacacctttatgataaagttctgttcattcttttttatacctttcatgtaaatttaatctatgctgaaggtgagtgaaaaaatagatcaaggaaatttatgaatttctgcttccatcacctactacctagcttttttggccatatatagcatatcttatcatgtttacttccatgtcctgcatgtgaatgagacacgtaacagatgattttgggctgagtagtttttgcttctctgagattgctgtttttgaaggcctgttggataagatgccacattatgaaaacaagggccctctttttccagtttttgtttcaaagagaataatgacatgattgagttcttttatttatgtataaaattctgttcacttataagaatacttcttttaaatattttgttttgtgcctaaaaggattatttaagagacatttatcttttcaaacctgcagaacagatagtgcattgaagttcagttggtttttccttttctacttggtatgttccatgtcttttaatgcagtgttgtgattattcatcttatcttctatctattaatcaactgaatgatgcagatccacattggattttgtatctttgctgctattgctcctcctattgtcttccacggaaagtctttgacgtaagtattagcattcgcttgtgctttaatgaagtgtcggtgtgtttctgggagggtcaccagtgagggtgtggtcacgtcttgcgttttgtttttctttttcatgggattacattccattagtactttagtaacaatttggaaaatattttatatttttggatttggatcttttatatagccgttaattcatttaccagtgtcaaagtgtggtgatggatttctaattttttcttactcatctgttccaattatcgcagtggcatacttgcagcaattgatgtcttctctgaccatgttttggtgggggtaagtttatgtgcatgcctgctattcaccatctttaattttgacacttgattacatttgaaatggtttgcctgctaataggctgttggtgtgtgtatgcttgtaatcatataatatatatgtatacatatgacgactggacgtttgttctttccctatttccatgtatttctatatcataattttatattcataaaaactattgttgctgttgcacttgattgcactgcactgtagagtcttagatgttggtatctttgaacaaatgtctaatctttagaagtgtttttggttaactaattatcttccaacttccaacttccctgcagatattctacttagttgggtttggtctgttctgcttagaatcgcttctaagctgttgggttcttcaggtaagaactactctcatgctctctctatttttaatcttacattaccttcaattctatttgtttataatgaatctttgttagtttcctaagaaaaattgccatgaagtatgctgtttaattatgccaaagccttatcatccaaaagagaaatatgcagtttaagttcttagatatgattctgcttgtatacataccaaggccacagtttcagtgtccgtatcttgatataaatattaatttggactttttgtttatggggaatttattgtacagaggcgtattatatatttatctgattatttattcatttcgtttgtgtgcagaaaatttacatgtatttcagaggaaacaagtgaggaagaagggtcgtgagaatggtgccatgtagagtcatgagctttttctaaaggctttatagtatattcttctgcatactgttatgtttgtcgatttctctgtgatcattattgcatgagttggtgcaataattcgtatcctaaatacgttgtaggaagtgatgtcttatatgggtattaggaatttattgtgttctttcttgacattcaattttattatacatatttgtttattattattattattattattattattattatgctgtcaaataacttatccact

SEQ ID NO: 300760 - DNA, 2546 bp, Cannabis indica
ttttcatataattagcgtttagttagtttcttgtgtggttttcattcattttttttttttttggtataaaacgagttttggtaaaatatgcatttttttttgaattttttgttaatgtttaataaggttaaatagtggttcgatatgtgctcgataaaagtagtgtctaaagattagggatgaatttcaatgctacccatcgaatttttaaagaacaaatatcacacaactatcaaatgatactactgtttgagaggtgtgatattttgttctttaggaatttgataagcggttagatgggattataagttaaaaaatagtaaaatattttgggtgcacaaaattctcttttgctgccattctttctgttttggtgtgccattcactgctattcttttgctatcaagaccaaattagatgacacataacaatatctaaatttagttctgtattagaaaagaggacaaaaaaaccaaaaacaatatatagatatactgaaatggaatacataaaaattctcaaaaatccaatagttagagtaagaagtgtgaaaatctagactcgtacaaactgaaaagaactaactcttcatatatcctatattgtccttctatatatataaaatacttgaaccaaatttacaccaccaccacaaacacaaactcccaccctccctatccacacaaaattattattcgatttatttatatacgacgcagagaggccaaccttttctccagttcgtctacgtctggagatgcagaactgcatacattacgaattaggagtttagaacaaacagacacactgcaaaactcaaaaaaagtgtcttaaacaaatgcatataataatatatacctggtattctcagcagcagcagtcttggttggggcagcggcagtcttggccggggcagcattttcagcattcctggatgcaatcctgccttttggtgctgaagataactgttagcaacaacaattacgatcagactacgaaaattatatgcaagaacgaactacaaaactacaatcagagtacaaccaacctgagatgcaatgtcaacaccaatttcgtctagcacctgcaaaaatgaaaggcttagtaaaagatttgatgagggattaagtcaaaaacctctaagtgaaacgaaattagactttttgaatttcacctggttagttagctcttctgtttcctcctctgcttcgtctttgtctaaagtctcgtcaatagcctctgacatcatctcgatctgccacatagagtaatggaatatacatacatacacacacacaatcaaactcaaagcgaagaaacaataagaaacaaaataaatcatccctttaagcaaaaaagccttaataattaccgtcatgtctaattgtgcagactgcttctggaattctcttatcactttaacttgtttagtaggtgccatttgctgaaacataaaatgtcaaaaaaaatcttcacttagtcatcttttaatatatatatatacatatatatatatatatatatgtcacagaaactagaaaacttgtgggaaatgagctcatatacatgctactcctaataattccattaaagaaaaagactttaaaatttctaccttgctagttgtgtgcattctcatcatctctatctaaacagttatacatacaatgctgctactccagcaaccaaaattttgtgtgcattgttataataacgcccactaacgatatacaactcctaataatttcagtaaagaatacagactttgttcattgccacaaacaaagtagaatttaataattccaacaaagacttaaggaatttaaaatgcataccttgttcattgccaccattgctttagttgcacctttcattcctgtagaaattgatgtgctggcatatagtgcctgagaacaaatatgaactgaaaaagattaggaagatgaacagatagataaaccgtcttttattcttatgttcagatttttcgagtaaatggccaaacaacctgtgtgtgagttgctacccctctgatttgggcacgactcccttgcaaattagttatttgttgacgtagtcgaacaagttgacgggctaatattttggtggcagcctgtaaaagaagaacatatacaggttcttatacacaatgttttatggcatagaagtgagaaaatatatataataattgggtgagacagacttgcctcatttccagttttagctgttttcttgatttcagccactaatcttttttcctgaagacaaatttaaggcaaaataagtaatctccaaaatgaaaatttgaaaggaaaaaaggaacgtgggaggaaacatataacacctctagctgaagagatgcaatctcgcgttcaatacctggcagaagaagaagaagattagttagttgcaatacaacataacattgtgatgggaatttcctatcatttcggtacaaaactgtagcaaaaatagagataatagagctgatatattgatattggaatgaaaatgagaacaagttagctgggtattcgagagaccca

SEQ ID NO: 300761 - DNA, 1589 bp, Cannabis indica
tgctattataaagtgtgatacaaaattaagtgattaattctattatgtgtatcaaaaaaatagtattaaattgtcatggaaataatgtgtagataccataagttaatttacaatttattgaggaaccaaattataaataccaaaaacttattatataatgagtctataaataagttttctatattcttttgttagtgctttcgatcatcttttattatcttcttttttgagttagcaaagattttatatagatttatgatttaagattttttatattaaagcacttttagaaatatatttagatcagtaatatatataaatatttcttgagtgttttataaatcctaacacgtgaaacaaagtcgtttgcactcgggatcttggaggccattgatcaatcttactgccattttttatttctcccctttagagtttttctttttccaaatcaatagaccattttgatctattctttcattcgaaacgatgttgtttttgtcggagtcaccaaacttttgattgctgaggtcgatggactaggctgccagagcgcagaagattttctctaggtgttatttttgcttcaaacgaaagagaaagagacattgacatatgagatttttggaatgagtggtatactatatagtaatatgttttctttttggaagaaattttttggagtggtaaatatatatattaaatagttaaagaaataatttaaatcataaattactataaatgatatattaaagtattttttttcttagtactatatttgtgcaagtattaagttatggcacaccaaaaaggatagaagaaaaaaactaaaaaagtcctaaaaaaagatatataaataagatggtgcataaatacacatataaaatacatatgtaactaaaataataaaaatgttattgaacattttggaaatataatatatacaaaaagcactgttaaattaatcataagaagtcttaatataataaataaaacaatttagtatatcttttttatttacttacatataaataattgacaaaaataaagtaaaaataaaaataaatttagacaaatttaaagaacaatgaagaagttgccacttcaccattttttagtcacactccattcctaaactctttattttgattgttcaatatatgtatcgtgactaaaaaacatcaaaatatcaattttttttttttttaacaatgatcatataattaataaaaatatcaagcattttaaagatatatgtattttactttctcaaaaaaaataaaaaaatatatgtattttagaaaaacatatgtcaagaattacaatttatttcattcaactttattacatagaatataaaatccatgtttgttcccaaataattaaatagttgagaactacaaagctagctagagtaataacaaatagacaaaacaaaaaaaaaataattgaatctccaatttttaattctttgactttgatggaggcaatagtcgaagaataaattttcattttaagactcgtttggaacaacatatttaatcgtattgtattatattatattgaactgaattatatatcatattttatat

SEQ ID NO: 300762 - DNA, 2121 bp, Cannabis indica
tcacctaattctaaaaaaaaaaatctcttttgaaattacataatcttttctaaaataaaaacttaataatatatttttttttttcatgaccactaaattttaaaaccaatatataatttcaaagagcttagtaatatgttttttaataaataaatttaaaaaaggggagatgtaaatagagagagacaaagtacattcacaataataatgggcaataattataataactacggggaatgggtaaatatatatatagggaaagatgaatggaacatatcaacagtgggacccattttatttcactcaaatccacatctaactccgacacctcccgaaataggagacacacacaacaagattcacaatcacaattctccccatcccaaacgctgtcgtttcgactccaaacgacacgaccacaaataaattaaataaaaaccaccgtcaaactcaaatttcatggtgctaccgacacacataaaactatacatatagaagatcatgtcgttttgggaaaatattatataatcttttattaattaaattaaattattttaaaaataaataaataaaatggcttaggcttaagcttacagagaaaatcaatgatgaggcgtccatcggacaaccgaccggttgatctgttgaaaaacgtacggccattggggaggttgactgagaatccgagtcccgccaccagtccacccgtgtccgagttagagtcgccgaagttgaagattaccggcctgtttttgcactgagacaccactggattcaccgttgaaaggaggaggtaaatcaatgtaaacagagtgagaccaatggactgagaacgcgaataggaagccatggccatagatgtgaacaggacagagttttctctttagactctgtagtactctgtttagagatttctaaaagctatgggttttataacttttgaagagaaagaatgccttcaaatataagtttagtaaattgttaaaaagaaataataagttttagtaaaaaaaactagatcctcaacagtaaatttataatttctcttgccacaccaaaaaaaaaaaagatttctctctcaaataaaaaataaataaaataaaaaagaatgaagaaagaaaatggctatatttatatcatattaacacttttttcaatactttcaaaaaacactttttcttaatattttacaatatattcttaaatttaggcttttcttctaacaaaatttctgtttttatttagttgatattgttagttacttattttttgtgctactgttaatttttttttttaaagataacaacattttttttttattttatgtatgattgtttgataataaacaacttgaaactaatataacaattttgtttgtaccatttctttgtatgaaagtaaaaaaattaatgatttgtttaaaaatatacatggtaatgatagcctagagtttgttactacaattttttttttagtaatgttgtatggcatcacacatttaggctatacttgctaggagagaggaagaatatgatggagagttagaaagggtaaggaataggatgatgaaaggatagttgatttttgtattgtttggtattaaaaataaaattggaaggatagagattaaaataaatattaaattattattttataatttttaatacaattatatattatttttaaaatggtagaaataaagacattttatattttgccttttttgttttttttttctttgaattctcttatttttgagagattgaaagttgtgtatttggcgagagagggtctccctctatttctcatctctcttctcttcctaaacaaagaaattcatcaatctctctatccttctctactcttctcccttcattcttctctcccctttatatatatagttactactacaaaagtcagaattcgtgatggtcctaaaaatatttttttaggggactactactaaaaaaattaagtaactgtataggtgacagttttaaattgtcggtgttaaatcgttgggtaaaaggacccaataaaaaatcgttacctacttctcgtcatatttcccacgtgcccacctactttttttttattttcccacatgcccacctatttctt

SEQ ID NO: 300763 - DNA, 1774 bp, Cannabis indica
ctccattcccatactcacgttcagcaactgactcactttcagattcccacatgatgatggtagtaaccaaaaatcctggaaaatctgaggtgggttttctttcttctcaactcagactgaaaattcagagcaaatatataaaaaaaaaacagagaaaaattaaattttgaaagaacataaaataaaaaagtcccacatgggatgcttagaataatcttcaagtgtcggctttaaaaactgaattttcatttttgaagagcttaaaataataatacaggctgtgaagtaatgggcatacttgttctacttacttactgttgtatattggatcatttcatttctattctcatttttatttttatttttattttttaacattagaaaaaagggaaaagagaaaattttgtaatggagtgagttgaattaaaatggtgaaaatattatttagaagaaagaaattaggaggaaggaaagtggtgctttatggagcgtgattgttgttgttttgtgtaaaagcaacgtgttctggtcccggctgttttgatgttgttgttattattatcaatttgtagaattttgggttggattttgtttggggttcacttacacttacattacatataacaatttattattataaatattattctctaggaaaactagaaaattaaatgcaacttttacttattattattattattattattctcttaattaactcaatatttcatcatccattattgtcgatcaattttgggatttcaaacattttaattggctgttactgtcttcaagtttgggatttaatttcaaacattttagtttaagatcaaaattataagaattaaaatgagataaagactaaaaaagctatgaataagtaaagaaaagctttaaaagcttaacactgttatcattatgtttaatgtctagactctagtagggaggaaagaaatacaaaaataaatttgaaatgaaaaaaaaaaaaaataatatatgttgtttgatgagcaatagaaaataataacaaattattttaggaaaatgaacaaaatacaacctatggaacatatttgcaatgaatattagtgggttttttagaaaaaaaattccgagggcataactctccaaaatcatagtttagaagattttatttgcatacttacacactatgggatagtgtgtgagttaaaggtggcttctttagaaaggagtagtgctgtaaatacaaaccaaatattgtgatatgacacaaattgacactagtttcggtagtatgagcacgactagacacgaaaaaatataaatttggacacgatacaatatgatgctatacattagtacgatacgacattaaaaatatatgtttaaacacgacacgatacgacaagtacaaatgacacgacacgtaatcacgaatagactagcccgaaaaacgaaacaagcccaaaaagcacaaagcatattaaaaaatactataatttaataataataacaataaataatatatatttattaattataaataaattaaactaataataaaacttaaatgcatatagtatagttttataattaaaattagaaattaaaaagatatatttatttataaagtatgacataaaatttgagtttgaatatttataagtaaatattaaaattttaataatttttaatatgaatatgtgtaaactattattgaaaatttttatctataattaaatttttgaataatatatattttagtaattaattcattacttgtaaaaataaa

SEQ ID NO: 300764 - DNA, 1429 bp, Cannabis indica
acaacaccttacaatctaatactattaccgagcattttaaattaaacatgatgacaagaaaaaataaagaaatatttaaataaaacaagagagaaagattgacaaaaattaataggcgtcaagtttccttgacatatagaaaaatgtaaaggcttacaaagatttccgacagtcacatgagaagaaaattctatgctacttaaggtgtaggcatgaaccctttgcgtggcggataaggtccatttatattacaacacttgtatatcagaacagtgggtcctagttaatgatttggtacccgtgttgatatttattttattaagctatctacacgccaaactacataataaatttagcccagctctctttgaaaagacccaacacttgcccccattttgaagttgttaggaaaggccataacttattcaaatattcaatccacgaatatacattattttattaaatgtatatacatgataaattaatatgggttagaatttggggataaagtgtgattaaagtgaatgagattttattttaaaattaattaatgataagagaagtagtttattcatgctaaatataataatttatttctacacattagtaatatgagactatctctaatatatcctcttcacattttgacctagaaagtgtgggtgtaacaaaaacctttaagagaccgcatgactgaaacatgatatttgaaagaatcccttaaggctaaattgcaaaatttgtgagagtacacgtcgatcaatttatagatttttaacacaacccaatactaaaaattgtcaaatattgaccgaaaggtcccaaacggaggttaagacggagacaacggaagtttttaactcgctctgatactatgttagaatttagaattaagatgggattaaggtgaataaagtttcatctcaaaattaattgacaatgagagaagtagttcattcatcctatctatgacagtttattttcacacattaataaagacgaatccactaataataatgaggggctataaccctacgaacaaaaattttttattttttgaaaaattaaatgtaaattttttaatttgataattgtatattaaattagcagaaaaaaatcccacaaaattaaataaatttagtaaaagtaattattaattataattaatatttttttttaattataaataaattatcacaaaataaaatttctgatcactatatgacaatttacactacacaattgttttggttgttctgcgcaaaacatacatttttcttcgttaaatattttgaatttaagacaaagaaagactaaataagaaaaagtaaatgattatgtacgtgggaaaccatttccatacaaatatagattactaataataattacttttttttagtaataactaataataatctatatatatata

SEQ ID NO: 300765 - DNA, 7836 bp, Cannabis indica
tatataaatttcaattgttttattttacataattacataaaaaaaattcttattatatagtaactaaaatttaacataggaaagttgttatgataaaatttctatatatatatattattttctaatatatacattcttaaaatatttatatatattattgcaaagtcttaagagtcattatatttttatatttttatttctcattttgtatagtggtttgtagtagaaattacgaaataataaattttattaaaataatatatataatttaatgactcattttttatttaataaattcaatattcaattatgtatataacaatataaattaaatttatatatttgttatacatactattactgaaaataaaagaggaacaatcgatattactgaataattaggtaatttatcagataactacatttgcaggaagtgattttttaatttttattaggcctgggacaaaaattttaaaaatgttattttatttagagtaatttatggtataaatatttaattttaacttttagttgtaagtaaatacttaagtttaatttttagcaataataaaattaatacctaagttataattctggaacttatgtaagacctaactataaaatgttaagcaaattatcacgtgtcaattcttaatcggtacaagtgattaaatttttatttttaaaaaaaatagtaaatataccaataagaaaatgacacgtggataatgactcgacatttaacggccaggtatctacggaagttccaaaaatataatttatgtattatttccgctaaaaattaaacttaagtaattatttacaatcaaaaattaaacttagtattcttaccgtcaaattcaaattcaggaagaatttttaaaggtcaaaaaaatttaggagtcataatttggtacatgacaagatttagtctataaactaaataaaattagacaaaagttgaatcttaaactgaatgaaggggccaaaaataattatcgaattagtaaaattgaatgaagtcaatagctcagggagaatttgtaatgactagaaaagttcaggaatcatgattttgacaggtcaaaaatcctaagttggccagtcttaatgattcaaattattagtagttttatatttttttaaagaaaactcaaaacaagaagctggaatagctcagctggttagagcgtgtggctgttaaccacaaggtcggaggttcgaaccctccttctagcgatttttccttcttttaatatttcgttaatttccattttaatcaatcaaaattaattttaattaaactaaaaattaattctatattaataagactctattacatgcaaatatatttggatggaatttttaatatttttattaggaaaattctataatgtatccttttaaaaagagggatacactgatacatctctatctgttttaatattcgaaatgattttttactcaaattttttcttatggtcatgtaaattatacttatttaagacatcttgtaaaattttaagaaattcaaaaaaatttaacacgccaaaaattgcgttcaagcagtgtgttgcacgcgtgactattttattttatacgcgtgtaaaatagactgttttaacattattttctatattgtaaattattccaaatttcttaaaattttataggatatgttaaatagttataacatacatgaatataaaaaaaaattagactaaaatatttttctgggtgccgaaataagtagaggttgcatcaatacatcctttttaaggggtatattgtagaatcaccctttttattatatctgtatttaaagttttaaaattacaaaaatacaatgttttagtaaaagaaaaaaataactaaaaaataacgctttaacaacttaacaaacaacataaaaataactataaaacaataaaaacataactacaaagcaatataaaactaacaaaatattgacctaattgcaatgaacaaaataatatcaacttcttaatatgtttttgtatagagattttttgttgttgaataaattgtggcataactctcaatactattactttgctagcaatgaacgcccaatactatcactttactaacaattaactctcaaaattaaattttgtcagtaaaattttaaaaatttaaattttgatagcaaaaagccccaaaactcgtagcaatataatattttcatcaatttttactgtcaactgccatgtgtatatattgtattatccacatagacacaatatacacatagtacaatttaatttaattgatccacgtaaataaatatataaaaataaaaaataatttgaaactttaaaaatatttttttttaataaacagagaagctctatatctatctctggagatttggagaccgaagcctcagacaaaacccacttgaaccaaactaggtcatgcccccatggttaggccaagaatgagctcttaaacttcaatgttagagtgccagaatcgattgatcctaaaatagctttttgaccattgctttgacctaaaattttttattgacatatttgataaaataaacaaaaataacgactatagtattttcgaaattggttgtgtatttgcttttattagttttgaaaatatattctctttttttagtgtaaacaatattttaaaatatttaaaatttcataaaattggatttttatttataattatatatttgtattttctttttttaaaaataattcccttgtctttcttttgaacaaaagggctacacattaatataataactaggttaattagtaattttttctcttcaactttgacatgtactaaatcatgcctcttgaatttttttgttcgttaaaaattttccctaaactattaagattgttagatttaaaatttttttgtctaattttagtaaaaaaattctaacatgaatgaaagttcagagagcatgatttaatacatatcaaagtttgaggagcatgatttgatagatatcaatgtttggaaagcgtgatttaatacataaacaatcactaaaacagtaaaattgaatgaaattagacaaaaattcttaaatctaacaatttcaatagttcagggagaatttttaacgaccaaaaaaattcaaaatgtataatttgatatatgtcaaagttcatcattatttgggcctaaccctgtaagctttaaacatgggcctagtccaagaagactagcctgcatcagatctaacactttaacatattaatagtaacaaaaatacctaaaatgtaatattcaatatttaatcttttaaaaaatataatatataaatatatgaaactaaaaacataaatttgtgctaacaaataaccaaacatagtagatctaaattattacacacaaacagttaataatatgaaaatgaaatcataaaatcatatatatactatatatataataacaacaacaacaataattatacctgagaatagagaagaggataataagattgtaaagtattggaacagagaagggaaaagggaagaaggcctgaaaatgaatggaatgggaggtgttgggaaaagctatatatataaatatatatatatatgaataggaatatttattaattaaagctttgcccaaacccccattcctataacttccagaaaactcattcccttttcctcttgttcctatttattttccttcatctctaaacaaatgtgttcttattgattgattgtagtgaagtgaagtaaagtgatgagtttgatgtaataagactcattcatttatatacaagaaaaagaaaaagaaaaagaaaaagaaagaaacttcatggaaaaaagagaaaaagaaaacgcggtttttggaatatttggatgtttctaggaaagagaagtgagtaattttatagacaagtgggatatgtggatagaaatgatgcacatatatattcaccttatcttctcaaattaataatagaataattattaatgggataaatattattttagattcagtatttttggaaaagttattaattggactttttattttgttaaatgataaaaataaatttttagaatggtataaataagactctgaattgattttttgttaaaataaaatttaataataatccgatctaaaagtgttatgataaaactgtttacattttttatatctatttgtgttaggaattgtcttcaagttggttatgttaaaaataattgtcaaaaattaagctcaggtcttatttttaccattttggaaaatacataattcattttgtcatttaacaaaacagagagtctaatcgttaacttttacaaaacacaaattatttaccctttcaattttgttttggtgaactttttatattatgaaattgtgtttgatatagtataaggtatgttaataatattactactctccgaagtataacttttatgataactcttgggaaactataaaagtttgtgtgagagagaaaatcaatttggaatcttttttatttttattttctttttttcttttataaaaattattgatctctagaatggaatccaaggctatattttgagtcttgaccattttatttttatttttcttttttagaatatgttaaacaagataacttggaaaaagaatatatatagctataaccatgctttaattgttttttaacaataatttcctattaatttacaatacattaccgtagaatagtgatataatttaattagaataataaatttaattttttcaaaaaaataaaaaattagaataatcttttgagtgcatttgaacatatagaattaacaaataataatacgaaatgattaatgcatttgagggtgagagagaccatacaaattacaacacaaaactaagaaattcttctacacttttaaatgagtggatcaaattttcacttaattactaaaccctaatacctatgaaattaatcttgttaccattgtgtgcataaatatatatgtatttaaaaaacaaaagggagaaaagaatcatcaaaattggtggaaaattggaaatgaatggaatgattcctttcctagcttctatcttccttgttccaattttctctttgattaatgcaaattaacaaaagaaggtaaaagaaactagagcattgttgtttgacattttatggtgtcaatactatttattttatttatattttaattttattaattaaaatattaaaagacaaatatacccttccaaaaactttaaattaaaagccattatatttcttaagaatgataatttaatcaaattttagcattctgattaccttttctagttatgtaaataaaataaaataattttaattttttttccgaacaatttagtaaataatataataaaatattatttatgattattttatacctctgaactttgacatgtataaaatcatgcattctgaattttttaagtcgttaaaaattctctttagactattgagattgttgaatttaaagacttttgtctaatttcattcaattttactaatatgataatgtctatataataaatcatacccccaaacattaatatttataaaattataccccttaaattttaacatgtaccgaattatacccttaaattttcatccacattagacattctctagtaaaatctgacaaaaattcttaaattcaataattttaataacttaagaagaaaagaatatttatcgacttaaaaaattcaaaaatataattaaatacatatcaaaatttcgaaagtaaaaattcaaattaatcatttaataaacgtggcataatgaaaatcctcttcaaaaataattaagggaatggtgagccccacatattgatgtttgtctttggattctctcaacttgtactatccacccaaccacaacaaacaaacctcataaaagaagaaaaaaaccttaaagccttacaaacttaaacgacaacaataagataaaaaaaaacctaaactaaaacgacattgttcttaccataacatactattaagttacaataaacgacaatccctatatttaaataattgaaaaaacgacaatctatgaacaaaattggcagcattctcaaatcaaacgacacaacttttcaggcttggccttgggctattgataggcctgtgcttaaggatcgtccaaattaaggaccaaaaaagaaagtttcacatttttgtttgttgtgtatttttgtaaactatgtgtaagtaagactacatatcgtaatttttgtaagtgctcaatttgaaaggaaaacttataaaaataatggaatttgggttaacttttataaaaatattgtcacacgaattttttttttaaaaaatgctgtgtttttataaaacaccagtaaaacacaaagcagtataactcaaaacaacagtagaatactagtaaaacaccagtagaacactagtgaaaacttaacacagtatactgcagtaagaaacttataaaaaaacacagtaaaaaaataaaaaataccgtctggcagtatttttgtaaaaaaatggcaaaagttagtatactatgtaaatttctcatttgaaatccaaccttgttaaactttgagaaaattacaaatttttgagtttttatattatttttttgcaaaaatatgacgttgttttcttaaaaaaattattttatgagagaaattgaagaaaaaattaaaaaaataataaaaaaaacaagtaccttaaggtaatcaaccggacaataagttaatataagggagtaaccaattattttacactatttttctcatattttttgaaccttttttctaaatttttcccataaaataaatttttttagaaaaaaaattatattttacaaacttttaccttaaaaaccataaaaataaaaatacttcttaaaactattttttaaagcccagaagttataagggtcggtctttcccattataaatgtactcatttttttttttctattttatttttacctttattttattactttttaatttatactcaattttataggtcatatcctccttatgtacatttggaactctaattttgataaattatatgaagttatatttggtactttaattataaaagaggatatttaccaattaaaattattttacagttatatttctcaacttacggcactagaagcccggccctgaaaattggtgggctaattttgtacttaaggcccacttagtcgagagctcaattttttttaccctttttaaaaatatatatttttttactaattttaaaaatactacacttcttagcccaatatattttgttttttatgatccactaaaactcagtgccaatccttgctgaaaccgattcacttgttcctgtccaaaccattcaaagctcaaataaaaatttcattaatctttttaatggaggcaatattcctactactgtacatttttgtgtaatggcttatagtttaatgaagtatccaatttcattcaaataaaaatttctcaaagtaacacaacgaattcaatttaacagaataacacattttacagagcataacatcacatttttctcatattataaatcttaatcctcaactttcttaattaaggccacaaagccacatcgatccactattacaaaataatttcccccccttcgatcaaaacttaatccaacataacaataataattatatcatcatcatcatatgcccacccaatatatatttacttcattataaacatgttacccactctaaatatcttgtcctattcgaaaagtaaatctccatcatcatcaatcaagtcgcccaaaaaactcttt

SEQ ID NO: 300766 - DNA, 5221 bp, Cannabis indica
tgtttccccatttccttcacaggttccagcagttgtggtgaagcaagccccgccggccaatccagccatcggttgtctcaagaacaaaaccaagagaacacagggccgtcaggggcaaaggcaaccgaaagtaaatgtaccacttcaggatccaaaaccgaaaaccaatctaaaaatcctagtgctggaggaagcaaggggagggaaattggaatgaatgctatggaagatatgccttgtgtgttcacaaaaggagatggtccgaatggcagacgaatagatgggatcctctatagatatgggaaaggagaagaagtgaggataatgtgtgtatgccatggcaaatttctctctccagcagagtttgtcaagcatgccggtggtggtgatgtggctcatccacttaagcatatagttataaatccttcctctgcttcctttttgtcatagcactatatcatcatcccttttgaaacctggggattcaaaaatagacaacagagaaaaaatatataatattttcttttttttaacctcggaagttttctttagatgcaaaaagtatgtcgtagagttgttcataatttggaagaaaaatttacattcgtcttttctgatgttcccttccaattccattgatatctcctgctttcatcgaaagttgctccaagaaccagacttgtttgaaagacttttccaaaaataaaaaataaaaaatagagagaagtaaaagatgcttcaaataatcagtgaggccaccaacttattcagttgaatatttagtcaataaattgttaaacgtacaagtgtcaagtctacctgatatgttaccaatatcatatgaatcaacttcttttttaaaaattacatcttaagtgttagttaacagatataaaaacatttgggaatcttcaaagggtaagacttgcatggcacctttgaaaactaaatgactacttaaaaaattaagtccggcaaatgagcctaaaataaattagttgatgatggatgtgaaacattgaaagccaaaccacagattagtggcagaaacatatatgacaaaaatcaagaacaacaattctgcttggaattttatttccaattacatgaatcaagatccaatattgatgcaaactccagtagttctcagatctaagcaggacgtgtaggtgttagtgttacgatacaacaagatacaacagaatgagaatgtacaaattgcataagttaaggtatttctagacttctagcagcaaaaggggggcttacgggagagcacagaagcaaaaaaaatgagcccccttctgtactcttctattcctctagtatagaactgcaattttttaatttgttacctagctaatgacagaggttgaattctcttcagcttttgaacaacgtgtttcattgtaggcctgatggagagagtctcatttgtacaagtaacagctaagtgaagcatctccaccagattatcatggggacctgcatcccataatccagcagtaaatacctccttagctcgaccctgtctcaacaacatgcttgcccatgagacgatattgaaaccatctccatgtgaagagaatgaaggatccagtggtttcttatctgaaatcagttcaaggagtacaacaccatagctatatacatcagacttgtcagacactcgacaagtcatggcatactctggtgccaagtatccgaaggtcccagccacaccggttgttgcgtgagtttcagaagtccccaaaagcctagacaagccaaagtcagacaagtaggcattgaagttgttgtccaacagtatattactaggcttgacatctcggtgcaggacacgaggaacacactgatcgtgcaaataagcaagtgcgtgggctatattgagagcaatcttgtggagaatattccaatcagttgctcttgtggatctctgcttgataaagttttccagattacctccaggtaaataattgtatatgaggaacatctcagtttcgctggcatggtaaccaaccaaagttacaagattcgggtgtctcacccttccaagtgtcttaatctctgcatggaactgctgagccccgtgaaaccttcccactgaaagcctctttacagctacgatgattccaggttggatttcagccttaaaagttgctccaaaacctccatttccaatgcagttactggcattgaagtttccagttgctcgaacaatactctcaaaggttaactgagccccaatgttggtgaaaactgtaatttctctcaattccagaccctgaaccctggaatctggcatccatttccttgtataaaggaagaggatgatgagagctatgagaactaacacaatagcagatgcagatgctatggatgcaacttcaattgggtttaatccaccatttccagtgttactgccacttccggattcaaaagcaacagcattttgtgaattataattttcatcaggctcatttgaagcttctactgccaggagcctagagaacttagatgtagagggtgatttcacattggtcgtccctgaaataatctgcccatgaagtttattattgttgagctgcagaattgttaaatttctcaagtgaacaagaccttctggaatatccccggacagagcatttgaagaaagatctaacacttcaagagagtgaaaccatccaaagctatgaggtattggcccagtcagattgttatcagccagggaaagatacttgagatgcttcaaactactcatacctggtggaacttgaccgtgcaacttgtttcgactcagatcaagagtgacaagagaagtcaaattcataagtgttgggggtattgatcccctgatttcattgccagaggcatctaggaatacaagaggtttgcacatgacaccaattttcagaggaatgtgaccagataatctgttgttactgacatccaaaatcatcccatctaatccattgcaatttcgaaataaatttcctggaaatgatcctgtgagtttgtttccaccagcaagaaatgcataaactgtttgcttcccaaatatcttcggttcaactggaaggctttggattgcacctgagaagttgttaccacttaaattgtgaattactgtgaaactaggacgggcaaatggaaaatttgtttccacacgagttttacaagtaaagaacaacttatatggacatgatggttcgtaaaattgaacaagctctggattcaaggacagagatgaacacatcttgccctcatatcttgggacggatcctgacatgagattcccacttacatcaaacagagtcatgcaaggaactgaaagcttctcatctagctccccatatagcttatttgagctcaaatcaagatgatgcagcttcttgcatttctcgaagatgccaacaagttctccttcaagatgattttgggccaagttcaccatttccaagttatgacaatggccccaattgacaggaagcttgccttcaaaactcacccttggcgcccaaagtattcgtaacttaggaagagtcgtaattctttctggaatagagccttcaaaatgattgttctcactacctctatttgagttctcattgtttcggaatggaatgaaaagattagaaagcacgagaactgacaaattaacacattctccgagttcagctgggattggaccaccaaggctatttcttgaaacatcaagaacttcaagcatacgaagttgaccaagctcacgagggatgacaccacttaacatattcgaaaacaactgaagcttttgaagatgccggcatttccccaaacttcctggaataataccctctaagaaatttcctgacagatccagatgctcgagaagatcacaactatttccaaactcagctggaacagtgcctgttagcctattacgagacaaatcgagactctctaactttggaaaaccacccaaaaacccgggaattgttccgttcagagcattaccagctaaattgagaaccttaaggtcttccaatttcgataacgaaagaggaagttctccatcgatcctatttaacccaagatttaaaaccatcaaccttctcaaaccactaaaaccatgtgggatttttccagttatcagattcccctcaaggtcaaccacttgaagcttctccaaaccccaaatctcaaaaggaacttctccactcagatcattataaggaagcgacaaaactctaagctccgtgagttttccaatcaacggggaaagatttcctttaagttttcccttcgaatacgaaccactcctcctcctcccactcctaagcccaaacccattaaagcgggaagactgggaacaagaaaaaaggggttgaaaattacctcgcgcaaccacacgacccccgctgatccttaacgagacgactctggaagcggagtcacaagagacaccaaaccacgaacagtgatgatgatctgagggagtagagttccaggaagagagaatcccagttgggtccaaaaaggaagctttgaggtccagcaaaatcgctttctcggaaagcagagatgctgaaactttcccaggaaccaaaaggaaagcgcagcaaaagaagaagaaaacaacggttttaactatcacagggcatttcatcttctccaaaatccttttcctttttcctcctcttcttcttcttcttcttctctctaatctcttctcttgaattatttgtttctctctctctttttggagtactgactggttcaatcaaagcttttgttttggtaaaggattggtcgtaaataagagtgtgggttccactgtagaagtggggaccaacgcagttcagtcaacacatggcgcgttttgtttagaccaccggaggagctcttaacctttttatctctattatttatttatttatttaatatttttgagataatcttcttttttcttttttaaacactcctcccttcctctttccttgattatgattattgattagtatttggtaggttgggtgatggtgatataccacttttcttcagttttcttttcacactcgtttaccttattagaaacatcaaaaagtgatgcaaccactctaactttcaaggaaatcggaattctttctctcatttttcttttaaatatacatttaggatctcttgatgaagcttttgctttaatcaagtatgaaatagttgatatgcttgttgaatctat

SEQ ID NO: 300767 - DNA, 2581 bp, Cannabis indica
taaccgatcaaatccaattagaattcaaattttttaacatccaatctgatctatttgtaattgaatatctaactttttgtagttggattaaattaaatcaatttagttcaattggattgaattagatcttgtccaccccatggaccaaaacccaagctgactccttgctcgatttgaaagcaagtccatccttagaccaccatgccacactaacaatcctacctaggtcccaattggacgaagctcccaatttcactggacgaagcccaaaacccaaaagaaattaccaacaacatagaataagccatggagaaaaggaataggggcaacaaacaatgccccaaaagaaattaccaacaacatagaataagccatggagaaaaggaatagggacaacaaacaatgcatagagagggagcacatcatgctacgtctgttgcactaatcacatatcccgtccaagctacgcctaagcttagagcgagccgatggtttggccagagtattaaaacaacctttgatagctaaagatttaaaaacgagaaacctaacatactatagaaaacatttccaaatatattaaaatacaaatgtcattttttggaattttaaattgacactatagctaataataaatgtatatatattttttttggttcctaaaattattctgaatttattaaaaattgtaattccaataagatttgagtcatataaaaatattaaaagtaaaattatccaaatgtatcactgtagagtttccatattgttttatctgttttttgtttttttttttttttttgctaggatgttagggataaccttctttttaatttcaaacttctctttttggctgtaaaaaaaagcttatagaatagtcttccatgtacactaaaccaatttaccctttaaatttgacaaaaatatgacattttaaatttttcatatattacaattattaatattttgtgttgcattttaaaaatttctaatgtacatataattatatactgtgttaatactcacataatttcagtacaaattaaaatagcatatttacataatttataattaaactcacacaaaattaggtttttatatttttatttattgttttacaaaatcacatgatgatagaagtgcattgttgagaagcatttaattttttggtcgtgaggagtaataatacagtaataattcatatatatggtaggtgttaacatgttgggatagtgggttactagtttagtacatatgcatgtgctgatgtgcatgtgtatgtgggaaggagggtacgagcccatgaggttgttggtcataataaagacttaatttgagtctcaacccactaacatcccccaacctctcactgtcgtctccctcccaccgacgtgggttagttcacaatatatgtttggcaatgtttccttccattttaaaatagaatagtcattccaccaaaataataaaaagatcattccatattccaatagttttaaatgcaaccaaacaaaggaataaaatgaaaattgttttatttccattccattccattttattagctccaaccaaacaccaccttaactgcatgttcggcattataattaaaaaattgtaatttgtttctaaaaatagaaaattattttttgaaaataattaggcttgtttggctttattttttgaaaataattttcagaaaataaagttacaaagaacaagaattttaaaaaacaacaaaatgttgttttctgttttaaaaacaagtcccttttggtcaatattgtttttaaaaacactaaccaaactcgatttgtaatttgaaacttcaaaaattatttttgttctcatttctaaaacacttttttgaaaacaaaaaaacagaaaacaaaaccaaatatgctctaattgtttacacataattttattgatattactttcgagagaaaatgttgccttattgatcaatgaattaaaaaaaatataaataaacaaacgctactacaaaaaggggtatttttatcgattttctagtaatgaattataaagattttccgttggacgcaaatagtaatttatttgcattggctataaaataacgcaaaaataattattttcgtcattttataaccgactcaataaacaaacttttcctttaaattttttgtatcagttttgaagtgacgcgagaagctatgtgttaatcttcaaccgacgcaacatgtactttttgcgtcaattataaaataacatataagtgaacacaaatacattttttttactgtttgcgtcggttataaaacgacacataagtgtaggtaagggaaaactacagatttctctggaattttctccagttgcatttttcaaattttagaatcattttgtatgtagtaaattatttgaccgataacgataaaactaactgtaactaattatgtaatgaccgcattagtaatttagattagtaaaggcaattagcaataatttctgatatatttataattatttataaatttaattatttgtgggctccattactagaaatgggcattagagttataatttctcaattctggagatt

SEQ ID NO: 300768 - DNA, 3609 bp, Cannabis indica
gattgcatcagaagaaactcttagcagcaatggcaaggactctgtagtactgtctatctgggcaactaaaaccaggggaaggtgtatctttcttcacattattcttctcaataaaattataatgacaagattgtcccgagcaaaaaaaaaacacaattgtcatcggcccaataatagtaacaatatttgaaaattgccccatcatgggatataattaggatacgggttaggtaaatgtaattatctcactcaatagaaccacaaaattaatactggttcaaaatatagaaaatttgctatgcatgaaatcaaaaaaaaaaaaaaaaaaaaaaaaaaaaaaaaaaactaggacaagactcgtaacattactcaattaaaatataagtgaaaaaggaggttttttttttgtcaatacatgatctacatctcattcaattaaattttattagtgcatttttacacgaaagaattcttcaacactactcttaacaaaaataactatagatttttatattgagtttgagaatactcttttacactttactttgtactctactttttcaagagtgtaaaagaaaccgggaaaaagtgttactaacacaaaactctcatataattatatcaagttaaaaaggtaaaggctacaccattttttgggggggagtagacttcactacaccatgtagcattggaagtagaaaaccatgcatattgctcgaccaagtctctttaacccatgtgtgaccattatgttcccccaccttttttttttctttaatgataattaatcttacattagcagaaatcaacaaaactatcttctttttgggactaacaacagggagctattgttataagtacaaaacattccaaaaataaaaccaaagagctaaagggaaaaccctagaatcgtcggagatcttttgggggcttgaagttgagaggatgagtctctggggtggcattttcatcttctttccacattttgattgtcttgtcggcttcacaagtaacaagccttgtaccggtaagatcgtattgagcagcatatataccagcttcactatccaatgaccctgtagtaacatatttttcaagggtaagcattttcaccaatgtttattcaaaatttctaacccccaaaatgaagttaaagacaacagtttaagcatttaccgggctgtacaattgtttgggcttgctgaaaattgtgaccactcttccaatcccagaaccataaacttccattgtcaccttcgtaaaaagaattcggtgtcaagaagtgaaaacaatttaacattttgtataccaaacaactcctctgaccatattatgaaataaacaaaatacacagttgagataaatccttacctcctgtagccatgacaccatcatcattgactgccattgcgttaattatggtcttttgctgggagctgctcaacaaattacagcccagttgtcacattagaagggaaaggtgaaaagaattgcttgaaaacccaaataaattacaatattatatatgcacaaatatcagaccaacatagggtaagtaaataagtatttaataaataaatggttgtcaagttactcacagcatattgtgtaaaaattcccctctaggaaggctaaatttcttaatgttgtcagccgatgcagaagcaaaacaattcctgaaagaatacaacaaaagaaaagtgaaaccaaaacctttcatattgaaactacactttctttactctaagctctattttaaaaagacaggtatgacaagttaggcgcctactctttaggatgctgtgccattgctcggaccgacttcttgtggtgtgtgttgaaatggttttccctgcaacaaaggaaataaaatattatggaagggatgtatgtatactgaaaactacaaatgttctagtctcatagcacaaattaccatttctaaggtcccagaacttaatcgttgagtcatgagaccccgtaacaacttgaggatcctggagaatgagacaaatttaagattaacatataaagcaatgtgaacaaagatttactggaactcccaaagaagagcaaccttatagttttcatttcataaacaacaaagacagatctagctaacaaatccatctcaaaacctaaaaatgtatttacaaacataaaagcaatacagaacagacttgatatgaataacccaattttcttgagattgcccaaaaaaaaggaaaatggtaaaatagaatgtaaagaaacagcaaataaacagaataaaagatgaatatatacttactgtaggcctagtgaaaactgagcaaactgtgttgtcatgtccagtgagtgcataaatctgcatcttgctacgaatatcccagacctgaaaatagtcactgaattattatatgtgcaatctaatccaacatgcagaaatagctatagcagtaactagttatggtaaaaatctgatataagctctgtaactttagttatgggaaaaggaaaaaattcacttactcgacagacagaatcacgtcccccagtaaggagaatgtcaatggtgggatgaagagccaagcagtacacaccacttagatgcccatgatacgatcgaataacctaagcagcaaaattgtggtacatagcacacttagagacaaaacatacacaaactacatctctcgaggagttggttctcaccttgttctgttcaaggtcccagcattttacttgtttgtcatcaccagcagaaaacatatatgtatgtttgctgctgacagcaaggcctgaaggaaagatgagggggaatcattaaataactcagatacaagtattaagtgcaatcataagtcattttctcagagcatctacaaccatgctctctaaacacactccttagctaaaatagggagcgtgaaaatgagctccaaccatacaaaaaatagctctctataatagagaatggatggggagctccctacttttctgctaaaattttttaataatattttaatcaaaagcactattattttttcattattttataaaattaatttatatttgacaaattcaaattagtaaaaactattaaaataatcaaatactaactaaagtagggagtatgattggagcaacaacaataaaaatggttctctattttagctttttagctattttagctaaaaaaaaatagagtaccattggagatgctctcagtactcgttctccatttgtacaagcagctgttagcactcgggcataataaacaacagcagtccataccaccagcaataaagtataaagaactaacctcgtacttgttcaatatgtcctgtcagtgtaagctttagctttccacttcctacatcccatatctgataaaccaagaatcagaaaaacaaattagcacttagatgattgcaattttttttgcacttagatgattgcaattagtagggcattcaaattgtatatgcttgtgcaaattcacatatatgtccctgcccttgcctccttgtgtgagtgtgtatacatgtacgcgtgtgcgtgtgtgcgtgtgcgtgtgtgtgtgtgtgtgtgtgagagagagagagagagagagagagagagaaaaga

SEQ ID NO: 300769 - DNA, 4691 bp, Cannabis indica
aaccaacttaattttgctaatgatatacgtataccacaaattgagcttccattaccgctcagctgctcgactattgaaattgttgaagatgttgttagcttttaattaaatcggcttgtgagggctagataactgggtgttgaggtcagttttgatacttttcttaaaagttatttctctcgtgagagccttttctaacatattttcctttaagctgatgactacatattcttgattctttttttcttctatttgtgttatgcaaacaaggtctttctttcttcatgtgaagcttcaggttgtgtttgcatttacatttaagaattttgatacgatttgagtttttgtggactgtgttttcacaagccgagaacaatgttgtttattgtttactcctcgagttacctgcgtggatataaacattttctagtttttcaatcttcacaactgtttaataaaggaagcaagtgattcggtatacacaggtttgaaatagaggaaagtttaagaacaagctcccacgtaaaacaatagctatgactaccacaaagatctatatagtgtaagagtctctcttgctttcaagcaaattacttatttccttatttacaattttcttcttattctttgttttgaatgttaatttcttttttccaggtactactctctgtatggacatgtagagactatggcgcgagagatccagcgaggtgctaatgctgtccaagatgttgaagcaacactttggcaggtgactatgggtgataaaagagaaaattaacagccaagtagaatgcttttcaatattggccctttagtaccatgaacacaactttgtttaacttgcttagatcaaagcaggtacccgaaacactctcaaatttgatactgcaaaaaatgaaggctccttccaaggcagatgatgtgccagagatcaagcctgaacaactttcggaggctgatggttttgtgttcggctttccttctcgttttggtgtaatggctgctcaatgcaaagccttctttgaggctactcaccaactatgggaaaaacaagcacttgctggtaaaccagctggtatattttggagtactggtttccatgggggaggccaagagctcactgcgtgagtcaactctttaatagtgaaccaatctaatattgtacttccaatcaatcatattggtttacaaatatggaactctaaccttatattgtgttttttcaacctttaatctacattacagattaacagccgtgactcaattggcacatcatggtatgatatatgtccctattgggtacacattcggaagtggaatgtttgagatgaatgaggtaaagggtggctctccttatggtgctgggacatatgctgcagatgggtctcgtgagcctacggagcttgaacttaagcaagccttttaccagggtaaatatgttgcagaaatggccaaaaagctcaagcattaacacctcttcaccctaaaaactgcattcaatatgttagaagttggaaactaattgtgaatgaaagaagtactacttttaacagaatggagcatcacataagtttcatttatctgctccatccgaaaaggaaggccatttcgtattattagaggagaaattggcctatacatattgcattttcttttacattcttagcaaacgaactttcaataaatggaccatcataacaattgtttactatttataatggaatatatagaaggtgtttttattcttttcgtacactctacagaaggtgcttactatttatattttttcatgctatgcactgttagtagttacgctactatatttaattaatcaattgttttttaatctacatgggaatgaaatttataaagaacaaaaaattgtcatgtttttatgtaggaatgtaattttttttaagcaacttcattgttagctgaacgaaccaagttcagaaattaacattctacaatcattaataataatgccatggagaaattatcagctttgaatttcaaatttcattaactaagcagataatgaatccaccgcttgatggtggtcatcttttctccttaacccaatttagtgcttcttttatttccaatgtctccaccaagattggagccacttttccatctacaacgctgaactgaagcaataaaacacccgtgaaaattcctagctaccatttcatagccatattttttgctttactgttgaatgtagctcaatccacattcactttaatcaccccctctccctatgtttaacccatgattctgcaccattacccgaagccataacagttgcagtaggtaattaaagccgaacctgggcagcagcccattgagccaaattcacacgagctgatgtgattatttcgtctatcaccggggtcttcttgtcccaaaccagctcattggaagctttccacaatgtccaacacaacacagcacattcctccttagtctccttattcaaaattttaaaccctcctgtaaccaagtgccaaacatcaagaagacacctgaacattcatcaccccgacttggatccaacaaagattagagaaaggaaaattaactaatacatgcataatcgactcagccaaagaattacaaaatggacaatgtagcccaatctctaccttttttcatctttagttgaacctttgttggaaggctgttaggacctaggattagtgtggtgtgctaataacatatattaaataaaagggtaattgagtctttgtattaagggtagtgttttggagggaatacaatagtatatatagaatattgaggggaattggggggtatgcaatgtttgagtaaatctctatttgcaccaaaggggcttaagggctcctatcctttgtaattgggtttctcatacattcaatatacatttcttattgtgttcctactgttctaatcctattattgctactgttttagtgtgttcttgagtgtggagttctcggggcttatcaatggcaattatttgcagctctccaaaccacaattcttcacctccctaaaataaaatctgcaaaaaaagtgagtgattttaggccaatgttatttataagattatattaacaatgttggttcaactgttaaagccttggttaaatgatatcatacatttctctcaaagtgcttttattggaggtaaatgtattacagacaatgcaatggttgcttataaattattacacaacctaagggctattaataaagggaagagatattttgctataatgaagttggatatgagcaaagcctataatagagttgagtgtgattatttagaatcagtaatgctcaaactagggttctcttatcagtaggtgagcttactcatgatatatgtttgcacggtttattattctttcaacttaaaggaaaggttattcaaataagagaattatgtcaaggtgatccactttcaccataccttttttttttttgtgtgtgtggaaggtttttcggcattgttatgttaggtagaaagaaataaagatataattggatataaagcaactcactcagcttagtcagtcactcaccttctttccactgatgatagtattctcttcattcatgcttcttctcgatcttgttcttctttgattgaactctttaattcatattctaaagcattaggtcaggtatttgtcatcgatcaattaacccattactaagaatcccttcggtgtttaaaagttgtaaacttataataatatgggctttagagacttatattgaggtgtagctgaaacatgaattgttcttatgataaggtagtttatttgggtcctatgttctaccaaataccatttatcttttgtttcagtgtattaactttggttttgactttagacttctttcggtatttactttgaatttttgcatcttaataatctaataacctactatattacaagaggatatatatacttataataacttaagctttagaaaattatattgttgtgtagctaacgtatgaaatgtccctacattaatttatggttattgttaatatttttctatcatttatttgtaagttcttactatctttaactctttctttggttcttttgcagctaataaattttaataaatctactatgtactctcaccaaatacactaaatgatatgcaatctttatgtactgcaatttttcatatgcaaatcactaaagctattgagaagtattaaagattgctgatgttaagtgaacaaaataaacaaagattatttgatgatgttaatgagaaagtttggtcttgactaaatttctagaataataagctttttctcttatgttggtaaagagatacctttaagggcccgtttggtacgcaggactggattggattagacaggctaatttgtccaatccagtgtttggacatgttagaactctggataactgttgctcctaaaatcgcccaatatacgtggaccagtcaggaagggacacgtggatcaaaacgtttgaagagagaactgctaagtccttgtatgacaccaggaagcgttattcaaatgggtcccggaagatgcacccggagtacaaggtactcccggaagcgaacatagctcaaaggcactccgggatgtgtcaggcctctcccgagacatcaagtcgcatttaatgctgcatgggaggaagcgt

SEQ ID NO: 300770 - DNA, 5971 bp, Cannabis indica
aacaaaacaaaacaaaaattaaactaaaaatagaatctgagtcttagatctaaatcaactaaaaaaaaaataacctccacctccatggaagccccatcctaggataatatttagcatttctcttttaaatgttttttttttcctgattttttaaatggcccgtttaaacatttaaaaaatttggctctttcaaaataatactattagtgcaattcagtattgggtttagacgggttaggcttatacataggcccacctagcccaagagcctaaaacaaatttatctccttttaaaattacacatttttttttattaattttagaaaatactatattttttttctaaataaaagctcaaaaatatttatttcctatagcctaccaaattttaggttggccctcatcgggtgacaaacttcttgtggcgtataattatctctggatcccttaccacttgtgtcaatcttgtttttaaatatgtgcaaatctcagcttctttaactgtgtgtaatttccatgctgaaaccataaaccatgcactgctcacttgcgattttgccaaagtttgctgggcaatcttcggtttacctattaacatggttgcttctgcaacatttggcagctggtttgagattttgcaaggaacagctgttaatgatcaagtatgtcgagttgctatgttgtgttgggcggtgtgaaaagctcgcaacaatgttgtttggaacaaacgcaatttaactgtaaatgaggttttagtctcagcctctattattcatgaccattggagaaaagctcaggataaagttgctctattgtctctatctttcgacaatagtggtgatagggctgagctttggacaaaatcggcttcaaatcacatcaagattaatgttgatgctgaactatttcatcaagagacctcgtatggctttggtatagtagcgagagataacttgggtaaacttattgaagctaaaacgactcaccatggtggtatctactcggctgaggttatggaggctttggggatcaaagaagctcttagttgaatcaagagcaagaactgccataatgtagaacttgaaactgatagcttgttgactgtccaagccatccgaagtaatcaaaagatgtcatctacctttggcttaattattcaggatttttcagtttttattgttttctctacatatgtaaatttatattttattaagcgatcaacaaattaagttgctcacgatgttactaggtatgctcgatttatcagttgtagcatttttgaacaggatgtttggaccgatttaaagattctcttgtattcaaaatacttttaattcaataaaatcgatactttatcaaaaaaaaaaaattataaaaaaccactaactaatcacgaatacactactattttactatctaaatatgaatatgccacgtgtcgatagacttaggtactcttacttgtcttaaaagtaaaacaaaagatagaatcaaaacacgtcatatttgttaaataaaaaaaataacacgtcacgttcacctgattgcttctccttcctcccttctctacagaatcaaacaagatattccaatcctctaccctctaccatcacacaaccaaaacattttgacccaattaaatcctcccacgtaatcactctcaccaataaatatccgccatccaatcacacgtggcaattccaaaagtttcagtacacctcaccgcacagaacaaaaacccacaacggcgacttcttaaatagcaaaaaaaaaaaaaaaaaacattgccgctatcccaaaattcagaactaccagtcaaagtgatcatcgcttaatcagatattttcgcctatacttttgtcaggtacgatcaacaacccagaaagttatcatctttaatccgattatcctttcacgaatcgtgattaattgtttttaattttagttacatataatcaattgtgaatatccaattttcgatttttcggctggccaaacgccgattcagctaggttttctttaaaaaacaaatctttgttgaagttctatatatattgatttttgtatatgttttattagagatttttggggttgtgtgtgttttgttgaggtttctttgtaataaagatgaatactttatatgtgattgaacttgtattgttatgaacttatctgggaatattgaatttagggttattcattctagtttataagtatgggtttgaaattaaagattgtgttggaaagtcgcttcaaatagttttcaggtgtaattgttggttttattggtaacacaaaggataaataagaatttatcgataaattatatgtgtgtgtggttaagtaggtaatttcaaattggaatgagaacagaattataaaatgatgtgatatttttgaatttctttgtggtttgtaatttcattgtgtatcagtgtcaatctgtcatttttatttacaactatagtttaatacttgttttgaattgttttccaatggctgttgttacttcaggcacaatggatgtgagagttgggttcttagttgtctttctgctaagttcgaactggggttgtgatgctagacaattgtcgaaaccagatttattggaaggtatataactggttttgttattagtttttgataacattgctccactggatttattcacatgcccaattcctagttacacatgttctgtacttctgttattgttttcatgaatagcttctcagcttgtatttttattgagaattgctaaaaggcaccaatagtgcttagcaccttccttggtgtcaaactgttattggtgtaattaagtagcgggtctcatataacttaagaaaattacttttaggaaatatcgctaaccaatcgtaacgtgatacttatagaaggtgttggacaccactggtgcccaatagcaatgttcatttttatttggttggttatcaataattgtgctatgaacttagtatgttgatcgtatgacattgaaactgagcacaatcaatagtggttagtactatgctcaataatcttaccagatgtcctacaattagttctttgacatgttatgactcactatattttgtattaaggcactaggttggtctagtggtaagggaggggatgggaaatgggggagttgggatctctagatattgaggctcgcagggcttcaattaagcaccgagtatgacaatgatcacgatagtttgtatcgtcatggtaaattcttagcagtatccacgagcttcaaactccttgagattttgtaaagttcaatgagaacacccaatttcaaattcttgtttgtaatgtgagttttgggatatcgaaataaataaaggcaatagttttcttctattccttacatgtggttagacatgccctaggggttcctttacattctcgagcagtataataataattgtgtgcatatctagtttctagttataatttgaaagttttaaggtgctatgagggaagctaattggttcatgttgctacgaaaataatactcacttatagcttataccttcttgttccagaaattcaggcttcggaaaatgttgggaaggacgagaatgtctgcacattgtgtgaggagtatgctacccaagctcttgaataccttgaacaaaataagacccagattgaaatccttgaaattctacatgaatcctgctcgaagatgcacgcttttaagccaaaggcacataacttttactctacttcatagtttttcagaaactgcataaaatgaaataatttcatgataataaaatgattgcaacaagattgatggttaagaagctttaatgatcatctattcgtgttgccagttgatattcaatgagctatgagcttagattttgtggtgtgaaattccatgaaaattttagcttgtcttaaatttctctctttcttatttgacattcttatttctttttgtacagtgtattgctttggtaaactattacgctcctcttttcttcctggagatttcctcgatacaacctgtagaattctgccgaaaggtcaacctatgtcaacaaattgttgcagtctcttcacaacttcgtgaagatagctgtgggttatgccaccgtgcagtttcagacgtactagctaaattgaaagaccccgatacacaggtttgtatttgttttatttggccgataagaaatacatattactggtttgtattgggagatgcaattttagcaaattactaataacttctttaacctgaattctatattcttgctttgattattagatagccgttgaaaagtcattgttagtatttgtggatcagtagtcgaaatattttagcatacttaatgtatttcgataaagcttacggctaagtgatttatggtttatttttttcactttcttttttgtcagctggatattatcgaagtgcttttgaaggcatgtaactctattaaagattatgagagaaaggtaagaacagcttgatgaatagattttgtttagtacgatggaaacgaactatatggttcttaaggttttgaaattttggttagaattcttattttataaaacttatttctttggcagtgcaagagaatagttttcgagtatggacctttattccttgccaatgcagagaagtacctggaacaaaacgatatctgcaccgctcttcatgcctgcaaatcaccgcctcacgcagctgaagaaggtttacattccgactcttagttatggccataactaatgaaaaaggagttacaaatattggaaagtagaaatgtaaaaaaaaaggttatatatgttttcccacatttcctcaattgtctgtatcatataattaaacttgaaattatgcttttcctacaaaatatttgattgtgtgcttgtataatattgagaccctttgtttatgaaaatttcaatggcatattagttttggtctcctcttctctactctttttaattgacttgaccccaaattatagtcattaatcatcaaaactttgatcctttaggacaaacaaaccagttggtatctctatatataccttatctgtatggtctagaataataatatattggatataaacagatcacattcataaatcctaatctgacccaaataataattgtgtcatttgagttcaattcaattttaatttgtgtttattttttatgattctaacttgtaataattcatatacaatttgtgtcatcatttaagggtaaatagtaacataagtattcaaagttttaagtttgtaaatttttagttcgtcagtgcaaaaacatgtagtatcagttatttttaaatattcttttaataaattaaaaatagagtttatactgacaaagttaaaggaaaattacagtacttatgccgctaaaaataaatataagatttatgctacttacaaactcaaaaccttatctacttataccgtatttatcaaaataataataataataacatgctactcattgtcacttttgcctaaattattggtatggtacattttcaattgtgttctcccaatagtttggcttatatataattatttaacttaagctatacgtgtcgattaaagattctaatataacaaatacaaacaaagtgaaattgggtacaactcattcaatatacgtaataatcaccaagaaaagtagttgcattgcatgactcacttttctagcttttgttttgtttgatgaactattatcattattatgagtctcaaccttttgtatttccagagggaaaatttgaaaaaatatgcataaaataccttaaattttttttcctaatctaatacattttaaaatttaaaaaatatgaccactttacaataaatccaaaaatacccctctcattttcaaacctcaactctctctcttcctctatctctctcggttgttctctcaccatctcaccctcaccaaccctcttttttttttttttttt

SEQ ID NO: 300771 - DNA, 2152 bp, Cannabis indica
ttattattgtcttttttttttttgcaggctgagaaagaagcaaagaagcactgaataaacaaaccaaattattattaattatcattccctaattcattattattgtaatatgtgtccactaatattatacatttaaagagaatgtgtgtatgtgtatatatgttgttgattatatgtacggtttatattagcattttttttatttatttattataaaaatattgtaagtacctagacaagagaaaacagaccttttacagaaatattcgatcaacaattaaaattgaataaattgatcacaaatggtatgtttcgtaggaagaaaagatagtaggatggatggagagtgtagatcggatggagaggatatttgttcttctttgtgttgtttggtgttaggagtatatgtggaaggatgaagagtaaaataaatattaaaattattattttatcatttttaatacaattatatattattttttaaaaggtagaaaagataatttgtataattttttgtcattttcttgaattcctccaagttacactacgtttggtagaggggagagaaggagggaggaagaggggtggagggagagggatagagggattggagaattcttttgtttggcaaggagagccaagatggaaggagaaggtctccctttaaacacattatttttaatccctcttaacttgggggaattcaagaaaaagacaaaaaaattatacaaaatatctttacaagttgctccaaaatatctttaaaatatcctttcgtcttcatcctccttgaaaccactttttgcatatatcgcagttgctccaaaacctttacaagctatcctcctccaccgttattgtgctcgtcttcatcctcctcaaaattttcttttacaagttttgaattacttttcacttgaaaatccttgaaactttctttggattgcaagcttcgtatttatttcaaacaacaataaactaaatcatggctaatagaaatttaaacaacatataaaagaacattgtgcttacttttgtgctgccacgagattagcggaggagagggacagagcgagagagagtagaggaaaggggcaacgtggcttgtggtcgtagaagagagagagccatgaaatgaaataaaatttacaaatgattttaaaaaatgagagataatttttttgggggggggaagggggggggggggttatatcttaagaggaggaaaatgaaatttaagatggataaaataaaaatttgaaatttaagatgcaggaaatgaaatttcagatttgaaacgcgtgaaatatattgaagcatggaaattactaacggtctaaaaccatcagttatactggcaacggttttatcattgcttatagtatagtcgacgggtttaaaccgttggcaattccctttacaaatgcatgagattttttttaaggcacgtttgaaaaccgtcacctacatacctcacatcagtttaaaactgtgaggaatactttatttttcacgacggttctaaatacttgcttaacttttttagtgacggttctaaaaaaaaaaaacatttttaaaattgtcctgaatacccatttttgcaggagtgatggggtttggcgtttatttttattgttttgaagaatattaatagggacatactaatgacgacgtatcaatccatgtttaatgatattgtcctcagtggtaattttagggggaaaaagcccacccattccaactattgtttttcataaaaaaaaaaaaaaaaaatatatttaatatatttatcaatgatgatttgtggtcattaataaataagtcgtcattaatagtttatgtcactattaatgaattattttatatataaaaaaaaaatacatttttatcatcgacgacagtcaaataatatcgatgatactcatacttttagtgatgactttatactggtgatacccttattcttgtaatgaatggtctttcttttctctggtgcgtctcttattgcactggtgttttcaagcctcatgttatggaggctgtggccttggctcatgggcttttcttgtgtcttccgttgggttataagaaggttactctgttagataaattaacaattaacccaagatctatttgtatataacatagaaca

SEQ ID NO: 300772 - DNA, 2273 bp, Cannabis indica
tacatgttttcaattcaattattgagaataaatttttctactcaagagatgttagttttcatgaaactatttttccctttgtctaattcgattctttaactgttgacaagagctactattttccttcaatactgctcctaatcactctttcacttctaatcccattgtttcatatgataactcaacatctcatggtaaacctcatcgagtttttgttaagccctcctatttcaatgattattattttttttatcaactaatggttattttctttcatcggacaacttgccatctatttcgtatcccttgtcccatgtacttgattactctaaattattttctaaattttgagctgcaatactatccatttctagccatcaagaaccttaatttttccatcaagctcatggtattctttagtgggataatgcaatggacacaaaaattacaactctagaaacaagctcacatggatcattgttagtttcctccctcatcaacatgtcattggatgtaaatgggtgtataagatcaagtaccatgcagatggtactattgagaggttcaaagctcggtggttgcaaaggggtacaaccatcaaaagggtgttgactactttgacacatttggtcatgttgttgagatggtcacaatcaagcttatcattgctttggcagccattcatggttggttcttacaccaacttgatgtaaacaatgctttccttcatggagatcttcatgaagatatttatatgaatctacctttagggtatagtcctaaggggcaatctctaccaccacatgttgtttgcaaactcaagaagtctctttatggcttcaaacaagattctaggtaatggtttgagaagtttttcactggtatggttcaagaagatttcaagcattcagccaccgatcactcactttttatgaaacattttggcacaacttttattctcttgttggtctatgtttatgatgtgataatattgagcaacaatttggttgagatggaaactttgaaaaccagattggacaaaatgtttaaactcaagaacttgggagaattaaaatactttcttggtcttgagatatcaaggtctaaaaagagatttttgtgtcacaaagaggatatgctcttcaattattggaagactttggatatttaggttgcaaaccagtaagcacaccaatggaagtaaacctaaagctatagcaagatgacaaagataattttgctgatccaaaactctacagaacaataattggcaatcttcaatacgtgaccattacaagaccagacatagcttattaagttaataagctgagtcaatttcttgtcactcctagatcaacacatcttactgttgtacaaaggattttgcggtacataaagtcttcaacaggagaaggtttattcttttctgcaacatccaaagtgtagctcaaagcatatattgactcggattgggcaacatgtgttgacacaaggagatccacaatagaattttgaatttccttggtgactccatagtttcatggaaaagtaaaaatcaacaaattgtttcaagatcctctgttgaagcagagtacaaagctatgacatacacaacttgtgaacttatgtggttactgtcattactcaaaaaaataaaggaggatcataaaggactagccatgatgtattgtgacaatcgagcaacccaacacattgcttctaatccagtctttcatgaaagaacgaaatacataaaaattgattttcatctagtctgagataaagattcaataaggagtgatcaaaacaactcatgtctcaacaaatgagcagttggcagacatactaaccaaagcactatttccagctcaattcaaggcactaaaggacaagattagactgataagtatatacactctatcttgaggaggagtattagacttagagtgaattgggtttggttagttagagtcagctagagttagttagattttgttttcatttctataactaactatccaagctgcatcttgaggtatatataagctccttcttgtacaattcatttttgactgaatatcgagactttcattctctttatctctttttatttttaattcttcttttataaactaataaaaattaatgtaaatctaaataaaaaatctaacaagttttccatccattgattatagtttatatattaagggaaatttgattttttatgcttacatttggttaattttttttcctaaacaaataataactaatat

SEQ ID NO: 300773 - DNA, 584 bp, Cannabis indica
taatctatgtaaatttcccaaaaagaaagcacaaatgagccttttcttatacatgggctttttgtaaaacttgattaatacccagttttacacttgctcacttctttcacaacatcatggcttctctcaaaacttcactatcttcaccaccaaatctaccaatttgtatttgagacgacgatgggtcggtaaatcgtaatgaaaaaaaaaatgaaaaagaaaaaaaagtttcataaaaaattcgtaccatgtacaatttagaataataatgggtgcaaaccctacaaaacataatgttaaatgctgttactatttattttcttttcaaacatcaactacgttttctgatttcttgtttttggaacatcatatatctacataaactcttctctgaaaatactttagcaaaaaaaaactcttctaaaaaaatattaaacattttacaagcaaatattaattagtaattaaaaagttttaacaacaccttttaactaaatatctaataagttctctaaaaaaaaaataaaaaaaaatatcttgaaaaaccgtgtttttacaaatgtcagttgtatataagaaaatat

SEQ ID NO: 300774 - DNA, 3372 bp, Cannabis indica
tatatattacaaccatgcataatttgaaactcgaacccaggacttctaacacacacgcacactcatacaaccacttgagctagcttcaagtggttcgggtacagagtactcttctaattactaatgtagcacgcatatatttccttttgcgaaataatttgcattactttattagccataaaagtaagttgatagatatgatctccaccacacatcgttccctctattatgaaaaaactccaaaaccataaatgtaaccttttcaataacattataatctgataagaaaagatggtgctttaaatatactcattttgacacattgttggttgccatgtggaatagcagccagacccaccttatacctttgtttattctccatcttttaattttaatttctactgtacgtaccaccgcccaatcaataaaaccaatcaaccaagcaatttcagcacaggacacacaaaaaaatattaaagcttacctcaccagctcccatatatattatttactattaatatctggtagacacgtggcccatgcatcaaccattcatcaactgtacataccaatcttctccctttattttaatacgtggcgactgattaagcaacatccaagttcgtattattatcagaaaccttataataaattttagttggaaaattttcaaagctcgaagggtctttgtccactataggtgtatttgctttcaagctttaccggtactctgtttactttctatatatactttcgtgtaccaaaagtattgaactctttctctttcttttgaataaacatattggcatatatttatatgtatatataaatactaacctaccctaatttcacggcacataagaaaaaaatcattgtagcagataatttatgcataatacacacgtattagtatggtgacatccctacacatataaaattaattagtgtatgttaatatatatatacatatatttatatgatttattaatttataaagaagggaatccccacagggttttcaatgaaggttcctgcactttctaggaccaggacgtacgtaccccacctttaattaaatttatagttgttttattctattactttttttatattacattaaaaaatttgcaataattgtgagagtcaattatctttttcaatcactaattattaaatatattcaaaaaagaaagaaaaaataaataaagctatatataccgagcaagtttagcgtatctttcatatcatttttcttgtcactcataatattattcactatcatcatgatcatcgatatctccttatatatatatattatctagcaaattaattaagtaccaagttataaagatggactactagttcttcttttcatcgaaacaattatatatctcaggttttgtttctgattgatcttccatatcaattaaatagatagatcagtttattatataactgtaaaaactatatatatataagatatttgagtaataactaactggttaatattaataataatcatctttggtacgtatatattatattatcgaaaaagtgagtagagagaaaaatgggagttgaaggtactttggagtacttgtcagatctactaagcagtgtgaaaaagaagaagaagaagaagcaaacacaaactgtagccctaaaaatcaggatggactgcgagggctgtgcccgcaaggtcaagagcgttctctccggcgtcaaaggtatatatatacatatatatatatattatactctttttcattatattattaatttatatataaatagtaaattaaatgaaagttatttcaacattagtacttaaaacatcaaatattaattgttgaccaactatagtactttatattttacatgacaagtttcattctctaatcaataatttagaataatatatgtatatatatatatgcacatacaattttttattttttatgtatatatgcagggacggaatcacttatttgtggtgtggggctgtaaaaaaaattacattttaaaagattaaatatttctttaattaaataataatacaacaaaatggtataaaatgtaatacttgttttccggtggcttttttatacaccattttattggatctatatattttaatttaataaatgttaccataaatttaatgttatgataaataacttatatactatctaattgtacaaatagtccgtaccgaaccacatcttataaaaaatgcggtttataattttttgaggtccagtttgcattttttaaaccgcgcaatacggtaccgtttttaattttgaatttaataattataatttaaattgcactgcattatgtattataaagtaactaatttttacaatataatatttatttatttttttatataagaacaaatatatataatttatgtatacatattataatgctaaaattttatattattttttttattttgtattattaaagcttaatttattaagtttgatttttaaatttttatacatgtttgataacgatgatagtgtaaactgctcaaatcgtaccgcacaatactgtattttcgcggtgtgatttttacggtttttagatctcacggtgcagttgcggttagaaaaattataaaaaccacatattcaatttggtttgaaaagataactacaacccgcgacacccgtccctgaacactcctaatatatatgatttaagaaggaatggttaagtaataaatggatgtgtggcaggggcaaaatcggtagaagtggacctgaaacagcaaaaggcgacagtgagtggctacgtggatccgaagaaagtgttgaaggcagctcagtcgacgaagaagaaggttgagctgtggccgtacgttccgtacaatatggtggccaacccatacgtgtctcaggcgtacgataagaaggccccgcccaacatggtgaggcgcgtgcccaacaccgccaccatcaccgagactaccgtcgacgactcctacaccattatgttcagtgatgagaaccctaattcctgcactatcatgtagctagatataataccttttaagtattttgagtaagtacgcacgtgcaatgtaatttgtatcaatcaatcaatcaaatatttaaatatatatatataaatatatatatatatatatttatatgatgaaaaggtgatcacgggccatgatgatcatcaaatttcccctgtttaattcttactccatttattttataattttattattagatatgttgaggatagtggagcttatataatattatcagcattaactataaattaggcatatgaagaaacttgttggtattttagggtgcgtttggaaagtcacaatgtaattggatttgt

SEQ ID NO: 300775 - DNA, 2722 bp, Cannabis indica
ttagatgaagaggaagagtttgttacaaaattggaaaatgaggaattgaatgaggtagaatacgatgatcgttggtgtctcattgggaggcttctttctggaaagatttcagactaccaagtcttccaaaatatcgttgttgatttgtggaaaccagggaaagggatgtatgtaaaagacttgaacaaaattgatttttattccaattttaccatgaaattgacactgacagagttatcactcgtagtcggtggacttacgatcgtaaacaattgcttattgagagattacagccaggagataacccaagaaccaaaccgatcaaccatcttgatttgtgggtccagatacatgacttacaacctgggttcaaaatagagaaagtcgttctacaggctgaaaactacattggaaaatttcttaattcgatccaaataatttcaaaggtgtatggcgagagtacctacgggtacgcgttcggttgaatattgatcttcctttaaaaagacgaatgaagttcagaagacagagaggagataccttctatgctaacttcaaatatgaaagagttcccaccttctatttcgtatgtggtgtaatgggacactccaaacgtttctataaaaagctttatgatctcccagcagaccagattgataaaccatatagtattgacaagagagccccctcaagacgttagaattttctggttgcgtctccatggttgggttctgcaaagcaagccactcagtccggcgacgtcgatgacaaaggcagtgattgtgaagttaatgcccctccacaatctaaggatgcattcactccagtatcaaatcctggtaaatctgcatattttgatcataatgctctagttgattataggtgtgatgttaggaatgttgatctcaatgtagttaatggagaaaatggtccatcaattgtgattaatgagaacgattctacctttatgtctgatgctgaacttaccatattggaccttaaaaggaaacgtgtggaaaaggtttccaatatgggttcacatgtggaaaacgtggcttatatggatcaagctattgagtcaagtaatggtatttttgcaaatactgaggagatgtcaaaaaacgggtttatggtgggctctggtgttcaggcccatcgcttattatgaatacacttagctagaattatcgtgggcttgggaacccacgggctattcacttcctagctgacatttgtgtccaaaagaatcccaattttttttcctatgtgagactatgtgtaaaaaagatgtattggaccgtataaaaaataaattgggctttgatagttgtttcattgttgaagcccaagggagaaaaggtggttttgctcttctttggaaaactactgatgatgcctatcttcttggatattcagataaccatattgacattgaagttcatccccctggttctgcacgatggaggctcactggtttctacggtgagccaaaccaatccctccgtgactgcacctggtagctccttaagtctattgctctacactcgcctctaccttggtgtatcataggcgactttaataattgcttctcaggatgaaaaaagaggtggatgaccctatcctccttatcttattaatggcttccaagaggttctttgtcactgttgccttcttgatttgaagctctatggctatgccttcacctaggaacgtgggagaggcaccagtcaacatgttgacatacggttagataaaactcttgttactcaacattggcgtgatattttccctgaagccatactatcaaattgtgatttttcctctagtgaccatactcttatttttctgcaaactgatgtgggtaattgtggtagtcatctccaacttttccattatgaaaatgcttggtctcgtgagccgtattgtaaacaacttgtgaagaattgttgggaagtctatggccatcctactctgtctgaaaaattaaaacattctagtacaagtttgaaagaatgggggttcgaactcactgggaacttcaagaataggctgaagaaaagtaaaaatcgaatggctgccatgaagaattcaagcaaccattttgccactcctgaatttgatgaggaaaaaaacaattattttgagattttagctcaacaagaactttactggaagcaaaggtctaaacaacattggcttcattcgggagacaaaaaagtaactatttccatgcctcagccagcacaaggaaacgtagcaaccaaattatgagattaaatgattcaaacggcgactagaaggattgggattcaggtctgaatgcggttattacagattatttttctgctctattttctactgctggaactatatgtaacagtgtggtggagaacattcgatgctctgtcactcaagaacaaaatgaagatctccttaggcctattcttgctgaggaagtctagcaagctctcttccaaatgcatcctgataatgctcctggatcggatggtatgggaccgggtttctatcaacaacactaggatattgtaggtactgacattgtcaaattagtaactgattttttcgacactggtgcctttcctagcgaactcaacactactaatcttgtaacaccctaactagcatatgcttattacgtgattttcaaacgtactgtgcagcttgttgctaatcaacgaggtttatggaaatcgtgattaat

SEQ ID NO: 300776 - DNA, 3491 bp, Cannabis indica
tgtttaattggtgttgtgttggttcttgttgggagttcaagcctccacatcaaccaattggaaaactttcacaacttatgtggacaactctgtatttctgggcttcacaatattgttgatcttggtaatatttcagaaactattcttcagaatatgaagaatgtgattgagttgactctgggctgggatgatgatatcagtggttctgagactgaaagtgtagtacttggtaagcttcagcctaatacaaatttgaagatactcaacattaaacattacagtggcacaagattgtcagattggttaggtgatgcttctttttctaatattacagcaatcactctagtaagttgtaaacattgcgtttctttgtcaccgcttggcctattaccctccctcgaagaacttcacatcgatgaaatggataagttggtgtcaatatcttctaatgcaactgagccatttaaatccttgaaagaattgcttatttttgatatgtcaagtttgaaagagtgttgtaatggcattgcacacgaagcatttccatctctggagtctgtacgttttttccgttgttcaaatcttgagtcttttatggaagggggatccttctcacgtttacatactattgcgatcagcgattgtgaaaagttgttcgctgttcgaatgcagtggaatctccatagatttccatcacttacatcattaactctttcctattgtaatgatatggtggattcatttccggaggaaggcttgctcccaaccatgctcaagtctttatccatttcaggttgtgataaactgaaagccttgaacagtaagagctttcagcaactctcctctcttcaagtgttggaaattgaggactgcaaggagcttcggtgcttgccagaagaactgcccacttctctttcctctctgcatatacataactgtcccttgctaagtggactgtgtggaaaggagtacatacctaatatacagattacaaattgatggtaagcatatacaatgatatacctctttaactgaacataaatattggatttctgtttcccacctctctctcctctaacagatctattcttgttgttttcttgtgtggaaataaaggttgttcatcctcacagtacagattgtaaaatctcaagaaaaaaaaaagcgctccagatatatgtgaagggaagatgaacaggtaaaaatgtttgcaccacacactcaccacaagagaattgctttttctaaggcatttttgttttagttaagtgtatctgctgcaaatatttatcccttgatatatatttatatgtatatatattttttttcttcatgaaaatcagatgttgaataaccaaagtaatgctcatcaaatgacgttttattaaatttacataacaggttgcattttgttctaaatttttctctagcttgtttttttgttttttaaattgatatctatatagtttaaaagagcataatgtgtgcgattgggaggtaatgcatttcctatgttttttctttcactctcagatgtaagactattggccttgttttcttctttcttttttacatttttagctcaatgcttactttgtttttgtatgtgtatgattaaaagaggtgcttcaatttagtaaagaattaagtcacgttctttatatgttgtagtttatgtgcgaaaaagccattaagaaatataagatgatcaagacccaaaacacaacaagtaataatcattatagaagcttttatggttgtcaaaattagatgaaccatttgagagctaataaataagatggatattgctacatacttgtattgtatggatactattgttaatagcagaatgagagtcaacataggaaatttgaggttcatctttattttggaaatttgacaacattgttgatttatccttttgggaaattaataattgcatactgatgcaaaagcttcaatgtttgatcaggtgatgggcaaggagtttgaagcaatttcaggactagttcgtcttgttattgctgatgagatacattggaatgcttggactgagcaacaaggagaagagtagagcaacaaagagaagagtatatgaataaggtggattggattaagagtagaaaagcagcttacagatgtagacattttcagagaagaaaactttattctctgaatattatgtataattggcctaaaaatgttgtattgtatgagaaaattgcataaagttgctcatgttagtaatttacaaaagaaatattatttctcacgagacattatttaaagtggttgtttacacaaatttcttttgtgattagggtctttctcaaaattagtagtggtgctgttgagctgaacccaattaggccatttggaatattgttcgctgcgctattgtatttgaaatcgttacctcaatttgaggatttattgcttcaattttcttatcaggtgaaattacattgttttaatggcatttcatatttaagagacttggcattaatttcagctaagtgggtggctgacgcataatcactttttgcagtcagagaatatgcaagctttcttccaattacgatcaataacagctgttatggctatcgtgaaagggcgtagatagtcttccaaactccttagatgtagaataaataacctggataagactctggaggtcaaaggagctgttgttgcgaagtttccatatgtccaccaaggcaatcgccacaaaggagattaggccctagtattaaaaaaaaaaccaagaaagcaaggatttcatgtcgtccacttcaatgttttcaagtctaatgccccattttgagtggaaaaatatagctttggtcagcgggcactccttaaacaagtgaatacttgtttcgacattatcactgaagcagcaagagccccccagtcaccgtccccatgttgtaaatgtcataagaataacttgcggctggctaagtatttgataggtgtggatcgaaagtccgttagggatatgactctgataccatgttaagaatcatggggttccatcttaaaactaattggcaatgagtggagtagctcatgttcttatatatagcttaatattttcacatttaatccatgtgggacaatattctccaatacacataaagcatgtgcactcttttaactgaaaatcgtcatatgaggagttggctctccaaagtccaaacacatatatcatgttgagaggccggtagaatttcgatttgaagaatggcattcgcaatgtgaggggacaaaggaaacatgaattaagggttcgtttggtacgtcatattacaccgtattttattgtataatattatatttaattgtattttatataatatttttatgtaaaattatatgtgtcctaaatatataatattttagtataaattaaaatttaatatagtattatataaaaatatgatatataatacaatacgacctaatacgacgttccaaacgagctctaa

SEQ ID NO: 300777 - DNA, 822 bp, Cannabis indica
ctctctctctctctctcttcttctctctctctctctctctctctctctctctctctctcttttagttcaaggaaaaccagaagaaaaccaaccctttcatcaattattctctctaattcttgccaattaattatgcataggagctgagcaagatcgagggtaaactttctttactttctttgtgattttaaggcttaaaagttaggttttggtgaattctggtctgagaacttttagttggtttagaattggttttttttttggtgtttagcttagaattaaggttttattgctagttgtgctgaggcttagagcttgagtttttgaaactcaaagctgagctttaatgatgaatttgagcattatgtgtaattttgagtttagagttgttgggtaagttttatttgagtgattgaactattctagaagtattgatgttgtttggtttgggtatggggcaaaattgagtttgaaaactcgaagttttgtctactggtgcgatttgatggaccagatgggagccgattaatcggaacctatagattcggtgaactggatggggtttcaaaggactggttaggaccatatttgtgtgcccaatttttgtattctctcaatatttagagtatttccacgctttttatcaatagaggaactttcggttttaattttatgcctataacaaattaaaatgaattatttactagtttaccactgttgtgacatagggcccaaatcgtcgagtaattttcacttaggttgattggcacgcttgaattatgacttgagataagaaaagtacaattgtaccacatagcatgt

SEQ ID NO: 300778 - DNA, 3454 bp, Cannabis indica
ctaactttgatatgtactaaattattgtccctgaactttcattaataaaatttgacaaaaattcttatatctaaccctttaaaaaaatttataacaacttgaataatttagagaacatcatttaatatatgttaaaactaaagaaaaaaatactaattaaccaataaaaatacaaaacagagaaatactcgtgctatgcaatctctccttgggatcggcttagtcttttttttttttaaaaaaaaaaaaaattaaaatatatgaggaagaggggctttaatttttcaagattcatcatttcccatagttaccgtttgatatatattattttagtgagatatttttccaagaaaatttaaacacaattcaagcacaagatttctcttgttatacataattttctccttgttaaaactgaacattttcttaagatttttgtaatttttgtatgaaaaatttcgggattcacttttcttgaatttttgactctacactttgtttctccattatatgtatatatttatattacattatggtggtatggttcgaatatgtctggtggagatactaagcagaccatgttttcatctactcctcattttttcaagataatttttcatgggactcttcgagaaaacaagcttgtaaggatcatctttctctttctctgtttttgtttgtttgttttagctcttattcataattaggaagaactgacccacatgagtattctctgcatataaccaaaaactatttcaacttaattataagtacttgaatcatgagttttcaacgatgctaataatatgatcttatcaaataaatatcaaatgctaataatcccaatttagaatgtcttagtttgcactttttgaaatgattttttgtaccttttttcacagctttcacatattattgttagagaaattttttaattttttatttgatttaattttgcagcatattcccaaaaaatttacagctaaatatggtgaaactttatccaattgggtattgattaagcttccatgtggttcgaaatggaaaatgggattaacaaagaaagatgagaatatttggtttgaaaagggttggctagattttgcaaagcattatggattaaaaagagggagtatgataacatttagatatgagggaaattctgaattttatgctgttatatttgatataagtacagttgagataaattatccttctgtacctaccaatttggttgtgtctagtattgatagtgagcttaaaatccaagttgttgagaaggattctgttgaagtcttggatgaatattcttcaccatgttctcggcctcacaagaaaatgagaactcaaagcaatccttctcgtcgaaaactcgagtcagagacaaaaggcatggagagaaatttcactttggaatttattatgttatgtattttgcagatttgggatgatatgttctatttgttgcaggggaaaaagacttgcatctatcaaccgaatcgcagagatgtgagattattacaccgatgaagtctctgagtggaagagatgaagctcttcagcaggctattgatttcgaatcgagactaccatttttcaaggtggttatgcagccacactatgttcatggtcaccaaatggtaatctccccttcaacactaaaccatttagttatctagaataggctaattatgattttccccctcgaactttacatgtagcaaatagtgttttcgaacttttcatgtcattgaaaattccctcttacttatgtttaggtaaaaatcctaattatatagactgtatccttacatttatttgatatttgatatggaaaactctaatatatttgactgagcagaactgtatataatacttttgttttgtgtgtgtagaatttgccaactttgccaagaaatatttaggagaaacatgtagcaatgctgtacttaaactgtcaaatgggtatggaaggacatggtttgtggaacataagtttggagtgtacaataaagtaccatcatccatattcaaggcaggttggccagtatttgctaaggacaataatctgaaagaaggggacatttgtgtatttcttatgcttgaggagatgaaatttacatttgaagttgtaattttcagagttaacactactacaaactcaaacaacttaatgtccccaggtgaacaaagattttatgtcctttactacaacacctctcttattaatctctgtctcactttacatccatttttatcagagcacaaagattccatggatgaaaaaactgtcacacctaagccaaaaaggcaacaacaaccacacttttcagtgattgaaagagctaagatccttgaaagggttcaatttaaatccgaatatccttttttcaagattgttatacaaccatcatcacttaattcaaggagttctttggtaagcttctcagctacattttcatgtcatataaagttttgagcattataagatgatgatgggctagttttcttgtatattttcttttttgggctagggaataccaattgaatttgttaggagacatcttgataaggagggtgatgcaattctttcggtttcgaaaggaggtggatattggcctattgaaattaaaacgagggaagtgaatactagagctgatttcaaatgtggttggaataaatttgcaaaggaaaatgatttaaaagttggcgatgtctgcattttcgagcttcttaagaaatctaaaaatttgtttagagtttccattttctctgatgatgatgatgcatacaacaacaaaaagtgtcaaggtttggttacttattataatgaatcaattttgagtttggtgtgtatggagttgtttagattttttctaaatttatttgtgttattataacataagtagtttgtatgtgtgcagttggtgcaagcaagccaaaagttgaagtgggagaagagcttgctatgatttaaaaatcaaatgccataagagcaaatacttgtatgttaagtgaacctctcttgcgttggtatgaacaagttcttctagtgtttagattggattctcttgtttccacttgtaaggaaccatctatgatctattatttattaagtaaatgtttgtcgttttgtagtgtaattgtcgttttggtttgggtctgaataaaggaggaaatatgggaagggaccaaagtttgaaaaacactcggaggaggcccttaaccaaagttaaatgggttatgaaacttaagtattaaaagagttaacattataagcttaaaacatggaacccacttacaaacataaagtctttggtcattaaaatttgagtaatttgcggcaaaaccctcccaactatcaatttatttgtaaaaaatcatccaacctcatattttggtgggaaaaccctccaaagtactattccgtttacatttttaaggtgtcgtctgt

SEQ ID NO: 300779 - DNA, 2972 bp, Cannabis indica
gctactgccaatcctcaactcgggcaatggaatatgatcaataaggtttgtatttatgatgttataattgttttgagctaatttgttgtcattgtatgctcttaaggatatgattcattcatttttttggtaatgatagaaaatgatcaatggtggccatgtaaaatcttggacttgtgtgaacttctcacatgaaaatccaaatattcacaatcgcttttgtgatgaactagtcaatatgtgcatcagtagaggaatggtagggttactcaatctttctgtctcgttatgttttttttcgcgaaattgcataactgacgtttttatcattttggatactcggaataaggctttccaaaccgcgccagtaattccttcgcgcgcttggccagctaacgaaattgaggaggccttgaaatatgttcatgaccaatgcaacatgatactcggaaacaatcaacttcagttgctaatagttatcttgcctgatttttcgggttcttatggtaagctacaagacttgtaactatgaagtttgaaatgccattataacattttgcctcttgtagggacaattaaacgagtttgtgaaactgagcttggaattgtttcacaatgctgtcggcctaaccatgcagcgaagctcaacaacaagcaatacttggagaatctatcattgaaaatcaataccaaggttcattttatcacaataattatgctctaattaattatttgttgtaggagttaatgttgttatgttggtttattaggttggtgggcgaaatacagtgttaagtgatgctcttaataagagaattccttttgtgtctgatgtcccgacgataatctttggcgcggcttttacacatccaaagcccgaagattactcaagcccttcaatagcagctgtaagtacatacattttactataatgattctcttccattgtttaggttattggatcgatttcttttacttgtattttaggtggttgcctcgatggattggcccgaggtgaccaaatatagagcgttggtatcagcgcaacagcacaccgaggagatcatccaagatctttataaagtaactacagatgataaagggagcatagtccatggaggaatgataaggcgagttaatcaccattgtgtacatagtacatttctctatgtatgttttttctttaactaattttcctttgtttctttcgtcgaaatagggatcatttaattgctttcagccgatcaaccggagccaaacctcaccggattatattctaccggttatttgtgtagcacacttggtaaaatctttagtgttttttcattactctgcctcttaatttactctgttttgtgcagagatggcgttagtgatggacagttcaatcgagtgttgctttacgaaatggatgcgataagaaaggtatttacttactattatcgctacacttacactatgtttggtagcaaggaaatttttttttacaaggaatagaaaattagaaagaaagaaatgataacatatttctttctttcttgtttggtatacaagaaagaaagaaatttggtatataataaaattaccatattatctttaaaaatattaatatgatattttttgtaaaattatttgtcttttctcctcacgtttttcttcccaaattggaagaggaaaaaatggtggattccacactatatttttcttctcatttctctcttctctccatttttccttcttaccaaacaactaattttatttcttcttctcacttttcttctccaacaaacataaatgatttgaggtatttagccatggcaatatctaatctgtttataattacaggcttgttcatcgctgaggaagaatatcttcctcgagtgacatttgttgctattcagaaaaggtgtcatactagccttttccctgctgattacaacgatcgcaattcaatggacaagagtggcaacattctaccaggttttagtgtgtgaatcttgtatgtaccaaatatgtttaacataagatttgatttgattggttttactattttgcattttgaaggcactgttgttgatactaatatctgccacccaactcacttcgatttttacctcaaaagtcatgctggaattcaggtccaaaatgtcacatatgattcatcaatgtatgtcattgttaatgttagcttaaaatatgtaatgaatatggtttcttttaaacttttttcgcagggaacaagtcgtcccgctcactaccatgtcttgttcgacgagaacaacttcacagctgatgccttacaagttctcacaaacaatctatgctacacgtacgacattttcattttttttcgctcttcggtttcatcttttgttgttcatttgatttattcttttcttttcaggtatgcaaggtgcacgaaatcagtgtctatcggtacgagctatacgatgtttaatgtttgatttgatcttgtttttgattagcttgatttcatgacttgttgtgtgcagttcctcctgcatattatgcacatttggctgcgattcgtgctcgttgctacattggagtagcagttgatgaagaagaaactgatgttggcccaagaacttatcaaccccttcaggtgatcaatgggaaccttaaagatgtgatgttctatgtctaagaatattcttagctgtttttttggggggtaaatatgttttatttagttaattggtagatgttattaacttatgttttttggtttgatgtggagtttggaggagaatggggatatttggtagttaaaagaaatgttaatttggttggtacatttttgaatggagtgaagttttttctagtacaagaccagagtctcttttgtatgttttagattttctataataatatattatgatcatcgttcacaaatacttttagtttttaatttttaattacaaaataaaagtaaaattttgttttcaaaa

SEQ ID NO: 300780 - DNA, 1624 bp, Cannabis indica
gtcactaaaaggtttcagtgacacgtgtggagtgtcactaaaacccaattttctagtagtggcaatagctcgcttcttccatggtttagaaaaaggtttgggggttgctcaattacaggaacatttttgagcttatggacagaatcatgagcttaatgtacatggtaagcttctttcatttcttatttcctctttttttttatatataattcatgggaaattctaacctttgtctttttcctcaaaacttaggcttcactaatggctcataagagcttttctctgcatatccaacactcttctcgcattaatcatcttcttcaagagcattaggaccagaaaatacccttgctatcgagtgagactttactgtagaaaagatcacccttattgaaaaggagaatcttgacttgaagacttccaaagatcaactgatcctcgattttgagaaaaagactacgaaaaattgttgagctagagaaatctttaaaagataaggattgtgagaagatgaaagctgttgaagaagctaaaagaaaagagaatgaagttgctcacttgtgccgttataaaatttggtagaagaacaagaacatgaacacttcatccttagagccctatgtcgatgaaagtattaaattgtttaagtaaatagaagttgatgaaaaggctaagcgagccgagaagtctgctgaagaggttgaagtcgagggagctgaggaggctacaaaagaaaatgaaattgatgttcctttacctaaatctcctagaaatgagatttagttagatttttttttaatagtaagtggcttcgagcaaagatagtttatttaactttattttttgtaatgattctttttcaagttggatggccagctggtttattgtataatttgtgctatcttaatgtgcgtacttccttcaatttttgtgaaaaaaatgatccaagtttgaatgatcataaaataattatgaaccattatctataggtaagcttaattgaatgattgcataacattttctttaaattctatctcgagattcattaatcgttaatccatataaagagtgaagttaaatgttttaaacaacaaattctttgattatttttaacaattttgatcaattatgtgtgaggtagttaattgtctattcgtgttttagcttatatatttttaatcaaaactcattatagagtttcgtttataatatctgctaagtatgcgagctattattaatttaggttgcattggcttgtttgcaagattattttcataatcttgtttttttacagcaagtgtatattatcatttttgcttaaagaagatttaaatattcaattttttactattttgaaccagttataatcgaatgctttatctttacaaaaattttactttttagaattttcaagccttttctagacatttatattattatataacctgagacccggctccaaacccagacctgtagttggtgttgggtcaagtttgttgaaatatattatctttacacaatctattaatacatatcaatacgaaaaatagtcttgtattaaataatattaatacgaaattaaaatagatataaaattataagtttaaatataaaattatttttt

SEQ ID NO: 300781 - DNA, 2370 bp, Cannabis indica
ttaaacaacatacttgtgagtagatctaagatcctggtaaaataaattccaacatctggacactactgcctgcttcttggatgaccaagacaccaatgtttcacctaatatccagcaactgatcgcctgtcatcggggcaacaagcccagtctgcatcgcagaagccaatgatgttcagtttgttgttgcagctgatatgtagtctcaggtgtttggagccttttagatatcttagaacacgtttcagagcattccaatgtactgtagtagggccctgcaggaattgactcagtgtgttaactgagtatgcgatgtcgggtctggtatggcagagatattggagggagccaatgatgcttctgtatacagacgaattatgcataggttcaccatccttgattgacagtggtttcccagctgtaactggtgtaggacatggcttgagattgatcaagtttactttcttcaatatgtctttgatatacctggtttgagtcaaataaagtcctgtctcatctctaaaaacttcaattcccaaaaagaactgtaattgaccaagatccttcagtgcaaagaaattgttgagtttggagatgaattcatttaccttagtcgcatcatttcctgttactattatatcatcaacatagatgagtaccaaaattacactcttctcagtcttgtaaaagaacactgatgtgtctgctcttgagttctcaaacttccaagtgattaaggtgcctttgagtttgtcaaaccaagctctaggggcttgttttagcccatagattgacttgtttagtttgcaaacccaattttccttccctttttcctccaagccttgaggttgtgccataaaaacctcttctttcaagatgccatttaggaaggcattgttgatgtcaagttgtcttatttcccaacctcttgatgctgctatagtaacaacaattctcactgttgaggctttgatcacaggactgaatgtctctccataatctatccttggcctttgatgaaatcctttggcaacaagtcttgctttcaatctttccacagttccatctgctcttagtttgatactgaatatccatttgtttcccaccaagttttgactatttgaagggggaaccagcacccatgttctatttttctttaaggcaacaacctcggtattcatagcattattccaccaaggatgcttaagagcttcctcaacagattcaggttcagcataagtggcagtggctttggctgagctgaggtaggttttaggtttgaaaattccttctttagcacgagtcatcatttggtatgtaggctgcaatgctgtggctaaagttagttggggtgaggcagctgctgcaggttcagcatcagagattgcagcatcaatttcagagactggttctaagtcttgctcaatagtacattgctcgaaatattgatcaaaattaggagtaatttagttatcattatcaatattttgagttatatcctcccctgcaagatcagaggcagaactagtttgggacaagggaaacgaaacctgagtagaacctggtgatgcttcagagaatgcttcaggttgaggatgcacatacctagaagtgcggtgatctttgaaggtggggatgggaagggtggagcaagatgaactgtggatgatgacaggtttaggagttttataattattaagaaaaccgtgtttgaatggaaactccaactcattgaatactacatttctagagatgtagatgcaacctgtgggagtgaggcaattgtaccccttatgggaggtgttatagcctaggttgacacattttagtgagtgatattggaatttgtgggactaatatggtcaaatgcagggaaagcaagcaatgccaaaggttttaagaaagttgtaatctagtttttgtttgaaaagaacttcatatggtgacttgttaactaacacaggtgttggtaacctatttatgagatagactgcagtataaaaggcatccacccaatactttaatggcagttgagcttaagcaggcaatgtgagacccatttcaacaatgtgtctatgcttgcgctcagctttaccattttgagtggaagtgtgagggcatgaatgttgaaattcaacgccttgatcttgaactagagtggtgaagggttggtattcaccaccccaatttgtcctgagacatttaatctttttgtcaaacttgttttcctccaagtttttgaattgaatgaaagcacttagtgctttagatttgaacttgagtggatatagctaggcgtgttcgcggtgcgggtggtgcggtttttaactatttttttcaaaccaacccgcacatgcagtttttcaaatt

SEQ ID NO: 300782 - DNA, 2018 bp, Cannabis indica
ataataaatccaaactttcagcacaatattttcccccttctctaccaactcaaacacacaaacatctccttcttttaaattattgtccattgcaaatttactccatccatagcttagttccctacaagagggctgatcacgtcgcggaaggcactgtatgcgccacttctgtgtctcgttgccatgaacaacaagatgaacaaatccacaacactggttcatattcttctgagtatacattgcaggcacatgctgttcaagtcaagaggaacaaaaagtttagtacaaaaaagtaaccaaatagaagaaaatccaaagcgaaacatgtattgtttgttaaccttaccacagacttatgtagagtatttttcttcctcaggatgaccatgaaagaaggattttcatattcacgcatgctggcaatagtggctgctttctcagtttccttgattatcttataataggaatttggattagtaacagggaaacctcttggaagaatcagatttgtattttcttcatggtttaggaaaaagttctcttctttttccattttagctgagcttctaggaacattggcataacccgattgttccaccggtgtctcctcttctgttttaacagctcgactagcttttgtacaatcaatggaagctgcattagttctgaaaatcttattagaccgctcagttttcgggttagacaaaggggtttgaactctcttgaaaacttgcttgtctccaagtttgttgacaattcttgttttggaagaagagtgaggaagttgaaggtggatctcattatcaagattaggatccacaaagttgctactcagatcattcaggggaatgggatagtcaatttcagtaaaagtgttgttcaatatacaaacatggaattctgattctccttcatatctaaatatcaagagatttccataagagatggaataaaagttgacaaattcctgccaaccatgtttgaaccaaatcttattgtcaactttctctaatctcacttcccaaaactgaccacttggaactataagcttggcaactgcaaacagttcattgcctaatttctttgtaaactttgttgggagcatcttcaagtgccaaacaaagagacaagaattagactttctttggtcaaatttacacacattatcaagataatacaccactcttggaagttaagactatgtttgggaactaatattcctatttataagagcacaattaattgatctgtgttttgcgtatagttgaaggaaaaagctttatttacctaacaacgaactagttatgaagaacacatatatgtaaacatacagctaatattgagagattttcaaaccaagatgcttcacaaaatagagaaaagaaccaaacctggagaaataaagagaataaaaacagagagtgaaaacacaagaataccattttatgttggttggcatagtgggagtgaagcattaaggtgaagaaatggagcggttgttctggctgaggagcagttgttcggcggtgagaaatagtcggagatggaaggtgggtcgtcggacgattcggattcatgattgggttttgaagttagatgaagaaactataaatatagcattggattattagtatagagagatttgcattggaaaatggaagaaggaacttctgcactcgcattaattagtacgtcagatgatagaccatgaggttgggtggactccaacccaattacacggataataatataaataaggctaatactataagagcattgctattaaacgtggctttctcgatatatcgcgttgcaattagctagtgaaatccgatacttagttggaccaatagtaatattgacacataaaaggatactaagcatcactagtccttttagtatttcagaaatgcttaaacatatttccattctctttggctattgatgcatgatcacatcgtattttttatgagcttttttttcattttttttctctttcattttttttttatattttt

SEQ ID NO: 300783 - DNA, 2537 bp, Cannabis indica
  modified_base (18)..(18): a, c, t, g, unknown or other
gatttttagtatctactntaattatttttttttgaaataagtatctctatattattaacagtgtggcaattggttgcattaataagcttcagttgtaattttagttttcagtcaatttattagatattttttcttattagctcctgttggtggtggctattgcagcgccatttcacgatcggcgaatgatgttgcccacacactgacaatctctattattagtttaggggagtgtgtttggacaaatgcttgtccatgatatttaagtgcttctgtaacatcagattttatcttaataacttatgtctttctttaccaaaaaaaaaaaataacaataataactaccatatagtttaactcaaaatgacaatttagtcaatttaagcattccaattacgttacctcataaagcaaataacataaatcagtattattctatttccaaataattttagtaaacaacatattacaaagattgattctaattattcttcatttatttagttacatttctctattaatttaattctgattctgaatactgtgtaagtaaaaaataagaaaaatagaagagtgtatattattttttttttttcttcttttttttagatattcgttttttttttttttttgaataactttttttagatattcttaaatcactagtaatcctatgttcttagttttcttccttagagagttccactcaagtcaaacacttttccttattaattaggcaaatatcacaacttaacttaccacgagtctatccatctcatcattggtatagtagggactaaataaaactttaacttgataggagcgttttttttttttggtttttgtgttgtacctaccttattttctataaaatataatatgctaaaaaatgataacaatggatacaaacttagtattacataaggtaatgataaaaaaatttaaactttaatatgttgaagtactataaaaataacattttattgataaatatcacttttagttacaaatctaaaattcatatgtatatttatttatttaatagcaatgctctaataataaacctgcgatctagtttattaattataatcttgtgtattacaatatcgatctatataaatcccactaatttgctattacatatgattgaaaaaaaaagagtattataataaatgctattctaaatgaaacaacatttaatttcatgattattgtaattattagaattgaaaactgtcgtcgtatatagaagtagtgcagccatcaaaaagtggatccaatgaccattgtgtagttgtaattgcagtagaattaatattagtatcatcaaattcaaggttatgatgatcatcaacattaatattcataaaaaggctcaacaacttgtctctttgcacttggatctccatgacttgagctgttacggtctccagttgagaattgagttcactcaccatcttttgcaaatggaaaataatcccagcacagccataaacggggtctctcactctcgctgtggcttcgtacactatggattttactgcgtcatctctattagtctcctccaccatctaatcattcatcatcatcaatctcaattattaattaattaattaataatcatgtacacacataaaaatatatatatgtacctggatcattttgatgatgttactggctccaaaaaccttgtgaacgccagcaaaattctcaatctcttcgggcggaaaataaggcgaaagcacgcaattgcggtcgcaccttcgccgtagcattctacatgctgcgcacggttgatgatggagtcgagcgcgcgcgtttggaacttggtcggttgattccatattattagataattaataatatgtacttgaagttagctacatgtacagatattgtactaacacacataatatatatatatactaaagatagactaaattaatttagtaagatggatttggttttaatttggggtagtaagaagagagagaagactagaaattcaaagattatgtgcaagaaagttggggtgtcggtcacttaaggacatattataaggtgatgaagtgttgaaaaaattggggaataccgtatactttaaggcttaagttgttaagtccaatgtagcagacctaactacgtactgtagccccacttggtggggagttattctattggaaatctaacatgtatcatacaaactcgtgggaaatgctagctcaatccactcattacatgtgtgaaattaattaattattctggtgaaaaacaatattcaggacttaatttttattgtatatatacatatataaaattaaagagatatttggttggaattttttttttatatttataattattatacatatgattttaattaaaaaatgtggcggtaaaaatatttcatcttacgattttattacagttgtataattttttaactgttaaatggcaattaaactcattaagtgaacgttcagaaacacgtgacgaatatatttctccagcctatttaatatgtggtctaataatat

SEQ ID NO: 300784 - DNA, 6774 bp, Cannabis indica
atattgccattcttgctaccactttctatggtatttggctcaatacaaacaagtgtatttttgacggttgctccagaacgttagctcaattgttgatgaagtgaagagtgtagttttatgcagattatactttataaataagaggaaaattacgaggcaagagaggaattactgaatagattacaatgtaattaattgtttttcttgtttcttgtttgtgaggtttgtataggtgaggcctgagggtgtaattgctttgtgtaaatcaaagttctttggggcattgagttttcgttctctttcctattttaatcaagccatgttggctaaaaaatcctagaaattttttaaaaatcttgattctatgcttggcaaacttctgaaagctaaatattttatccttacaagtctttttgatgttaaaaaaggacactctgcttctttcacttggacaagtatactatggggaagagagcttttgaagagacgcctattgtggaagattggtgatggtgctttagttaatactataagtaatcgttgggcggctaggtatgattcttgtaaaaaccatttgaggccaccttcaaaattttgtctttcttcattcattctttgtgacattgggacttacataagcttaaacaatattttggggatgatgatgtttctgccatcctagctattcctttgattatgttacgaagtccagacacacaaatttggagactcactacaggttagttcaatgtttattcgactaaccatctatccttttcttctagttcttatccttcctcctcaaattctcaaatcttgaaaaaatggtggactttcctttggcactcaaagcttcctcctaagattaaatattttatttggtgaatgtatcatcatattcttcctgtggctataaatttacattctagaaaagttattcttaatgcaatctgttcttggtgtaataggcatttggaaatagtttcccactcgttactcgattgttctagagttaggaaattgtggaaacattcactgttttaacattttttgttgagttatcaatgtctagatattaaacagtttatactgacttgttttgaagaattgaatagctttcattgtgaactaatatgtgggtttctttgggcaatatggaatcaaaggaataatcatcttttcgagaaatctaactgtgtctttgagaaagttttcaattggttatcatcatatttataggattatccaaaaagtcaaaggcaaataagcatagggtgtcaacaaaggcaacaagtaaatagaactggtggttagaaacatcctccagctggaggtttgaaacttaatacagatgttgcttaagatattaagaagtcaagcacaagctatggtgctattgttagaaatgttgaaggcagaatagtggctggttgttgaaagcctttaattagtagaggcgatggctttacaacattcttttacttggtgtcgtgtgactggtttgcctatttctcatatcgagctagactctaaggctgttgtggatagggttttatctcctaaagatgactcttagccttatcggatgttgataaagaaattatatatctttatcctttctccaaatgtaattatttcctatgtttttagagaagctaattgtttggcatataaagttgctagaaatgctttagggtggataaagagttggtatggaatggaggtatgccatgttttgagttgtaatttatattcacacttacgcaactttccgaaaaaaaaaaagttggaaccaaaagttttgtcttgaaagctaggttaggaatactaacctagaggcagaaaatattgtttaatcatgaggaagtaacactcaaagctagaacatttatttattttatgtttgtcttactccttgtgcgattaattgctttaagcactagaaatggaaaacccccgactgtccaaatatgaaacttgacaactttgttgttccgataagcactgtccaaggcttataggcttcaatcctttaactataaaaaagattcccccacttcctctctctttccgtagccttaaaagttcaacttttccacttaattcaacagttgaccaaacgtctgttctaatccattttctcatttcggacttttctcaaagcctcctccagtttaagacaaaacttaccaaaccaaaccaaatcacactgttggtttcattttttctctgtaatttctccaatctcaaccaagctttgcttttttatcacgtttctcttctgtccaagtctgcatctgggttgtttttttccctatcagcttattccttacacctgaactgattggatttttctgatccaaaatctctagtttttctaaatccctgtctctgaaactcagtatattctgcttattgtttccaaattatttacctgggtttggttccagttgaagattcactaactgttttttctttaatccaaattgatcgattagtcttcttcttttgactcataaatgggttgttgtgcaagcaaaaacggaggcctggaaccacagtataatggttacagatcaggaggaggagaaggaggtggtggtggtggggttcactaccagaagcctaacgagccaattgtccatcaatccaaggcccaacaagctcaacaatctcaccaattaccggaaaagcgtccggcggcagcccattcagagcctcaacctgggtataagccttatgttcccgccagaagcccaaaacatgctatgaggtctgatacaattctggggaagccatttgaggatgttaagcagttctactccattggaaaagagttgggtagaggtcagtttggtgtgacttatctctgtactgagaattcaactggtcgccaattcgcttgcaaatccatatcgaagagaaaactggttagcaagaatgataaagaggatatgaagagagagattcatattatgcagcatttgagtggccaaccaaacattgtcgagtttaaaggagcttatgaggacaagcagtcggttcatttagttatggaactttgtgctggtggggagctctttgatcggattatcgcaaagggtcactatagtgaaagggctgctgcttctatttgcagggcaattgttaaagttgttcataactgtcatttcatgggggttatgcatagagacctcaaaccagaaaatttcttgctctctagtaaggaggaaaatgcccttttgaaagcaacggattttgggttgtctgtgttcattgaagaaggtatgtacttcatcttttccttggggatttttttttttatgaccattcttttatatgatacacaatgatgttagaataaaaagggtaagagtagtttcctgaaagatgtgcatagtttttttactctaagctagttgctctttagatttttcttgcttgagaatgcatgacattatatgatcctaatcttatgtggatgttataagaattttccttaaagctgcgcaccggcaaatttaaagaattggagagatgagtaagcgaaattttccttggaaataatgattttgtttcagttggtgaatttcgtttacttgaagtagtttagttggcaatatgataagtgatgggtaatttgtaatcctataaatcataaggctcaattaatgttgctttttaggtttgtctttgatttaaagtaacattgcatatgttgtttaagaaaataaaaaataaagtaacattgaacatgcagaacatcatcaacatttgcttgttctcaggggtagttagttccactcttccgaacagataatattttgatctgagttaattgaatatgcggcttggtggcattttggcatgtactttatcaaaaatgattagtttcatcataatttcccaagtaattgtagtcctatttcatttagtctccagataataatttttcagttcaatatgcaattggaagtccattttctttcggagatgcaaaatcttttgttttcattacaccaagaaggaaccatataatagatgtacccgcttgcagtgcatacgcaatcaaaacatgcatgcgctacttactttagtctgtgtaaatcaatatctatgttttgtttaaaagaaaaaataaatataccttggaatccgtattctttccttcatagtaccgctgttgatatcttcttctgcaaatgaactcttgccaggtaaggtgtatcgggatattgttgggagtgcttactatgttgctcctgaagtgctgagacgcaaatacggaaaagaaatagatgtttggagtgcaggagttatgctgtatattttactcagtggtgtacctccattttgggctggtaaagtattgttttatatctctttttgctcaacatagttgaataactacaaatagtagcttctattttaatttgtgttttcattataaagaaatcatttttggtgtaatagtgaccttttttattgcctttgacttacagaaacagagaaagggatctttgatgccatattgcaaggggaaattgactttgatagtcaaccatggccttctatttctagcagcgccaaagacttggttcggaagatgttgactcaggatcctagaaaacgaattacctcggctcacgttttaggtagtatctctcattgcaactcagtctacaatttacaacatcatgaaaaactgaagtgttgcacataaagtgtcttgccttggttattacaagatggtgatgtcttccattttataggtttcttcgatagttctttccttaacaaagtttatgtttcgcccaattttcagtcaaccagaattctagcttttcatatcttttcctgttttaaataaacctaattttggaatcaatgggacactgaagtcattcaaatgacattcttctttagtcccatcatatatttcatatcactagaaacttacttcacttgtttattgtacaattctcttaactgaaacctgttttatggttgggtgtagaacatccttggctaagagaaggtggagaagcttcggacaaacccattgacagtgcagttctttctaggatgaagcaattcagggcaatgaataagctgaagaaacttgctttgaaggtgaacttgttcccagtccaaggagaaatcattttggcacattgtggacaattctaataaacttgatatggatttcaggttattgcggaaaatctgtccgaagacgaaatccaagggctgaaatcaatgtttaccaacatagacactgacaatagtggcactatcacttatgatgaactgaagtcaggattggcccgactaggttctaaactcacggaggctgaagtgaaacaacttatggaagctgtatgatattttatcatattccaagtgaaaaatagttgaccagttttcttgtacatttttagctaactcttcattttttttttatttacccttttcaggctgatgtggatgggaatggaacaattgactacatagaatttataacggctactatgcatagacacaggctagagagagaagaacatctttacaaggcttttcaattttttgacaaggacagcagcgggtaattcttcttttatttccccttttttttctttaaattttccttctttactgaaataatttccagtttcacgctgttctatttatcagttcggtacaaagattcataaaagcctgaaatcttaaagcagttaacatgtactaatggaactggagcacttcgtttttttttttttttcttttgcttagagaatacctcataatatgactatttgactcaaaaatctttaaggaagatcggataatcctaaactttctacagtatgttttggatttatttttggctattatcaatcttaacaatcagaacacgaacacaaatagagaaaagattaaatgaaatgttctagtgtttccctcaatgtatcttgtatcttgcttttagtttattttgttgaaatttattgctggtaataactttcaggtttatcactagagatgaactagaaacagcaatgaaagattacggtatgggtgatgaaggtacaatcaaggaaataatttctgaagtggatacggataatgtaagtcaatctttcattgcagttctacctcagcattgtaaattacaatgtgactttctaactgtcttccggtttaacaggacggtagaatcaactattcagaattctgtgcaatgatgagaagcggaacacagccgggaaaactcttttagatgaattatctgtatgttaccattctaaatattaaagagagcatgcataaatagtaagtcactttcaaccacactttgggaaaagcttatgtacacaaatgctatcgggctaagaaaggatgaattccattgccattgaacatagggggccttcattttggattttattttgagtttgcaactttaacagttgtgcatatcgccatctttaattattttgtttttttttaatgaaagtataccaacgtgttgatgtttgaagaagtaatcattacaatagagatgtatttaaaatcatactcctgtttgacagatccagctaaaaattgaaggctctatatggtgttgattttttgaggaaatttgagtttttataaccctatatgtaatgttgctcttcaaaaatagagtattggtgcctagtattaacatgagatgatgcaggggtgttcataaatagccgatccaatccaatccgcacgattcaatccaat

SEQ ID NO: 300785 - DNA, 3473 bp, Cannabis indica
ataattttgcttgtgcttcctattatttttaagatcgaatctttatttaaaaatgtttctgttgaatttatatctattcttctaaacgatttggcttcttaactaattttttcatagtctataatattaatgatcattgaaaaaatactaattaagatttttactttttaaacttttacatgcaccaaataatatttttgaatttttaaagttattaaaaatttctcctaaattattgtaattgttaattttaaggacgtttgtccaattttagtaaggaaagtctaacattgatgaaagcttagagaacgtaatttgttacatgttaaaattcgagtgacatgatttgatagatatttaagtgtagtgagcatgatttagtacataaaaattaataaaattgaatgcaattagactaaagttcttaaatcgaataattttaattgtttaaaagatatttttaacaataaaataaatctaagagacataatttaataaaaaatttaattagcctaaaaaaaataaaataaaactatttttagtgaaaagaatgataaatatgatccaaaatacaaggaaagaataaaaaaatataattaaaaaataaataaaaaaattaaaaggcaaagctgtcggtattaacccagcctgtctcctccactataaataccctcacaaaaaccctaccctttctctctaagttctaacctttttctctctgcaaattttactatcaatggcggttgatacacttcgtcttcgcaacaactctctcaacgacggatctccacctcaccctagatctattgcgccatcgccgatttctccacctgaatcgcagcacttcagagtacctccgccgatgaaggaatctcacttcagaggagtacgaaaacggccgtggggacgattcgccgctgagattcgcgatccgtggaagaagactcggaagtggctcggaacctttgatacggcggaggaagcggcgcgtgcgtacgacgacgccgcacggagtctccgcggtcctaaagctaaaactaacttcggtcacggaagcatctcaggaggacctgttgttgtggcggcgtctccgaatcagtctgtggttgtcggagagtgtatgcagttgtggagacaaccggtgtactttcacggcgtttcgcctgcatcggcgccggcgagatcggagtataagggatataagcttgagaatgtggatgtggttgtgaacgagcaggaaaataagaataagaagatgatgatcggtaaagagaagaaaccgttcttgttcgatctgaatctgccggcgccgttgttctgagctgcctgaactgtgattctccggcgaaaatagtatagggggacacagactagagacacacgtgtggtaagaggctttactctttattgtggaggtatgaatttccaattttgcccctgaacggaagctttaatttctatttatgtacagctaagtaaccaaatgagggctagtagggatgaattaattaaatgtaatttagagaactgagttaacagactttgactcggtctcaactctcaactcaactcgtttaaatccttgtagatttcatgaaaatatctttagtttatatgatgaatcatggacgatgatgatatttgatatagttgatcagtttttattctgaattatataagttatattatatttaatttaatgcaaagattaattagattagagaaatggtaacgttaaaataggatgatatatagagttttaggtacaataataataatataaattaatatatagtaatgagaaattgagaatgatttaattaatggaattaattaagtaaggtttctcaccaaaattagtgattaattttaattgtctcagctcagcatgacaaattaattaacaaccaagataagccatatatattataatatgttaatagttattattgatgttcaagacatatatataagccatattaatacattattgttatatattagaatgtgtaaggaatgtttagttgcagcaatttgaatcagttatgataaattaatgttcatgtttgtgtgttgagagttttagtgttgaatttgagcaatatatatgatataagaataatgattcacacactcaaagtgtaataatgtataattaatcagaatccgaatcacacaattaaaaatgttgtatggtcaagattcaatatgcaccattatatgtaataagtgtgtatgtactagtagtatactcgtaatataaaactcaaaaaggagtgatgaaatgaaatggtagccattgtactaatttgagtgaccatatcagtactagtagtagtagtaatagtactgacaaattttgtttgaaattaatataattaattatgtgttagattagattattattagggtagataacgtatttgaccacctatatttctgaatgctgagttctgacacttattatttaattcaattgaattcacttcttcttcctttttacctttcctacatattttcttttcaattatatccattgtattaacatcttgaacttcaaaataagtaatatcattttctcgaaacacacggttaaaaattagatgagatactttgctaaattgtgagcaatttatttgcaaaatttttaataaaagagagacacgttaggcataatttgtaacaaaaacttacaatcctcaactaacccacaaaaataagaagacaattattctaactaagcccaattaccatccttaattactttaaatacctaattattttaatattagaggatatgttaaggtgtcaagcatcacaataaataatatactattattaatgcaatttaatattacgtacgttctcgcatattttgatttattaaataatacaaaaaatggctaccactctccatgtaagttgttagtgtacctaataggaatgcatgcatgtgttcattttatttttattttttgaaattaaaagaattttcattaaccaagagaaagagaaagaatacaatgaaagaggattaattaaagtagagtagagagcagtaggcaaatacgcccaccaagttttcgaaaacttagcaagggaatgagccaaatacaagggagatatttctttagactataaatgtctttaacaccataccaactcaaaacatgaaactaccgactcacagatttacatgataatctttattatcaatgtactccacattatcacttgtaataaaaattaatagtaaaattttattaatgtaaatcaactaaaataataatctccaaaaaaaaaatatatataattaagattgaaatttgaaaaacgagtcaaataaccagacgcctaattttcaaatcgtttggcaaaaaaattaaaataaaattagatgaaaaagaacaattaaccttaagaatacttatattatgttttatccaccgctcataagatacaacagtagaaac

SEQ ID NO: 300786 - DNA, 4224 bp, Cannabis indica
tagggcatcaatatatagataggatgactagaagaaaaatcaaacctagttataaagttgtcatgaaaaaaaaaagaagagaaaaaacttaggtataaagtttattaaagccgtgtgattttatctagccgaacaccttaaaaaaagtcccatgtccccatgtgtaatcaaactcaaacttattccacctactaaaaaatgtcacgcattttatttttagttatcaatatatgattaatgtagtattttttttatatatctttaattatattaaaaataatatttattaccaaaattttattattgctttttagaagaaaactctaaaacaccacccaatagagtatgagcgctaaaaaatgaggaagaggggataatatcaattaatgataaattacccataataatattgtgtgcacaatcaggaaatccacaaaaactttgctaacagctatacacaaggcatatttaacaagtgtgagcaatagcattagcagttgtagaataatgaaaaagactcatcctatctaaaagagcaaaactacaaccaacatcccgaagaactaagcctaaaaaaaagtctagagagacattattattattagtcttactcaatactcactacaataagacaatcaaacttaaattgaatattaaccaaccaagtaaacgacattgggttcctgcaatactcaaggcaagagctacaagcctacaacgacttcaggttgaaagtgtccaattgtgcgcccaataccggtggccaaaacaacacattgagtatcacgaaccaccgtaccaattccacaaaacccaccatgatcaatatctaatgtcccatcaacaattaccttaacaaaattcataacaggaggcacccaactaggatcagcaaaaggagaagaagagggaaaagactgccccatcaccccatatgaaccccaacctgagaccgagaaggactttgataatttctgaaaaactcacgggtccaaacaacaacaaccttgaatcaactgattgttattcaccattttattttcctataccaaatcctacataatatcaagaactaatttcacttgagaaataggtaaaggattcaaaaattgatatgtaaaactataaaaatcagagcaacaaatcaaaggattagtagttgaaactcatacagctctcagtattaattcttgagttaaaattggtagctatataagtgatacttaatgtagtatttgttatttatttattattacaaagtgcttggtatttttaattcctaataatttgggggtgcgatacatagtccagcatattaactttccaagtaaaaattattaaactttgtgaatcagggaacaatggcacaattgatggtcaaggagagttgtggtggaaaaagtaccgtggtggagaattaaaatacactcgaccgtacctgattgaaataatgtattcagagaatgttcaaatttctaacctcactttgctcaattctccatcttggaacattcaccctgtttacaccaggttttctttattccgtcattcttcatttacaaaaactgtttattaatttatgtatcaattattaaatatatatatatatgtatatattacattttatatatattaaaattatgaaatatattgcagcaatattattgttcaaggcattacaatccttgctcctgtgacgtctcccaacaccgatgggattaacccaggttaactttctttctctctttctttccgtttcttctttttttagtttgtgaaaagcagattaactttctaatcccaggcccttttatatattaagtgccaaacaattttttattaggagtaaaaacattttcacaaaatgactattaatgaaggaaacgcctaaaactggtacattaaattatgtgtttctataaacgtaaataaataattattttattattttatatcaagttatttatttttattatttattaattttttttattttatttttttgaaatgtcaagttatttatagttaaaccaattttttaacacgttttttttaaaaattcttaataatttagagtactataaacaaaaatgagaagctggactagcacaggagtttaaatattagttttaacgctccaaagtactcataatttggttgtaaatataatgaagaacatcatatgaaatattgagctgataacgtgtctatacatatatgaaatggaacatgcaatagggtactaattcaccattataattgtttaaaagaaaaagccactattttctattatgcttcactagtatctgtgtttttattaagacatagtttactctacttcaattatgaaagggtaccttactttactttgttattaattatgaattatgtgtttgtcctaaaaacaataatatgaactaagcagattcttgcacaaacacacgaatagaggactgttacatagtttctggggacgattgcatagcagtaaagagtggttgggaccagtacggaatcgcatttgggatgccaacgaaacagctcctcatcagacgcctcacctgcatatctcccttcagcgccgcaatcgccctcggcagtgaaatgtccggcggaatcgaggacgtccgcgccgaggacatcgtcgctatcaacaccgagtccggaatccgaatcaaaaccgccgtgggcagagggggtttcgtcagggacattttcgtccgaagaatgaccatgaccaccatgaaatgggccttttggatgaccggaaattacggctcccacgccgataacggatatgatcccaacgcccttcctcaaattcagaacatcaattatcgggatatggtggcagagaatgtgagcatggccgcccgattggagggcatctccggtgacccttttactggaatttgtatctctaatgtcaccattggattggcgaagaagcccaaaaaagtgcagtggaattgtacgaacgtgggtgggatttccagtggggttgttcctacgccttgtgagctattgcctcagaaaacgacgtcgtgtgagtttcctgaagatgttctgcctgttgactatgttcaattccggacttgctcttaaagtgcaaagaaccattagtatttctctttttcttttgttttttatataaaccgaacacgaaaattcaatttcagaaataccataaatcctatactattagcaaagtatcattattttaatagaaaatgtattgtgtaagaatgatttatagacttgatgatgctttttaaatgtacctcattgcttaataataaaacgatatattatataaggcttgtaaccagttgtaacatgaaaaaataaaagaaaaaataaaaatattcacgaatgcaattacactttttgtatataaaaatagtgttgactgttgagacttgagaggggaatattaattagggtaaataatagtataagtacctaaaattttatatttgtaatcggcataaactcaatgtttattttttgtggtataagtacctaatatttataaaactgtaatttttctctaattttatcagtacagactctgttattgtcttaaactgtgtacatataaaaacccaaattttaaattattagatctaaatagaaatatgtagtatcatttgtttctaaatattcttttaataaagtactgacgaaactggaaaaaaattacagttttacaaatattaaatacttatgtcactaacaataaacattgaatttatactgtttacaaatttaaaactttagatacttcaattattcgctaaacttaacctaaaaactttgttctcgttctctcttttgtcttgtcatactttgtttgatgcgtaaaccggcttgcatttctataagagtatattctaattattgcaattctaacaataatgataattattgcaacaacaaaaaaaacaataacgataattatgatataaagaaataattacatattttattgtttaaatatatttttaaaatgtattgcttaaaaattagttataacattttatattaaaaacatataattattatatttaatatacaatttatcatacttattaaaatatttcaaatttatttctctaccagtattattcaatttatgttttcctaaaccatagacatgtgtcacatgttcaaggattagataagaaaaatttataaaaatactagaatttgagttaactttta

SEQ ID NO: 300787 - DNA, 1427 bp, Cannabis indica
tcactttgtttgagtctaaaattactcttccaatttatgactcatttcataagtttagatccacttttgatccattttttcttgctatgacaagacaattctcataagtgtaactctcatagttcactttcttatctcataaaatgagataattatcacttataattctcaaaaaatgtaacttctcacaagcattctacaccaagttgacaatgaaatgaacccacccatgtgtgcctaaatgtcaatacatataaaataaatatatatggcggaatgagacataaatattaatatgttctcacacaggtgacaaaatacctaaagttggtctatggagagcacttccataaggcagctctcgcatggaacactacaggaaaaataaagaagactaaacaacttaaagtcaatggcagtgctctccaacattggataccactacaaacatgccaacacccttatggaactccaatcctcaagactctgggtcatgtccagaagtggcctcttctccattctccccgccttccgctgcagtagtgacctcagtagtattcacggctgcctgggctttacgacaatgctcctcaaaatcacccaagagatcacccatgaagctaaaatccatctctcgtttttggcaccaacacaagtatgatattccaaaaatgctctccttggcaactttctcgatgcgagggacctccgccttgtgatctgctttcatctgttcaacctctgccttgtgatctacccacatctgctcaatgatctgtgcattctccgactccaaatttgttatggacgccgtatggttctccgtcatggccttttattcgacttccaacttagtgtatttggtatttagcaaaccaagctcctcaagtagccttgtgtttagcattggcctcttccaattgtttctcaaaagaggtaactctcccctcaaggttcttgattgtcaaagtagcctccctaatacgctttttgaagtccatacacctctttgtgtaggtgttatgagaggcagtggacctctggtaaagactgaggtcatccaaactacaaagacgaaacaggacagtcagccacatcataagtataaaagatgtatatatacacatacatatgcataagatggagcggtaaaggtgtaattaccatagctagagagtcaaagcgtctttgcaccaaatcgttgaccgggaccaggtcactgtcaaaggccctcttggtcgaaagtcctatgccaatgttcttcaaaacttgcccactccgagtaatatgggcgtcagatgtctcttcgtggggcgcaagtccccgagccaattgctggaagaaattcggctcgggggcagtgctcgcaactggtacaagacatcataaacgaccttcagtaaaataggcataactctctcaatttt

SEQ ID NO: 300788 - DNA, 2036 bp, Cannabis indica
attggggatcgagatggctgccagtgaggcttccccgttgacgcgagaaagggcatcggctgcccagttgtcgaaccccggtttatactgaatatcaaagtcataacccaatagcttagtcagccacttttggtgctccatagaaaccaatcgctgctccaacaaatatttcaaacttcgttgatcggtcctaaccaaaaatttgcgacccaaaagatagggacgccatttttgtattgctagcacaatggccattaattctcgctcataaactaacttcagacgagctcgaggggacaaaactttgctaaagaaggcaatggggcggctatgttgcattagaacagctccaagtcctgtacccgaggcatccgtttcaaggacgaaaggggctgtaaagtcaggcagcgccaacaccgacacattgcacatggcttgtttgagctgatcgaaagcttgttgtgcttcaactgaccaagcaaacgcatctttcttgagctggtctgttaggggtctagctatgctcccatacccttgaacaaatttacgatagtatccagtgagccccaaaaaacctcgcaactccttgatgttcttgagaattggccacgagaccattactgcaattttagccggatctgctgcaacttgtgctgaaattacatggcccaaatactctattcgtggctgagcgaaggtgcacttcttccgatttgcatataattagtgactcgtaagtcgttccaacaccatatcaaggtggatcacatgggctgcaagattaggactatagacaagaatgtcataaaaaaaaaaacaatcacgcaatcacaacggaagtcgcggaatacctcattcattagtgcttggaaagtggctggggcatttgtcaacccgaatggcatcactaaaaactcgtaatgtccttcgtgagtgcggaaggctgttttctcaacatcttgtggtgccatgcggatttgatgataccccgatttcaagtcaatcttggaaaagattgtggccccatgtagttcatccaatagttcatctattactggaattggaaatttgtcggccactgtttcgcggttaagagcacggtaatccacacaaaaaggccagctgtcgtccttctttttaattagaaaaactgggctggaaaaagggcttgtactgttctggaaaatgcccgctcgaaacatttcccgaaccagcttctctatttctcccttttgtatttgtgcataacgataaggacgaacggagataggttctgtccccggtttcaatgttatagagtgtgcccaagatcgtacgggtggaagcccaggaggcatgtcaaagattgccttgtgtttggtaagaagctgtgagatgggctccggtagtgattccaattcttgctcttccttgttactcaattcattcagttggacccaataaccttcgtctcctttctccacctgtaaaatcattgccttcaacgaaatgggagatttgcacaagctgggatcaccttgtaaagtaacccaagaacccgccatttcaaacttcatcaccatggttttccagttcacttgcatattcccaagtgtttccagccatttgataccgagaatgacatccgctccacccaactccagcggaaggaaatcggtaacaactcttatggcacccaagtcaagctcgacctgagcacaaataccctccgtgcaaaccttgcctcccgtacctaataaaattccataacacgaggtggctgaaatcggaagacccaccgctgtaactacttccatggacacaaaattatgggttgccccgctgtcgattaacaccgtaaccgtttggttgagaatacgtcccgccaatttcattgtgttggtagttgagataccaatgagagagttaagggagagggtggctaacgtttcttcggtggtgttggtctcatcagagtcaggagataatggtaggatgtcttcaggagtttctgtaacaccctaactagctgttgtgaaaattatatacgcaagtat

SEQ ID NO: 300789 - DNA, 1034 bp, Cannabis indica
ataccgtggaccttctctcaaacgtcgtcgtgtcccgaaacgaagttcccaaaacttatcgagacgacgacgttcacacgtggctaagcgccgcactaaccaatcaagagacgtgtcttgaaagcctcgaaacgcaccgtttagaatctgagaaagcaaccatggcaacctcggctcgtaatctgagccagctcatcaccaattccctctctctctacctttcctcaaccaagtctaaatctggcgctggcgccggcgccagaaaattgttatcggtaggcgagttccccgcgtgggttcctgccggcgaccggcagcttttggaggctccggtggaggagattaaagcgcacgcggtggtagcgaaggatgggagtgggagccatgggacgatcggggcggcgattgacgagttatcggcttcgatggctgaggggggcagaacggtaattcaaattaaggcgggtacgtatcaggagtatattaagatccccactaagcagaagaatgttctgttagttggagaaggaaagggtaaaaccgtaattgtcggtaataagaactccgatgatgggtccacaacttacaactctgccacagtcggtaactgttcctttcactcgtccgttaactctcgattttcttttaactatttgttctgtttccaaatattcgtttgctatttgaatttttggtccgtaaaaaataagtaaatgtatatttattcgctattttgtgtttttaattaatagataccaaaagtgattaaaaaatgagaaattattaaaaatacggttttcttcccctttttgaaatactaaaacactgattagtatatatctcagttattattataatatacatgttgctatgtttttattttactcagtccttgccattctatatattctattgtttaattacaccaacatttttataaacacatctagttttattttttagaaaacaaagggtataattttttaagcattgctattgtgcaagacatgtcgtcttgtgattgactaacgata

SEQ ID NO: 300790 - DNA, 1962 bp, Cannabis indica
aaaaagttatcaaaaattaagcttagagtcttatttttactattttataaaatacagagtccattttgtcatttaacaaaacacagggtccaatctataacttttgcaaaacacagtgtctaaaatagtatttagcctttaaattattataaaacaggtgtaccataaaattacctatataaaaatatataaagtattgttttaaaagaaattgacaaaaaaagagagaggtattattgattttcactgaatgtcttgtgttatatttatccaaaataaaaagtacaatatgtaatatgtgttcattgatgggacccctatgcacatggtgaatataatggcaacaaacaaatttccacttctatagtcttttcaatccctcaaaaatatcttaatataagtggtgtgtcacctctaactagttaacatttatttttaatagtacatattaaattaaattataataaatatatatttggagtacttaaattcttacacttaaaaaatatttttttttatttttacaaaaatttacataaaaattcatatagcaactaataaaataatttaaattacaaataaaattcacataataacccacacaataactaacagaataacttaaattgcaataaaaatctgcatagcggtccacataaaaattattggagcaacctaaaacagtaaaaaaaaaacttaaaaataatatataaggtaattcccctaaatttaatttgattaataaaattttataaatatgattaaattacaaatataattttttttttaaaaaaaagtagattagtcctattaataaaattttgtatactaaatttgagtcttagttatactacagaatatcaaattagcattattaaaaataagctaattaaaatttttgtaactgtgacacgtattaaatcatgcttttaaatttgtttagaccgttgaaattttttcgtaattattgaaattgttgaattcaagaatttttatctaattctgttcagttttactaatacaacgactatttatgtacgaaatcgtgccccccaaaaattttaatatctaccaaatcgtgatccctaaactttggcaattaacataaaccaaatcgtaccccataaactttcatttacgtcaagtttccgtttataaaattgagcataaattattgattctaacaattacattagtttacaaaaaagttttaataacctgaaaagttaaagagatatgatttgaagcaaaaattccaaatagcttgtaacctaaaaagtacaaaaaactaagtattttgattaaaaactgaatactaaatgagatcctatttaattattaaaataaataattcaatattaaattatacaaataacgatactataaaactggtcaagtggtgtatggagtggtaccatttagtaattcttctccattcggtttctcttattacccaataagggctcaccattatgaccttattttacgttgcttcacaccccaccacattagctactacacattttcaatccataatttagtaccaaattctgttttagtgttttcccatatccaaaataatatcaattctccactcaaaacaaacaaccttagctatgggaaagaaccattcttccattccacaaagagtgctgtgttgtttgtttcgagaattcattctcgagcaacaatacaacttaagagtgttcgcggtacgggtggtacggattgtaatcatttttttaaactaaactgcatatgcaatttttgtaatttctcaagccgcaactacactgcgacatcttaaaactgcaaaaatcacactgcgaaaatacagtgtggtgcggtgcagtttgagcggtttacactatcataattatcaaatattataatgaaaatttaaaaatcaaactataaaggtttagcaatacaaaataattttttttttatgaaaattttgac

SEQ ID NO: 300791 - DNA, 3068 bp, Cannabis indica
aacacttatccaaggtgtaagaatacctatcgctgattgtcatgtcagtctaaatccagtgaactggcaaatcaggaaataaacttttgaacatataatcaagattatattccactgtgcggacaacactataatcattaacattagggcataaaactcaacagtgctcggggcgcttgctgcctcaagtgatcaaaaataaaagtgctctgattctaattttggtgcctcaaatatgtttgtgacaggtcttattcatgtcaaagtataaagtttgaaccattttcactaagatgaatcctaaaactgaaaccctagttgggaagtcaacttgggcactaggtgaaaaccctaggcaccgagttgatttttggggtgtagtcatatattttcagtttccatgccttggacttgattcttttggaattgttgattaagaatactaaaagatggtgaattgaaaacagcttggcgtgattcaaatccattccagagttctcgaagttaacctgtgcatagggctagggacccctctaggttgattgctatgactcgggactattcaactctgggatgttttctttcttgccacatgtcaaacattaatgtccatgtcgccaagatcggtttttggtacacaaatagaatgtgaataaacatgtcagactcaagtaaggaggtaacagaaagaagatcatgcttaaattctagtacatataacacatcagcaagagtaagggtaggtgaaatgataatatttccaaggcatacaattcaagtagaagtaccattaggtaaattcatatatgaaatagacaaatatgtgtaagtattttgaaacagtgatagattattgcatacatgattattggcacatgaatctacgaaagaattttactagagaatttcgacactaatggttgactacattgaacatgattaggtgtttcttgatccctctgtgatagcatggtcattaatttctggcattgagcaagagtagtcgtgagatcttgttcaacattctgaccatcttcaagcttcacactgtcttctagagctcttgagaaatttgcagcaagtggtttagcaggtttggaagcattcttgttttgaaatattccatgcaacctagcagtttgccataatgttacctgtaatcctaaagtgattacagaacatctttgatctatgttgttgcacattccaactaaaatattctgaagatgatgatgctacaggcttatccacctaatcatgaacaaaagtaatgccccttttccttttttcttggttaatggaagcaaaggctttgtcaatattaggaaatagatcttgcatcaagatctctgactttgcatcgctgtaagactcatttaggccaattgggaactcaagaattcaatgttcttcctgatatttctatattatcttcatagaaccacaactataaacaagttgctctaagttcatgaattaaatcccaaaaatatttcaatttaatgagataggttgtgacagaattaggaccttgatttaaagtctgcatacatctcttagcttcaaacaccctataagtatttttttgatgatatcattctagaagttccgcccaaatcttggttgcattgtctaggtacataacactgtcgacaatttcacttgagatagcatgaagtatccatgaaatcacaaaagcgtggcacatttaccaaagatcataatcttcatcttcaccaccggtctcttccatcaacaaatttgatcttgtttcttgcaacaagcgcccccatcatcgaatgccttcaagaactatagtttttacaacaaatcacgattgagaaaaagacttactcttgggtgatctccattggatatgaagtaaggattttgagcataattggtatatgatcgactattaggttcaagagtagagaacctatttggatcatctgaaccatctccttggttctccgtgcctcaagtctaaaccacgggccatgaacacaagcaacgatgaacaactaacaaagaagaagaagaagtactggaaatggagcacactaagattgtgactctgataccatatcacaaaataaaaatagagaacaacgaatgaaattgcactgtattgattaagaaaataattacacaaagtgagctatatgtagctcaagttacaatttagaacaagtaacaaattttcattataaacatatcactccagctcaatagtcaaatgcaagttgactctaagaccatctccaatggaagatgtaaaagttgagctatattttgtataaaaatagttttgtgatattttttgcatcaacttttagtctattgtgctcaaatgcataattctaaatcttaatgcaaaatttaatatgttatttaatgtttacttaataatatattaaaaaatataaattaataaaaataatgcaaagttaaatgtaaactttaatgcaagtcatttaatgtaaaagatttaatgctgaggagaatgttagttaaatttaatattaaaatattaaaaattgtttaatggtaaatataaaagcataatatttatcgtaatacaaattttgcatcatgctatattgtgatacaaatttggatcacttttgagtatgcgaaatttttgcatcataatttagcacactattggagtatacttttaacaaaatgagttacattttgcatttgtatctctattgaagatgctctaactaattatcacttattagaatatttttattatggaaattattttctaattaagaaaatgattttctatttaaggaaataaataaataattgattttctgataaatgaatattttatattcattaaatctagacaaaatcaattatgtaatattctatatatggtcagatttctatattcattacctgatttgatttcctgaattaattgtcaaaatattctgacaattaatgtggcacagatactgatggagtatctcacctataaatatagggtctcggtccccgagctcctcactcattctgaatccattcagcaaattccatctaaagagagt

SEQ ID NO: 300792 - DNA, 1545 bp, Cannabis indica
aactcactgtaagtttcctgggtgttgggagttgtagagtggaggagaaaacttaggtttattgattctttgaattgaaatgagagcttggaaaagctttcatctgtcgaacctcgccaacattgactatttcatcatcaactacggtttccttccatcaccaccacatcatcataatcgtgatggtcttcatttttataacaattttttctgttttcctcatcaagtattataagcagtagtatagttggttcctccttcgccgactgctttgccgctaacttattgaaggcgctgggttgatggtctctggattagatgcggaggtgataaattcgaagaagatgtcggctacgtcctctcctcgtcgactagttgataacggcaacgcctttggtggtgctccgaccatgaacaaagggaaggcccgtttcccgaagatgctgaaaatgaccactcctgggccttgaccttcatcgggtaaggggaaacgggcggtgtgggtacccaaaaactcttgttgcacgccggtgtccttgccttcttattctggtaataaagcttctctggtatcgactcatttgaagaaaggaggtgttgactttccttccactaatttgaataattcaaacttggtggacccacgtgccatgaatggaagtaatattaaaaataataataataatgatctctctttagtggctcacgtggggatggtttttgatgggtcaacttctaaggttgttataccttgtgggccgtctgacttgggcccaagtaatggaccctgtaatattgttactgtaggccaagaatgtaatattcagcatgatgaaaaaggggcttttgccaatttttttcaggcccaagaaacaattttaatggagctgaaacaatttggagaaatagattgttttgaggagccttcggaggctgatgacttgtctgaggagccttcagaggagccctccggtgagagctccagctgcaactttggagtcaaccgagatcatctgattggctcttttgtgattgaagagtcgggatctagcttatctgtccactcatctaaccctgtggaggagaatgtcaaatctcctccacaggcgccatgagaggtgttgcgtggaactgtagagggttggggcagacctctacagttcaggaactgaagtccctgctcagatcgcgctctccggattttgttttcttgtctgagcttaaggtggatgccaatcccctggtacgtattctaaaagcttttcacttttattttcatatttctgtgccgcctattggtaatgcggggggaatcattcttgcttggaagactggtttttgttttgaatgcatcgcttgctctcaaaaccatatttcggggattgtctactcagaccccccaacccacccttggcttctctcgtgtgtgtatggaccgccctacaaccatgccaagaagttattttggactgagatcatgaccttaggggatagatttggaggtccgtggttgatttttggggatactaattttgtccttaatcc

SEQ ID NO: 300793 - DNA, 3992 bp, Cannabis indica
ttagggcataaaaccaaacaggaactacgagagagcatacccaagagttgagttttttaaaaagacttcaaatataaatccaaggctcgttacaaattttaaagcttaataggttggtccaaacaatggaacttgttgaatttgttaaagccaagctttagttagagctcatcgatttgggcctagaaaggtgggatcaacagttatccaccccttaaacgcaatacaatacaattgttccaaggcctttacttgaatttttggtaattcgtcctctttacctctataatcaataacttctcctttcgtttattgtgaatatggaaaattcttggatatcgcatgatgactaatagaggactaaaataaaagaaatgtcatggtttgtgctttaaatgtgactagaacatcctttagggtttatgccttgaaaaggctataaagacatttctatttataaatataagttgaatatttttatatatgattgaatattaaataatttatatataatatcgaaatatttcttattaatacatgaagttaagacttgtattgtacggagaattaagatcacttagccatggataaaattgtctgcaacatattaaaattatagaatttttaatcaacgcttgctagtgtgcttcactgatacctgttattctgtgcaagcaatctcgattcagattgctgatgtagtataatatctaagtgaaggcgttgtatatgatagatattatatatgacatggatcgatatgtaattaagttatttttgcaaatatgtcatttactataaagacttaatttatattataaggatgatcaatgatccgcctaaatcctaagtaatcatgaactcctactcatgttattagtttgttggattcatttgttaaagtttctcaaagaagatgattcttagagcttctattttgggaatctaataatatgaatggatataacatgctctacaattatagatcctaactttcctaacgaattgaatgttggttccctttaagtgttaattctggaactgaaaatttgtgcacaaatttaaattgcatctaaattatacttttactagtgaattaatgtacttaaggataaagatgaaattacaagggtaaaatagtaaattgaccaaaactaattacgaacggagacagaaaatgctaatcactagaattaattatatcaatcgatactgtagtaaaattaagtaaatacaattctataattactaagattggaattaataaacaagattatttagttgatgagatttaacaaatgttatagttattggagcttagaattataagtccatggtcctcggattgccaccttgaaacactgtcaagggtatggataaaagttgtatattgatgtttggaaaaatctatatttatttttcaaaatagtatttatttattttgtaataaatattttattttcaaatttattaataaaaaaattgaaaaaaaaagttttttggacaaaaataccaccactatctagctaggatagaggtggtgccactatcactgtgttatgacacagctataggtgcctatggatagggtttgtccctactagattttcttttagattaattaattaattcaaaagataatatatttgaagattaatttgaaaaatagttagaaatatttctagtttttgagatattatattctctcaacttgttgacagattccctcaatcggttttaagaaagaaatatctataacatattcggtcataaatctttattcaaataatttaatattattattttataacttttgattcatggcttgatattttttcaatttctatctgacaagcataacataatgatactacctgaaaaaaacaataacataaaaatataagaattaacattagaaaggcaaaagaaaatgagagagcatttacttatgaggagaaagaagagtttcgtattaccatgcaaatggatgcaactactatgttgaagcctttgcagtttaaaggtgcatcttcacgtaagaaccatgctgatatttgattaatttcccacaagtcaataaaagaactaaaatccaaatttttgaaagtaaaacattaatattgaaaagagaaaaacaattaaaaaatctcacaagtaagtggactcatagtgagtgtcgatagcaagctcgctatggattgcacaccagcaacaaatccttgcgctttcccctgaaaaagagaaaaagagagtaaatttagagaatggaataagtaaaaaacttgcatctcttctataatgagtgtcagttcatgatttttcatgcactttgggaacaaaactgattgcttgagcttgatgcttttgaaataattgcgtaagtctgcatattgagagtttgacagcaaaattgttgaacaaacatattcatagttcacgaacataaatacaagaaaaaaacaaaaaattacttacagtaggttttacaagatcatagataacttcaaatgaggcacttaagtaaggcacctgaaatatgataattactttaattattcccagaacaattatttatcaatagaaattttttgagcttctcgagaaaatcaaattagtaatttattgtctagccttatgattaacattgccagcacacatgatgttttcatgttgtgtgttaaaaaatttgactcatatcctaaagctatgaaaccgtggaacttctgtcaaatctttcttcacaggagaaataagttgagattcttgataagaaagataaagttattaaccgtacttcgaataatagtaaggtggaaaacaaccatgaggactcagtttccggagtattccagatgagattttgaggacaaaatccttttaacggggggataattataatgatagcatagttaaatcatgggaatgatcagataattaatgattaaattattaatttatgattatgtacttcttagtagaaattaagacttattgtcagaaataggccttaagaatatattttctcaattatggagaaatgttttaatactagatgtaatgtatatgttatatatgaaattttacatttatgttttctgaccagttttggtgaaatgcgacgatttgaccaataagagaaacttagatatagttgagtgttgtagaattagtggggcaagatagttggactttgatgtcttaggattattcggtgttatagtttttgataatgttaccccaaagtgattagattaactctttgtagggaagcgcaaaatggtaatttttccttatgttgttattaattggattttagtactttttctagttaatttttaaaagatgtagcctgataggtattagaaaaaaaatttatttcaagtttatcttttaaaatcaaaataattgaactctctctttcttcccttcctctatttcagtcaaagaacaaccaaaggaaccccatcaaaacttcaaaattaagagttgattctgggtgatttttagctaagctttgaaggaatctttgttataattaagacaaagataagccctaactataagttcttatttaattttaagtgtaaaagtctgacataagcttgatattctaggttttgttttctaattggctttaggatgtttggagtaagttttaggtgtttgaattgagtttgttagagctggtttgattaatttgttagagtattggtgctggttaaatatgtttgagtttagagagctcatacttagctcatcaatggcaaaacttaatccagctccttgatgatgctttttgtggtcaggtttggctctctatgtcttatttaagtgtcttggaaggttttattgaatttggagtagtttagagcagggtttcgacgttgggttttctacagggaaaaacgatgaactgtttgttgggaatattttactagaatatagatttactaacaagtatgttaaattaacatcctaaatatgaatatcgc

SEQ ID NO: 300794 - DNA, 2409 bp, Cannabis indica
gactcaacccaaattttaattcgataaactctttccttttattttgtgtaacaactattttcaataatatatattatatattagcaaaaaaatatatatagtatggatttttctttttaaaatagaaaaatgtataatagatatggacattcggcccatggaccttaaacactttctcactatcactatcaaaagaacaggcctgcatatcttatattattattattattattattatttgtagctaaggatacttgaacaagatatgttttatactttcatcactattgaaattaatcatatttcatgcaactacttaaacatttcataacaatcttcaaatataccaatttatattgaaatatattaggagaggtacgtagtattattgcaaaggaaacaaataaacagtataaagtgataaagccatcaatttcaggctcatcatccacgtcgctcttggtgctgtgttaagagagcatccactacaattttttttttttgggttaggaccgaaatctctttattatctattctaaaatatgcaatttaaagttacaaagttacgagaaaaatgcttcaaaaaatattagataataataaaattttaatgtctgaaattgaaataacatgcatcttagcccataaaccaaccaacaaagtaagaatattagcttaaaaaactaatacctagactaaaagaacattaaacaataattttagtaacttcaattaagaaaaaacgtttaaaataaattaatataatttttataattataactaaccaacatctactacaaattttgaaatataaggccgacataaaactggtgggcaacaaatgcaaagaagagattaactttgactctaagtactatatataatttcatttcaaaactaattactaaaagaaataacatatgttttaatattatatatgatattaagttactaaacaatattaggtgctttaattttctttttaaagctcaagagtagcaatacttttaatgaaactaaaaaaaaaaattgtgtacatatatgtaacataacatcaattaatcccttagaccgatctacatataatatagcctaatccttttaaaactttatataaaatgatcgatatatgaaatacaatatatgttttgtttcttttcttagtttatatttccaaagaaaagaaaactctagttttgttgtgatagttaaagcatctcattattacacgtggctacatttctgatcatcattaccgttttaaattttaaataatttgatatatgattcattatgtatatatccacacaaaaaaccactactcaaaaagaaaggtataaatttatacctaatgagaataatatcttctcattttgtagagaaataactccctacctatccttggccccatcgttactactagaaactaatactttggttctattatctcattttttttaaaaaaatatattatataaattattaaatctagctatcacattcaaaacacaacgagttgccgcatggaaagacatctcatcatacaaaataaaaaaaaaaaaagaaggagaaaaccgaaaacgtttctattgatgatttggacacacactactataacaggttttgttgtgttggataaaaccctagagatatgcttaacacgtgtataacctctcacatttatagtatatccgagttgtagcggcccgtcgccgtttgtttttttgtcgttttcttcttactttgttgtaaataagattaggtttggattggaccgtttcttctttttatctcttaactttgttttttgtaggaagatatgactcggattaattggctctctagtttctgaaaagacccgaaacatatataacaagtgtagaaataggttcgtacttgaccatatatacaacattgccatatgatctatatctggatgtaggttaacttaattggacttaataaataaatagtttaattaataatcaaaatcaccagacacacaaatgaatgattaattataaagatagaaagattttgcaactggggtcatgaacctgcgcagctatggtgactaggttcatgttaagaatgaatgttaacctattcatgggacatatatcttcataaactttgaacattgcccttaaagagggtttggttcacaatcaatatgactgcattcatgacagtaaatatatgacaattaataatttactatcttaattttaatctttatgaaatatatggttacgaaattaagtaccaaatatatatggatcaagttattatatccattgctttttttctcactcactataacgtcactatatgatgattagcatttggactcgtaattaaaagtcaatttatataatgtggataggtatttttagactgattagttaa

SEQ ID NO: 300795 - DNA, 4736 bp, Cannabis indica
tcagcttgaacacccttaataggttgattaaattgcttttcttaccatgctcttgaatttgataaaagtaatcaaaggcctgagatttgtaaatagtaagggaaaaagtacccatgtataacgactataattatcaaaaaaatgaacatagtatttgtaactttctttagacaaaacatgagatggaccccatagatcggtatgtataagttctaatggctatgaggcacgagtgaaagacacagaatatggtaatttgtggcttttaccatgttgacaagcattacaaaagttgagatcttttattgtgcctgagtgaggaacatgagaaagaattctgcttaatattgcaggagcagaatgcccaaacttgttatgcaatatatatttatagtatttggagtagatgatagcaaggctaaaggagaacaagtacagacataagtagaatttgtatttttattattatcacagtgattacaattgtcaactaagtcattattttgtgaaatacaggaggtattacaacaagaatgagaactagacttagtagatgtagcaagaagacactgaagagagtgagaagaacagccagtggaatcatcgccaagttggtacagaccatctttaactcgtcccttgagcaagactatcccagattgcttgtccttaacaaaacagtaatttcggtgaaactcaagaaacagatcattgtctttagtgattttagagacactaacaaggttctttttaatattaggaacttgaagaacaaatttcaaatgcaaaggacaagaagaagagggtaaagaagcagtcccaatatgagtaataagaaggtgcttaccatcgccaacagcaagcgattctgtaccagtatagggtgttgaagtttcgagtttgtcggaactgtttgcaacatgactgttggcaccggtatcagcaaaccatgcgtgatcatcaccatagtcaggcaccaaagtcgtagaataggcttcagggtcagttaaaggctcggcctctgttagaaaagcacgagagccaacagtaccaggctttggtgtgatccaagatttatcgaaacggtagtgacacacagcagcagagtgtccaaatttaaggcatacttgacacaagatccgttgagagatgaagtaccacgaccacgacttggaaatcttgataaagagtcagtggaattacctcgaacaggtggtgcgtgtggcctaaaattcccatttcttgacgagccaaaagccatatttgcttgtagtttgagagaaagatcggccatggtgctgtgatgttccaaccgactttcgtgggacatgagcaaggcttggacctcagcaatttcaagagaatcactgcgagaagtaataccagaaaccaccgagtcataatcgggtccaaggccatttagaagctgtaaaaccaaatcttgatcagtaatagtagaaccagctacagcaagagcatctgcaagtgattgaactttgtccacataattggagatcgatagatttcccttctgaacttgggagaattggcccttgagttgtaacaaccgtcaacgagattgactggaatatttttgttccaaggcgcgccagacactaaacgaagtggtatgattcgcaaccgaatctaggacaccctctgtcatagatgaacggagccaagatagcaacaactgatccttctttttccattgagcaaaggccggatttgcagtacccttgacaagagtagcgggaggaggaataccggtgaacaagatttcatcaagttcatggccaatcaccgtaggaacgacctgtgatttccatgctaggaacttttggcgatctagtttgatggtgaggcaggagacgagggagctggaaaatggattccaagttgaaggagaataattctgagaagcagcaggagcttgaccatttaggcctgcaggatcggagttggaggtgtgtatcgatgactccattggcaaaatctgataccatgtagaaatggaaaccagtagacttaggtaaaaaccagagaaggtaaaaaccagggaaaacttattgtaagaaacagagaaatgcaatggaatcattgactctcttcaagagagtttctattatttatagggatagttcaacaatacaagaaagcaagaatagaaactaactaactcttacagttacaactgaaagtgaactaatcttaactaacaaaaataacagaagacatttattggttaacaggtaaaaattattttgaaaagtggaagtgaagatgagaatggagctgataagaaaatcaccaatatgaagttttcagaatcctcgtactatcagtgtcatagtactctatggctcttctacttgctagtcgttccaagtttgcatagaaaggaatcttaagagcttcacttacctgaaataaaaagaggagaagaaaacaaaaaagcttcctagtatttactttatgattcagtaaaaatcactagtgatctgtaaaagagattcatcttaggaaaagtaccactttgccaatatttttattgagtttatctcccctagttgaaatgctgaataactcttgttctagaaaatgacttgtacagaaattttgcttctccaagattgattcatttgggtgtatgatgatctcggatgctctaaatatttccaagatagcatctatatccttcgtatgatttccaaggtaattgaatatataatcttctgaaaatcgaactaatggatctgtaccaaagcttaaattaattaagcatgaattcccagaaagattaaataaacaaaaagtctactgaattgtaagtacctgaagagacatcatatccattaacacgcaataaacgaaatgccattgcacaggtggaagcatctaagagaacacactcctctccttgcagccaatatctgttcactggctaatgtcatgtctcaaaagtaatataacttatggcctcttagaaagaaataggaaggtgaaaaaaatgaaatgaaataattagaactcatactaatcaagtaaaatcaacaatctatgactattgtttgcacaaacataaggacatttacttgtatgtttcatccagtacacttctgatttcctctttgaaaaatcgttctatccccaacctttggagattgtccaccattgagagacgagcataaatatctagaggatatactgttggaactgagaaaaaaaaaatgaaaaaaccattcagcacaatgttaatcaaaaccaggaaaaccactcaaaaattaagatggaggaacctgcacttccaaacttgtctacaacagagcagagatacttaagacagtcagcattcccatggtttgtaaaagcaacagctgtggtggatggagaattaaacagagaaccatttttcctttggtacttaaagtacttctttcactaatccagtggctttccaagaccttctgaaatgtacactaagtatgcttcatgaccctctgagtagcttcctgaggctctaatggagtaaagaaatttttttaggatagttttaatgacatcataatctatatgtatctaatcagttttacttatttgaaaagcgaaaataatttgtttgccatttattaaaaccatttagcttttttgttatactaactggaccaactaaaacaacaaagatctgggttgactttactttatgtttgcaataaggaacaaatttgaactgaaactgcatcttgtcaatacaattgatgataaaaaaatcaagacaatcacataacagtgactacataaagaaggtgaattaatcatgtcattagttggtttaagaatctgattcttattaggttaaagctttttttgagatgtgattttccttaaaagtgaagctcataacaacattttcgtgtgcaaacttggaacgactagcaaacttagaattaagagcttcactgaccgtaaatgagtgtcaagcaattaaggaggaagatttaagatataacatgttcacaagaccctctggtgtgtgacaattcttagcagagaagaaaatgataaatatgaaactatgcattactcaaatgttgtctatactgtaagaatgtcaaaatattaagcaagcctttcccttaaaaaagtagacaaattcagattactttcaccgctggttattcaaaataatgcttaaatgttatacaattctcatcagtttgtcagtcatggactttatgatctcccctattttaaaagctgttatttcataaagtttcactttcagttgttgaataagagtaagataaagaagaaaatatagaaccattgaaatgaaaaaaaaataataataataaagaacctttcaagtgaaacctttctgttatgaactaggtcattatgattggatggctcaagagtaatattcagatctgattttttggcataatcaatcattgtaggaaatattacttcaaatccaataggtgaacattgcttctcatcaatggctgaagctatattttcctctatgaaagacaagcctgaaacaagagaagggcatttttcattcaattttttttagcagtaagaagatgaagaagaaagaatgtatttcattgattggaaaagtggtacaagagaggatatatatacagacacaaaacagagaaaacagagtcggttagagtcggttaggacccctaactaactcagacaaaaataacagctctctaact

SEQ ID NO: 300796 - DNA, 3258 bp, Cannabis indica
gtgatcaaactagccatccatcgcattttccgttgtggccgagcaaaaattacaaaaattgcatatttcacatataagataaatattactcctagagtttaataaaatctcttgaattgagaaattataactctaatactcatttctaataatggggtccacaaataattaatttcataaataattataaaaatgtcagaaattagtgctaattgtctttactaatccaaattacttaagcggccattacgcaaagtattctatgtaactcatgcactaatgaaggatgaaaaaatatatctctagggaacaaatactatcgtgttgcatactgtcaggttggactgtcctaagttagatggtaaaagtaagattatggtatgtaaatacttttgagataaattggtcataaagactagtctagggaggacaatgtcataatatagaaaggagtgtaacatgtaaaatacagtcaaagaataaaaagagatctttcaaaatagctcgaaatagagcattatgaagaaatgtccgacataaagaaataagcaaagtttccaaaaattgtagattgccgatgaaggtggtaaacttcaaactcaaagtcatatactttaaggaagaaataatggaataaaatgagtattgttcaacaaaaaaattataaagaaggcagacaaatgacgattaggcacacctaaagatttggataaaatatggatgagagacaatgaagagaacaaatacttagagcgagtcacaacttaacaactaagacactataaatacaacttcgcagtggttgatacaacaattaagtatagagaggagatcgcaaattcaaaactagaagaaaatgagaaattaacattcacagtgacatctctagattatgaataacatcaacacaacaaaaaaggcataaagcataactcaagtagatatattaggaattctcactaatattagagataggagacaagtgaaataaaactaggaccaaagtgatgtatcttgtaacgccctgtctcacaggaacgccacgtgtgtgtgcttttacgaataaattttataattaatctaatcaggttaagaaaagtgtggtttagttaaaaattttagattaaactaaaacataaattttcattcaaaatactaatggatttgggatcacctatttgcaaacttttacatttttgtctcaaaatcggtattacgaaaataggattacaatttaatacataattaatggaaggatcctgtccactggaagtcaaaactccgcggttgatatgtacatcgctgggagacctctgactcatggttgaacacagattctttccatcttacctgcaccacaaagcacctgtgagtcacaaagactcatcaagaaaagtaagtaaacacaaatacatatattacacataataaagaaatcatagcaactcataataacaactatatcaatttaaacaaaaaaccatggttgagtagaagtttagcttactaaccctcattttacaaatttaagtcaaccaactcctatttctaattaattaatgcttaaaaaaactttaattctaacctaaaaacatgttctaacttcaatttataccctagcccgaagtcagacaaacctaccctataacctaatttaaatcttgaaaaatccttaaacaaacatggagaaagcttacctcaaagtttggacagcctctaacccttgctaaaccaacagaaagtgaacgaatttgattaagaaatcttcttgtgctgctagatcttaggattcgaaggaagagaagaagaaagaaaggtgatgttgtgcaattcttaagtttttagattttctatacttaagtatataatctaattcttatactaatcccttttagcttaacataatgccaaaaaggacaaaattcaattcatagtcttgactcggacccttccaacctagagcatttactaccgcatttactttaccagaatggtaaaggaactcttagtaatattctttatccagttccaaccatcgtcactgccaattccatattatgtgtaagataccattgttcataatccttcaattgcctaaaaaaactattttcccagtttccagtccaaataaacttacaattctttcgagttaattctattaaggatgtagagatcttggcaaatccttaaacaaacttcctgtagtatcctgctaatcctaggaaacttctaacctcggttgcagacctgggttaaggccaattctggactacttttttctttactaaatctactaagatcctatctttcttcaccccatgccctatgaaaccagtcacaactcgtgtttcttgcatttagcataaatttatgctccaagagatattgaaacaccatccatagatgtctctcatatgcctcttctgaatcagaaaagattcaaatatcatcaatggagacaattacaacctcatctaaaaatttcttaaatactcagttcattaacccatgaatgtcgttggggcaatttgtcaatttgaagaacattacaagaaactagtgtccatatcggtacgaaaacctatcttgggaatatcctctctcgaatcctcatttggtaataacaagatcaaagatcgatcttagagaagatggtatttccctgtaattgatcaaacatatcatctatccttggcaaaggatacttgttctttactgtcaaaattggtgcaccccaaggtgaggtactcgatctagtaaatttcaagtttacattccctgtaaccgaatcttcactttttcagctctgcaggtgccatctgatacggagctttaaacacaaactctgcccctggaatcaaatctaactcaaagccaatctcccattttggtggtaaccctggtagcttctctggaaagactcacagaaattctcaaaccaccggaacgtgttccgatcacattagtatttcttttgtaatatccataacactagataagaaactgacacctccatcccataacaaatctcttgccttaagcaccgagattaatagaatttgagatccttgaaccttgcccacgcactcgaatgggtcctcaccctcccatctttccactactacaaatatggtatttttcgtcggtttacaactgacatatattcttttagcgttggttgttaaaactgacgtatatactgtagacgcaaaaactacattattttgcgtgagtattcaacagtcggtaccaaaaatt

SEQ ID NO: 300797 - DNA, 1528 bp, Cannabis indica
cctatgtgtttattttattatatttttttggtgaaagagaggtgcaaagcacccattcattaaacaagaaacaatcagatacaaaaagaccaaccagtagcaaagggcagctctgatcaagagactccccaaacacaagacttcaaactaagagacccaaaactaagaacaaccatcattaaaccagtacatgcagaaagattaaaaaacataaaaggaacccgcaggaacttccaagcaccagcaacattctaaggggaaaatccaacatcgtgaagcttgagaagatctgccaaagaaaaaaaaactatccagcatcaggatgccattccttacagtcattgaacaccaacgaatccataatcttcacatcaatatctccaacagctgcattgagtttagcccatttggccacattgtgtgccatgaagttctccttcctattgatatgtttgagatgccaacgccgcagctgtgcagataggcttcgaaactgagcagaagtgccctcaagatcaatgcatcgctggactccttgagtttccaaaatgttggaaatagcgcatacattgtccgagaagaaattaacacaagagagttccaagcgcacagcatgctggactgcacataccagtatcaaagactcagccagtgctgaattggttgctgaaaaacgatctgcaacaacgctccatatccgattttttgagtccctgaaaactgctgcaccaacagagtgatcaattccgatagagacatcagtacaacaagtcatccacccctccgaaggtgtaaggctaatagcttgctttagggggcgatctaatttgcaaaccaggtgatcatttagccgcctagacgcctgttgaataaccaccataatctgtcccagctgtccattatgaataagttcatttcgcatcttccaaatcacctcaaagatgcataaggcccctgtcatgaactcaatgaaactgagattgggaggtctattcctcatacatccaaaccaatccatccattcttcccaattctgagaaggacataaatttgttctaatgccccaaaggctaccaaaccaagcagctgaagcataatcgcagttccaaaacaaatggaaggatgattccctctccttgttacaaattgggcagagtgttgattgaagattcagagccattgcaattctttctcgtgtaggaagagcattagtaatgatttgccaccacagaaatttcagtctcgcatgaatagaattattccaaataattttccaaattccactaggagtggccccatatctgcgcctagtgattatgtgatatgcagatttaatggaaaataaaccatttggctcacctaaccatctccacgagtccccttgatgtgcatttggaagaccaatgttgagaatatgtctcgcatcatcatggtggaaccattgtctgacccttctttcgttccaaatgcacatcaaggggagccatagatgcatataggttgttgctaaataaaatatcacaccatg

SEQ ID NO: 300798 - DNA, 7258 bp, Cannabis indica
attagaaaatatttgttattacgtactattaccattatcattcattacactgaatcaaacgccacttaaatctttggcctatttgttgagggcatagacgattacacccgaagaaggtggtcgcacacaccctcaactaggtcacaagaagcattatgtgcatgctcatagtgaaaaagaaaaaagtaactttgtaactagttacttgttgaatgttgttacttattgtgaaaatggcattcatctctaataacacatgtgcctctagaaatgcctcatgtaagaggttttcaaaaaacacaagcaacaacaacactttttctatagaaaggaaaaaaaaaatctcaagtcgaatctttctttaaaaatagatttgtaaattttatgggacatcatatgatgcctaacactaattgatataccattttgtgtgatttcatttttataatatgtcctactcacatatttagatggtattgttagtgactcatctaaatatcaccacaattgttttagtgaatatttagatgagtcaattgttgtactgaattttagatgagtcacaccataatagaaatttatattaatttttctaaaatataattatgatgcacatagaaatttctttatatattactctttcaccaattaatggtatcagaaaatatgattaatttccttggaatcatcaagaatctatagtgtatttcactagggtttgaaatttcattatatgccttacaaaaaaaaaaataataaagtttgtcatcatcaaatatcaatataagtatctatcaataacccaactgtatttttctatttttagtgtcaataagagaggaataagaataatattagtccaaaggtaaaagtattaaagtataaactacatgtcaattagtagattctttccttttttttaattggtagaacaatgagtagattcttcatttcaaactttatagaatacttatttttaattatggatatcatagtgtaccaacatgatccttctctcctctcttagaatcggccttaaaatcgagccataagaaaaaatataatatttttcaaaatcaataaaaaaaatatgcatttttaaaggattttttttaaacccctagtctagatgggtcataagcacaggcctaactcgcctacctacatgcaatcgatgactctttgttagtcgagggcttggtcgagtgattgtcgaatccttcagtctggacttaaagatagaaaaatcccgaattgtaaatcacaagaaaagaatgacagattaggctgcgaaaattaactaattttattttatttagtgttggggaggtaccacctcttgttgctaccaatttctttttgtttgatttatgaagttgcttctttatataaataaatatttattctgtttgttctttctaatattaaagttttattatctaataatgttcttaaatttgtctttctcctcatttgcaacaaccaaaaaaaatacaatataaaattatttgttgagaaaattacaatataaaactagatatattgatgtaatggatgattagcatattgtatgaattaaataatggatgtaccaaatcctaaagaatgatgtaaaaagagtaaaaaaaaacaacaccaaaaattgtgaaaatcaaaatcaaaatttgggacagccaagtcaaaaccttactatttgtaatcatatgatttaagtttatgagaagcttcaacctgactcagcctcatgattcatcgattaaagaatgcaactggcgtcgaaataccgggatcttgtttgcttcaacagccataaccaaccccattagcttatagttcttgtcctgcaaagaaacatactctatcaatattgttttccaataattataacaaggcaattacataatttgcataagaaagttgtaagtatatgtttcaatatatttgtaatggagaacaaaagaagacaattttgatggcaccctttgaatttggaatcctataacaaggcctttatatccagaatcttatactacatgggcattggagaatctatatcttttaaccacatttcgtttatttttcgcattgttatccgaacaggaaatgaaaatgaaagcaatagcaagaataagctattgaaaacttgcctcaaaagttaaaagctgctcagtgttcaaaggatatgtaatggaccacaagctgacctgaaatagatataaaatacaatatcagtatattataagatgatgaaacataatctatataaatatcgaaaataattcgaaaccttgtgaaatatttcatcttcgggcttgcgatataatatttcctcttcattgttctgcttcttttttcggtttgttccctttagctgtagcatttgcaattaaatatcatatgaaaactaaaagcaaatttgcagcatgatgaattgggtttgagataaaatacctttccaatttgacagattattagatagtatttaaagccgaaggactttcgaagctctgctgttggcttcagacaataataaccatgagaatatgtcaggtaaaggaagttgctcaaataaaagttgagaaaatacatactaacattaaggatttaattcccatctaacctcatcttctgtagcccaggaaatttcatcaaaaagaccatcgtacagatgtggcaagagcttgtcggggagacatgtattgtgtttagacaccaaaagacctacattatgtgcttcttcattcaaaagcaatctcaaattactgctggagtccttctcgtggcatactttaaggagatactccttgagctctacaatacatttatgttcctagtacaaacgaaatcgtagcttttacaagtgagaagactcctatggcataagctaaccaacacgatactaaagagcgcagaggaccgaaaacaaagttggtataacagaagtattcacaaaggtaattaatgtaaactaacgagatacatctgcatcgctgagaaactaagggaatgaatatgaaggaaaagacagcattgtctgataattttaacatatttttaaacttctaccatcagaaacagatgcccttttatcgaaaattaaaacagttctttgagctaataaagtgcttcctgtcctacttatgacttggtaaatatttatgcatgcatagcataacttgcatttgctaatcaatctacagaagcttactgagtatttaatgtgattacttggctatactaaaaattagcaaaatattcagtgctaaaagtttaggaaagggctttttgaaagtacttactcaccttgtatctatacaagttaagagcagatacaatagaccagatagtattttcttcatcatcctctattttaatgacagtccccacagtaggctgtcctaggatcaagtccacaaaaccactcaaatcccagtgtttatcatcaagataaatctttagtaaggccttcactccgtggaaatcatcaggttttggatcgaagaagacaaaatctgcttgaataactcccttcaaaacaagaccagtataagcaagcatggctcaaaagggaaagagcaattacaagattatagtgcaataatagataatacacagccagaatattttcttacatcaaagtcttcatcgtcagaagcctcaatctgatcactcttagatgtcatattgttactcgtcgatttcttacctgaagaaaagataaaagtattagtgagttcttcccaaaatttccataaagataacagagacaactatagttatctgcagtgccattgtttaggcagtgatacctacagaattgggaaaaaaatccttactcttgactttgggttcttgcctctgacggttgactgtggaagtagaggcaatttgagcagttgaacgagcaaatgaggaaaaggtcaaaggctgatgattccccaatcgggagcgccttaatggcttccggggcatgttactaatctatagcaatgaacaagcaaagtttgatgttaagtcaatacgatttatccttgatcaatcaatgtcataagaaggactcacacacagtcaaatgctgcttaaaaagctaaaaagaagtatgatagcatcaatacatccaatgagctctaaaattatctacagcagaaatggtgaagcagctgtaacttaatcacataaataaatctcaaatccccataaatgtacattttatcaagccaaaagatcaaatcttcagtttcctccacacattctcatcaattaaacacactgtcaaattattcaaagtgtttcttagtcagctctagttagaatattttaatcctgggaaataagaggttgttattctattctgatgaagatatgcttatttatacatatacttggtaagttaaaacatacaattaaagaataaatatattaaaaaacaatctttcagcaatgtattatctttcttcctggtttgaataccccagagcaaatattatcagcctcaactaaagcttagcaaccaactgcatttggttccaaaaggactattattgaagacaacatggagaaacattactaaataatcaaatttatgtaacatttgtttatgtgaacatcaactctaattctgatgaatcagacgctcagatgaaaagggcaaaagaaaaagaacgctcagatgtatttttgtaaataaagaacaatttactagagtagacaatatcatttatcatcaagaggaggaagccttttctccatgcaataatgtatgagcaacttcaacaaagattagcctcccatcaacaatcctgccattcatagccttcaaagccttttgagcttcaatctcagattcaaaagtgacaaatccaaaacctttaggcctttgagttattgaatccataactaatctagcttctgtgattgacccaaaaggagagaataacttcttgaagcgttcatttgtggtgaacgatgataatctgctaacaaaaagctgagttaagctcttcgacatctttgattccacaagtttttggtgcttagacaatgacagttttgggaggagtcggttgcagcaagaacaatcaaagagagatcctctattgtctactggcccaggctagaatcattgttaagagtagaagtctgatatcttgagcccatcttaatcttaccaatagagcgagaagcgagcttctggttggaaagctgataaagaacccgaaaaaaaaaaggataaaacaaaagctatttcaaagatgaattgaacccatgtagaaagacctaagaaaaaaagagaccctgaaaattatattgctcaaaagataaaattttcaaaccaggttaaatctatttcacaaaaactattgtaaccatttttagagcttagctcatcctactaaaagaaaaaggtctttcttgttggtgaaatgcacacagagttgaatagccttataatattggaattctttaaccgagaaaacaaaagaaaccctatgaaaatgagattagaaacaaacaattcaattacatccaattcatatgcatactaaagtactaagtacacatccagttttgtgtcatcaataatatctaagtgaaaattatagctaacatttcacttccattacaattttggcagagttcacccagagcttgttttactataagattgtatttgattgtatatgttttttaatagaacaatatgtccaatatacaaggaaggctttttatagatgtgtaaaagtcttgtctctgctaaataagctgaaaagttactaacagaactagagatggagacattaattaagtaaatttatgattcagccaaagtcgtcaaaatctgagcctaagaacatcatcaagaaaactcattttgtgtaaacatgacatgtgacgaaaatagaatgaagacttaactaaaagataatgcaagacatccaaaaagaaaaggataaaagtaaaacaatctttcagtagtgtattatctttcttctggtttgaatgcttttacacactttcaattcaagaatagtttccgacctctagccatcaaataccccagagcaatattattagcctcaactgaagcttagtaaccaactgcatttggttccaaaaggactgctattgaagacaacatggagaaacactactaaataatcaaatttatgcaacaattaagtttatgtgaacatcaactctaattctgatgaatcagatgctcagatgaaaaaggcaaaagaaaaaaggacagggaagggtgacttaacataacaaatcattaaagcagttgaacatatagtaacccttcactttttgaaatgcctcaaaactaagtaagaatagaaactcagcaaacaagtctttccagcaaattttgtgtaaacatgacgtgacgaaaatgcaagacatccaaaaagaaagaataaaaaaaaaagctatttcaaagatgaattgaacccatgtaactaatttaataattgcagagcgagggagagaaagatgccgaaaattatacagctcaaatgataaaattttcaaaaactagtgtaaccattttcagagcttagctcagcctacaaaaagaaaaaggtatttctcattgctgaaatgcatacagagctgaacaggcttataatttacaaattccttaccctaagaaacaaaagaaacccatgaaaatgagattagaaaaaacaattcaataacacccaattggtatacatactagagtcaaaatccaagtttgtagaatcaacaataactaaatgaaaattatagtaaaaaatttcacttccattataagtgtgacagagttcaaaacccagagcttgttattattatcattgtatttttcataaaatggcattttgtatgctttttactaaaataactaaaacaaggaaagctttttctagattttctagatgtctaagaaagtattattcctgctaaattatgcatgactcgtaattatatgcatgtaatatccatatccaaatatgaattttaaaatttgttttgttacctttctgagttttaaatatattttacacagctacaagaaatctgatttgacagaaaaatatagtgacaataccaataccaaaattgatctttgatcatataaacaaaaataaaaatagaagacatgtttaaccatttattaatttttacattgcggaggatattgtttttaagtattttttttaaagataaatagttggattcatttgttagtaaaattcattaattaggt

SEQ ID NO: 300799 - DNA, 1284 bp, Cannabis indica
gaaaaaaataggaacaagagaacacgtaggcagtctataatttgtaaattatatatatatatatatagatattattattattattaaaatatgtttaaagagaatggtggtggtgggtagattttggtcatttttgtggtttacaacaaaaagaggttctctcatattaatgttgtgtaaaaatatttagtcgatctatatataatttagctatatagctagcatgttcttgtgtggtcatgttttaaagctcccattcttcttcttctgatctctcttcttttttttatttaaatatttttctattacaaataccatatatattatagatatgcattagtcgtttcattaattatataagctccactttagtaatatatgcggaagttataatctgattaattagccacttaaaaaacataatattggcagtctgatcaaaagcacttaaactaatgaggatttgatatggtggccaaacatttccatgcttcatattatagtgctctcaagggtttgccttcctctaattagcttatatatataaattaagatcatgttggcgatgattaatagaacactagttacttcagaagcggataaaaatacaaaaatacccctgcctagagaccgtttaatccactttttccagggacaacgttgtcagtgcatatatacctatatacgtattttaattttaatttattatatatataatattaaaaattgacatgccacaatgattagccaaattaactatacttaagcaaatattatttatttagtttgtccatgacgtatgtatgattcacccgtcttaatttgcacttaaaaataaagaaatgttaagggatatttaagtagtaataaaagatgatatattattattagtacaagttaatattaaatttatatttatatattttaatttaataaataacataaaaactaacttcgccacatttgtatttttagacaccttaatatatcaaatatatatctaatatattcaacgaccaatgacatttcagtttccctcaccaactgttatttttctctatccaaaataatctaattctaaaaataaataagtcatgataaaatgctatatggcaactgttctaatttaatatctaatcttactttttttttaatattaattatttatagaatgctacattgctattaataattagtgtgcttgttgttagttataacatgttcactatatcaccgtaaagtgctttattatgagtggttaatttttttttataataattatta

SEQ ID NO: 300800 - DNA, 2705 bp, Cannabis indica
aaatattttcacttttctacttttaaaaacagaaaactgattaaaaaagtgttaccaaacgccacctaagcttttgggatatgactttgaatttaagttcaatcgaggtttgaagaaaggcaatggaagcacttttgcgggtttagtattactcatctttggctaccatttttgtgccaaatgttgtctctattctggacatacaagaccaagcaaaagttgaacctttgttgtctaagattcttatgaaactcaataaaggtaatgatgggggcagttaaactcttgtatagggggtgctacgtttctgtgggagattttgcagtccaatctaccttaccttgcattcaactcttattgcaaaaatatatcagcgcagcttcgtgggaggtcattagggagttgttcaaaacaatttagcgagtggcagctaatctttatttgcctagtatgagaaaagatattcaaaagttcgtgacacagtgcgctatttgccaataaaataagtatttcgcttagccttttgcaggcttattacaactgttaccaattcttgagaaagtttgggaagatatttcaatggacttaatcaaggggcttcccatgtcttgtggttttgattttattttggtggtggtggattgcctgactaaatatggtcatttataccccctacgccacccttgtacggcaacaactgttgctgaagtgtttgagtgggaaaaggtcaaactccatggcttcccatgttcaagtgtgttagaccgtgatatgaatttccttagcctttttcgtaaagagctatttgtttaaaaggcaccaacttgaaggacgttgtcgcctatcacacacaattagatggtcaaactaaagttgttaatcgtttcttggagacttacttatgttgttttgttggttataagcctaacaaatgggttaagaggctcgtgtgggtagagtactggtacaacactcttaccgtgtttcaatgggcatgacacctttccaaattcaaactagccaaaactaaagtctttgaagttgagcaacaactttaagctcgagatgtcattctaatgttgctgaaagaaagtctcaactgcactcaatagaaaatgaagtctcaagtctataagaaatgacgagagttgccatttgaggttggggattcggtctatgtcaaacttaggccatatcgccaaattcatagtagccaagccccacaacgagaagttgtctccacttttttgggctctttcaagtcttggctcgcattggtatatcggcttaccatttccatctgcctccaaaagcctctatccacaccattttccatctcttactgttgcgagctacattggggccacaccaacaaccatctgagctaccttttaatcccactactgaattagaatggctactagaactagcagaggtgttggtccaacctagcacacataaatcatctctaaggagctcaataaataggtggtgttaccaccatcttaggatactagggaggactttgcagtcattaaattcccacactttcaccttaacgacaaggtgagactcgtacggggggtattgatagaccaaccatcacatatgtgtacacccacaagactaggaaggggacactggtcaatatcacggaggattaattggggagcttgcagttaagtggttatggggttttgttagggtgtgggtcttttgagcacactctgtaattgggagtaaagggagtgaggcaattttatttttgtgttggaagatgttgagcttattgtaaccgtttgggagagaaccatcctctcaaaatcctaggcaaactaatacaaatgctttttccattcttacaacctctgttgtcttattcttccacatttcttcttctattaatacaatttgaacaggtagttcctatcagtatcgttacaaaatgtgaatttatttaacttagttaaattagtttaaaattattttacttacatttacattaaatccattttagattaatctaaaattctagataaatatttataaattttgttattaggctattgtttatgaatatattattatacaaacattatcatccactactataaaaatgactttttactataatttttaagtgacagataaattatttgcttaggagggtgtaactgacgatatagtcatagacgtcaatactaatttttttcttaggttatgaaccgaagcaaaaaaagttttctttctcggttcataatcgaaacaaaagaccagtatagtgacactatctattttttattcggttatgaaatgaagcaaaaacattttaaaaaacataaaaaaaaaaagttgaaaccaaacaattctaactaataataaatataatatcagatcaatcctttaaaaaaaataatataatattagataaacaatatgagcatttgtttaaataccaaaaatataaattcaaatctaaaatttcaaataaaaatctcaaataataaaaatatatctcaaattacacattattattttaaacaaaaataccatcgcaccaccaccaccgcaccatcgtataaccaccaccatacaaccataagcctgaaaaagaaaaggcaacattagattaattataataaaataagaaatcgaaaaatgaaaattaagagagtgattaaaagatagaaatatatatatatata

SEQ ID NO: 300801 - DNA, 3776 bp, Cannabis indica
gcatcccacttctcctcttcgactgccagcctggccttccaatcttcttggatcttttggctgctagagaccgcctgggtttcgacctactcaattttagcgcgtaaggcctcattttcaatggccaaggattgaactttaggcagagctggtttagttctatggtcatattccccgcttctttggctatcctctttgcgaataattccatctagagaaaggaaggtcgaaagaaattactaggcatatttcggtaataaaaattgtatcgcaagtgagaatagatcagaaggttgagacttaccccagtggcctgctatttggcggctagtgataaagtgtatagatcaacactgcttctcactacccacttcttcgatgtaagctcactcacactaaggcttatgatgtctaacatctctgcagcaaaggggcaataaccctgcccatcttaggtattagattttgactcgctgcagttagatccagcacggggccaggagaaaaaggctgggagattccctcagcaatcttggctgttttgatggaagatagccaagtaacccacttctgaagatttacctactcccgctcatggcccttcttcaaaatggaggccttcgtgaggtactcgtggccagcaggtggcctcatgggaaaggagaatcccaatgaaggagccttaccccttacaacaggctgaggtggatcagtagaatttggcctagggatggtgcgcacgagaacttgttaagaagtaggagactgagatgggtgtaaggaggactgagatgccacaatctgtaattaacaaggagatagagattgttgttgttgcggtagaggtacctgtccagattgtgattgtggcagtttttgttgcagttgttattgcagttactgttgttgttgttgttgttgttaatgtagttattagtgttgatgttgatgttatggcaatggtgagttagtcgatggtatctcagttgcccctgggtccgggaccaaagacttgaccctctttgcactgagattagaagaagtatttgatcccttgcgcttagacttagctagagcccctttgggggaaagacaagtccatctaagctgtcatcagaaccctccacgttaggtgtggcgtccaagattatcactcctatcggggcaatgatttgagaggactgctctcccggagcagcgagaacctcgaatgctttttgggaggtgctaggtcccttctgcccgctagccaaagtaggatggcctggtgcagaaagtccagtcttgatgggaggagaaatctctcggatgtctgatgatgaagaagtcaagggaggaggccattttcgagtccttgaagccttcgtcttagtcttcttcttgcctttttcttgggatttcctggccttatccatggcaactctgatctggttattccaagactttaatatcacagattctggagtatctgcacacaagacgacactacgagtaaataagaggagcaattacaagtcgtgcaatcataagcaaaaataacaatgacaagaaggggaatctagtgaagaaacttgtgcgtgggtgcaaccgttcagtgaagtgttataaggttgtccccgagcaaaagctaaaatgctcctatgaccaatgaagctatcatattctctaaactcaggcagagacatatctatcaaagggtccactctgataatgtccaaaggagccctcaggtttctaaggctcctaactatttggtctcctctgtctatataatccttcatggggtatctatggcaatttatgcttaggaaatatttgtcaaatcctccttaagtcctccgagacatgcgattcaggttgcggttacggaggatgcagaagggtccattacctcttccagaagtactagcacctggtgtccccccatcagagtaagcgacgacaaatctctataagatctcttcttcctcaggcataggatcgagatggtgcgacacccaattagagctcagggcactgtcatttttggctgcgtttgtgattataacggccaaattggtagcaatcgcctccttcacttccttgggaggttggcactgccctcaaaggctaactgtgtcaatactctgaaattttgtgatcaagccggacctatggagaagttcaattgtcaccaggtccccaaccttcaattgatcttctgagaaggccctatattgggcttctttcttgattatctcctccgtcctaacaccctaagagggaagcactatagcaagttaaacaatgttagtccaagcatagaagttggaaaagtttaaaaactaacaaaacttaacgtaaattgttagaaaatctaggagtgggaagcttaactaaagagatggcaccctgctggtaggaaacctagaggaaaaaaaccaatattcccagaggtcaggggtgcgatctgtttggcaaacagggcagtaggagtctaggcatttatctaattggaggaaccccaccttggacctatctatcctcatatgattggccttgacactaatagaagtaaaggatctcctctagggaaggaacttctagtgtgttgattttgcaaaacatgtaccacacagccaagagcctatatgatgaaggaatcaactggaagggtgcaatcctaatttttgcaatcaagttcgcgaagtagtttcttaagggaaggtgagcaccactggaagcatgggaccaactccatgcagtgaacccatcaacaccaatggatgtagattctccaaggatggaaagcctgtgccacatcagcccatggacattaggagaggccagaaacctctcagtacccttgcaacataccataagattgaaagcaattggctttctagtctatttcccacacagactcaggacggacctgcaccggtgaaggaattttagccccttcacctcttctgctatccacagagagatctctctcatcaatgggtttgttttctggaatggtttctaaggcctccacagactaagacatcgccatgaaggcctcagttaggtcttgtcccgcaaaaaacctttccacaattggaataagttcgccctcgacacacatggatgtgtttgtgagggggtcttcgttcaaatccatgaaagaaaggaaaattctttgaaatgacgaatgggtgtgaagacgggctctgtctttcacacacactatctactatacggcccaagaacagttctatccctaacctaagcaaaaccttcttacccaaaacatgaaatgccaagaaattcagacaggggattagtgcacttacttttcgaatcataagcgataagtggtgtgcccagaaagcctacttgaaaactctgaagcgagttgattcaacggtcacagttaacctaaaaatcaaatgtctcctctaaggaagaacttcatcggtccagtcagaggggagaaatgcctgggaaaaattccattcagatgacgagtgatcgttgaatctaaccttctaacgcttcttgcatgcaagggatggcagaaaagggaaaaagaagtcgcagggaaaatatgaagttttgaataaaagaagtaaaaatagcaccaccaaaggtgatttatattttaaaaagaagataggactatgagagatcaacaactcaaaatgtgtgtagtaaatccaacgactagggaaatgagaggtctcgtgcattggcccatgtgttggaatttattttaccaggatcttagatctactcacaagtatgttatttaa

SEQ ID NO: 300802 - DNA, 2120 bp, Cannabis indica
atttctaatttgagtacaccaatttcataaccatcgtgtcagtttctttagttttttttttttttttttttttttttttttttttttgtgaaaatatgttgtcgtactaaatattgtccgtcctcttttagaaatttttgtacttttggacctagttagtgtattgataatttaatctcaactgcccttctaatcgagggcgtttcaagactagttaatgctgccataaaagcatgtattatatttatacgttatctgttagtcatatggtgagataataattaatatatatatacatttcccatgagtcaccaaaccacgtaatgttaagtatataaatgatttttttaagtgcttgaaaaaactgtgttaattattcactcatttttcccttctatattttatgtaaagttactgatgagtagcattttcatatcttgtaagttgtatcaatgtttgattcgatactctcggccaattgtggtagagtcaacgaataatgtgtgagaagaattgtggtaataatgaatcaagttgggcctaaggagtaggtggaagagatatcaaaaccatttatgtttcacatgctatgtctcttaatataagaaagaaaggtgatctactttcactggtttcacatgctttgctatggaccatgcatggttgttgggttaagttttcatggtttggacctccttaaatacatgcttttcatcaattaagttatgagtatggaccacgtcacctttattccacgctattgattttgaaataatatatatatctctgcaaattatgcaacataaataatcataaaactaaaccatctctcttaaattgttccatagatttaacaaaaggagtcatttttttttgagcactttggattcgacaacttgaattataattaacaaaagatgtgagtctagagcgatgccctaactgaccaaatctcataaggtattatgggtgtttcattctaatggtttttggcagaatatatgtggaaaaaaaaagttagcatgtagtgctttagtatatatagttacagaattaatcaattacacgagttttggggagaattttgtaaatactccaacgaattttattcaaagtgaatatttggttttttattttttatttgaaaataaacttcagaattttattaaaccaaatcagccatcaaaacagaggctaattccggtgtagtattagccccatcacaatcaactatataacaaatggctctagcaacaacataagcgacacaatttgtagatcgttttacaaaaaattaaatatttggtttaattctatgataaacattatttaattcaaagtgaattttatatattgtcaaatattcaaacatgatggcatagattttgatgggaaataatattcattcttttagaaacaccatctcctttcagagaaaaaagaaagaaaaaaaaagaaagaaacaccatctactcatataaattgttttggaaataccagattttggaaatttatatacctgatcaatatgtggagatttgcatgcattatatatgtgaagtttctcgttgctgtatatattccatattagaatttatattatgcattagatttattaatctaataattgatttcagaaccatgtttcgattgttgacctgcggtgggttaaatgctagttggtttaaaaaagaaattgttagcaataataattatgagtcttgggttcataataatgcagatatgggttattgtattttgtactttacgatgttcgttgttatgctctaaaagtaaatactaataatatttttatcaatcattgatttttgtatatgtatcaatatattatatatatttttaatttcttgtttctagttgaattttaattatggatcattgtttgtgtaaattgatcatttgtttgtttcaatatcctaggacccacttcttgcaagttgcacctggacaatcaataagaggtatattatttcgcaagatactttttaggctaattattaatttttcttctcgaagaattttgacatgtattaaatcatgttttctcaatttttttttgccgttaaaaattcttcatgaactattaaaattgctagatt

SEQ ID NO: 300803 - DNA, 3149 bp, Cannabis indica
ttttttttttcagaaccctaatttcgaatttcgaattttgaatcacaatgctctgataccatgtagaaaatagtgattcgaattgtatattgatttcatagaataatacatatttatatacaaagttaggagacataaaagggaaactaccaaaaaataggaaactactaaatatctattaaacaactaattcttttacagctaatatctaacagttggaaatgagtatagaagggtgaccaagatgtttgtgctaccgatcaatatcatttgatataattattgaatttcaaatataagcaaattgtgagggggacacatttgaagttgaagcttgttcaagaatgtagagcttctcaatttactaagtcattccaaccgaaatcgttttgggtgcttaaatgaaacataaagaattagtaattatattattttagtcttgtaagtaagaatgaataggaaaaagattacatttaagaaagggaacaagcaagagattgtatatggtaatctactggtttatatgtactatgccaatattggcaatggcaatcaaagagtcatttggtaaaatgacatgtttttgatgagggacattgataaaactagaaaattgactaaaatcaaagaaaatatgatgagtggcactactatccataattcaaaaatgagaagggatagtacagttactagacaagttagaagcagccacaataattaaggttaaacattagataaatttgtcgagttttaagttcaaaaaattatacctggacatggctcgtggaatgattgatttggccggattcactggtcaccagtttgcgggtcacaggttgacccagtaactctattaacttaaaaaaaaatcaaattgtatgtagttttttctgtatattaaattaagcatataagttataaacttataacatcaaaatctattttcgttagattaaaaaaaatattaatttcaaatctaaaatacaaaaaaaaacaatctgaaaagtttcaaactatattatataatatatattatatctaataaaaataaaaggattagattttaggatttttttattttaaatatattatacatgtaataaaaagaaaagtaaatttggtcaagttggcaagcgaattcgggtccaacccgaaatttgatggctataaaaaatcaacccgcaaactcgtccgaaagtgtatcgggttggacccgaccctctcaaacagaacgagttttttaaattttacaggttgatcgactcggttttgggcaggttgactgggtcgggtctgggcgggttgaccaggtcgggtctaggaaagttggctgggtccgaaacaaacccactcaaaatctccagtcctaatagtaatagatgtatctggtttggaatttttttgttgaatttgttgactcaagaaagagaccaactgtttataatgagtcatgaggtctgggggaggattcatcagttagtgtcctaaattagggatgaaatgggaattggatttgggcctggagtagttgaagcttgatgagcttggggtgctggtttagatttgttagcatgattcttgccaccatagccaggaggaaacccatggatgaagtaacatttgtccacaaggtgatcaggtttatggaaaatggaacaagaaggtctgggcttcttgttcctcgaagggggattagggggttgaacagtaggagagagagttctttgcctctcttcttgaacaaccatagcacactttggaaattgaaggtaatggattaagaagcaaaatttgaacacttaccgaattgcatgattcattgagtccaatcaagaattggagaaattgatccatgttgtaatattcgtgtaatttttgaagagcaccacaggtacaagttgtagaaggtcaaaattccttcaactcatcctagaggaatttcagtttggtaaaataggagtttatggactgatcaccttcttgaagactaagaagttgagccttgagctggaagatgtgaggatcatcgccttgattgaatcacttgatcaaatcattctacatctcagatgcaagattaaagaacgcaatgctttaagtaatgtcaggggaaacagagtgaagcaaccgtgacatgaccatgttgtttcacctagaccaagaacaaaaaagaggattagtaggaagagatttaaggaaggctaccatcaagaaacacaattttgttcttcatagcaaaggccatggttatggctcaatgctaggactgaaaattaggtcctgaaagtggagcgaagacgagaactaggcctggatgatctcttgtgctcaaaaaataaggactagacaagtcttcatgaggtatatcgatcacaagtttccataggttgaattggagcagaggtgtgcttgacgttagtggtgggattgacagcagtatcgccatttttttccgttagcagagctcctagtttgaggtctcacaattattgcagatgaagatagaagattatggggaagcaggtttaacctgataccatattaattttagagaattaaagagaaaagaaaacttttattgattgttttcaatgaattgagaagtaagctcaattaattacgcttacatgtactacaagccataaaaaaacataatcgaaatatagttagaaactaattgatcaaagcagaattaattcacatgtggtaacaacctaactaacttaacaaactataataacttctaataaaggaagaaatagtcgaaaggaagacaaccaagacaacccataaccgattttccaccaatttagaaatgactttacagaaaaaaattgcataaattgatagaaccaaatataagaatattttatttaaggaaataaattttctatttatagaaataaatttctatataaggaaacaaaatatataattgattttctgataaatgaatattttatattcattgaatctggacaaaattaattatgtaatattctatatatggtcagatttctatatttattacccgatttgatttcaagaattaattttcaaaatattctaacaattaatgtggcgtagatactgatggagtatcctacctataaatatagggtctcggtcctcgagttcctcactcattc

SEQ ID NO: 300804 - DNA, 1711 bp, Cannabis indica
acttaaaaaaaattaaacatgatgatgtcaataactccaatgataacatcatatcagcataacaataaacaattatagtatgcacaaacaactagtttcatactctcacatatcacatttgcacattctttctcataagaaaattttgaaacaaaagtgaaaaatgagatcatagcaaccaaattcattttaataaaggttcatattagcagaggaaatatatggacttatttcttattcaaatacaagtcataataacgtaatgctagctatgacttatgaaagaaagtccatttaatgagcttccaatgggtattggagtcccacttcttcattcaaattcttaatgtagtccttccttgctggatgttcttcctgtggcctattatatgcagtccaaacaggttccccaatgaacaatctcatcaactgtacattaaatttcacccagacaaaacaaaaattaagatcaattttattttatttttatttatttatttattttgtataaagtaataatggttaaataagtacttactttgatgtagttagaggtgtctaaggtgaacctgtggtaaatcccagctggtaagataataagatcaccagccttaatccagatcctaatccaacggtcctccttgtccctaacatcaaagtagccacttccttccaaacaataacggacttcttcatcaccatgtatgtgctctgtgtagaagttcttcagcttctcttcataattctccaacttttcaggccttatatcaatcaaatcctgtatcacaacaaattcaaaataagagaattcgtttgttccatattagaagtaaaacaaagaaacattcagtaaataatacaagttccttcctacaattaccatgtaattataacctctggtttctctaatatggcgtagttcttcatcattctcgtaatttttggggttcaagtgccagtacagtactcccaattctgcaaaatatttaccaattcatcacccaacttaagaatatgtatagaaagatcgaaaatgagactgagagagacagagacctgccaatttgtccagtggaagaagctctttggggttgagacggtgaggaagccttggatgttcattgctgtcgtccatgaaccatgcctgcttcaaataacaaatttatataaatataataatacactacaaatctactagctagggtgttgaatttatctaaactgcgtcatgtaaactcacctccatcgccattgccagtaactaagacacaacaaatctacgaagggaaaccagttttgcttgtatatgaagtttgttttgtgcagattatcactcatatagattgtcatttattcagatattttcaatgtttgagagattagtcgcatgtctactttatcaccacctgtcactacatttttgtggcttttattttctgctgacttctattttttatggtcacttgccaatatgccatcaagatctctctagaaatttttgtctgctttcctcaactctttcattttcggtcctaattttggtttgtaggagtatagccataagtatatatttgcttgtctttttatttatttattgagataattagataaagtatttttatttaaaaaagaaattacatttttatgtttaaatgatttttttttatatttttacgatgttttataaaaataatacgaaattaacaaaaaa

SEQ ID NO: 300805 - DNA, 1778 bp, Cannabis indica
taataataatgataagtgtaccagtataaacatatcatgtgtataagagtgtatacataagcagtccacagtgacacttaactggatgacatcttaaatttgctacctgtttagtaatttggagggtttaccacttcaaatgcaagtgaaaacggcagttagaagggtttagctgccaaaaactcttttaaaaatgtaaatgtataaaataattaaatcatataattaaaatattacacattatttattatttaatatactaactattatacaaaaaatataacttaaaaaaatataaaaataatactaatatactaaaaaatacaaatacatattataaaatataaaatattaattaaaaaataatcaataaattaaacgggttctcatcaaggcgaagagtgtcattatccctttctcgtttaacattggaaaataaaaaataattttcatccccactccgttctctatcctgagttcccccataattaagaaaatgtgcaaccttatgtatgtaccaataattttttaattgtataatttcaataatgttctttatgaaaataaaaacatacacaatttactgctggagaaaaaaataaaacaatttacaatttgcattggtacgatttttgtttctttcttacttactagtaactagttggtaatatatatttttttaacccaataaaattaaaaactagtaatatccttaaaaaaaaaccttaaaataaatctaagagataaatgtaaaacgtataattttgataccaacactttaaaattttcaatgtagatctgaatcttgactgtaatactacttgttgggaaattgataaacttcaagcacaacataataataaagaagtgaaacaaaacaatttattcagtttaaaactaccaaacccacaaagaaatatataaatataaatatatatatatatatttcacttataatttcaaaaatacactcattcacaatcttaatctctctatctaaatctcaatacattttttgtttcttcctcactctcatcacacaacaaactcaaactcacttttcttttcacgacctactcttttcttcacacacgttactctttctcacacacaaaaaatatatatttataaagctacaaaacttaagcacgaagacactctaaaacttagtcataaagactaattttctcacaagtaaataattactaaaaaaatatataactttacaaatatagaaataaataaataatttgaattaaattccaataaaacttaaaattatttttggtaggaaaggagagtgagatggatgaagaatctattaactctctcttgtgttgtttggtattaataacaaaggtaaaaagattgagagaaaattattaagattaccctaataactttcttactataaatatttgttatttttgaaatgataattttggtatttgatattttagttctgtcttttactcaaatttttaggaaaattaaacttgtaaaaggatttagtatttacccctcatttcaactcttccctccctccacccttctccttccatttcccttcttcctatcaaacatattgtaaaagtaggttaggtggggtcatttgggcaacaatttttatcgactacgttgatgatatccaatgtaattcaataatttaataaacttgtaggtaatattggggtgttcatgtgattcattccgttctattctgcttataatgcatttgattcgcattaagtgtagattttatatattttttttttttt

SEQ ID NO: 300806 - DNA, 3171 bp, Cannabis indica
atattttaacgaccttaaaagttcgagagtataatttaatacatataaaagttgaaggacaaaaatcttaattagtcattaaatatatatttatagagagagaattagtgtgttaaaaataataagttgaaaaacataagcattatgcttcgatcatcttctctatcccaatacatatgacattattatttatttggtagcaattaaaatatatgtgacggcgacttaagattttttattttttattttttttagctattattaaactcatgctcttttatatataataattattactaaaatggattatgactagtacttcaaacttcacatattatatatctcaatttagaaaaaaaaaaaaaaattcaaggtcaacctgatttttttggcacaaattaccagaacaacttgtaatttgcatagtagtgcataattatgtgaataacaacataaattcattaatactaccaaacaaaaagaccaaatattgtaactaatttaatttacagtaacatcatatttatgtaaattaattctctctattcatatatttaaaattacagaaatataaacagaaaccaactgagcttaattactgtccaaaaagctacaagtttggtttctctaatcacaacttaattaaactaataaaatcttaatttgttctaaaatatattcttaagagaataattcccggggaccctttttctcatactaccatccctctggtaaaataattctccttaatttaaaaatttacccaacttttttccttatttaccaaaatcaccccaaaagccaaaaacttttcattttcaccctcgtcatcacttttggtgagccaggttttttgcgtcgacaaatgttccatgaaatccgtacggaactctcgacgggagtttaactgaagcttccatctttaaatcaatggcgtccacaatctgtagctctgatttcccactcctttcgttgtgaacaaacgccattatataaccctcatcttcttctccttcattactttccgaattcggcaaaaaaaacggttcgccgccgaatttccggtcaccgtagtaatactttttcacatcgccggtagagagatcaaccttagcgaaaccagaaaccttcggccacggctcagcaatggcgaggtaagcaaaccgggtttttctcccaagcctattccgattcaccattccggcttccaaattcacttcttcgtcaacgttagcgattatagggcggcgcgtggagacacgcgtcttcaagttaatccttatttcggagagaacgctcttcaagctctcgtcgcactcgttgaagatcgaatccggtggagtcatgcaagacccgatcaccacgacctcgtcggtctccggctcctcccacgcgttccagagatggaagcagaaagtttccggcgactcgacccagatcatttccgacgcgtcttctgcggttttggacagaatcccaaaccgggatttcttctcaccgtcgaagacaacaggggacccacctctgaccatttctcccaacttgaaaaccacctgctgatctgggatcacgacaaaattctcagtaatggcgaaatcgtgaatcatggtcggaacaggtaaagatatttccacgtcgggggatttttctccattgggtgagaatttaaagtatttaaggtaaggtttctgaacgacgtcgtaactaagagcaaaaagctcccctgaaactgggtcaagcttaggatgagcaatcatggcggaacagagttgttcatcaaaatcgtatcttccaacagtttcaagatcaccggaagaagtgattctaacttggtaaggaagatcatcttccgacatagcaagtaaccgatcgttgaagtaaacaagaccggcgttagcaactccggtaccatgactacggtcaacgagtccaaaaagtccacgagcatagaaaagaaagagacgagcaataccagaatgtccatggagttctccgatggctttagggaaaacagagcgaccgaggtctcgttcttgaacaagtctctgagtttcagtaaatcggcaagcgtaactagctgaagcttcaccgccattgatagtaacggcgtgaaccattccgtcaccgtcaaagaaatgatgaccggcaattggttcaaaaagtgggttagctccgtttcttaagtaaacgccgttaatgcaattgggtatagttccggtaacatttaaggattgtttaacgggttgttcaggtacgggagcaaagtttccggagatttgtacacgtggatcggctgtctttggaagtgggtgttggcgttcgcgtgcaactaacgcgccttctgccacgtcaaatgccacggcggcggctctttgtaggaaattccaatgaggagttgttgttgttgttgggttggttttgttgttgttttcatcttttgaaattgtgatttgtttagggaaatgaagaacagaagcacttgttataatgggtttcttctttgttaataaagaaatggacttttttgatgagtagagattattatgagtacttaatttggttccaacccaactactagagttgggagccaatgaaggagtagacatggctgtgtttttttttcttttatgagtaagtttttgttttgggtgtttggagatagagagaaagaaaagaaaagaagtttgttgtattgagagaaagaaagaaagagtttagttttggtttggattaaaggagagaaaattggggtataaatagagagttgtttgtttggagaagaaggaaaaaaagaggtccacctcatacatctaagagaagagcacgtggtggattcttttgtgtgtagaaagagcacttgaggatttacatatatatgtatacgtatagaaattacaaagtatgtggcatacttggcttgtgttgctattggggcaaaataggtagaaaaatgttggtttttttttgttaagtattttctagttaaattctcctaattattatttcatttatatttaattacttaattgtttaagcacttaacggttgaagttcaaattttaatagtaaaactttctaaactactattaaattggaaataaatttaggtgccgtttggtaatacttttgtttttaatttttaatcaaaaaatggaagtaaaattttgtttt

SEQ ID NO: 300807 - DNA, 695 bp, Cannabis indica
atttcatacaaaagttccaaacaaaaattaacccaacaatttaggcatgatgatggtcctttatcacttgactgattggtccaaaagatgtgttttaactctttcaacactctatgactttcttcactcaactttgctagaaacttgaaaatttgacaaaaacaattataggcatgcttaggtattaaattataaaaaatcattttcatataatgaatcctaaaataaacggacaaaattttctctgtttctataataattttcaattttataagttctcaataacactctaagttctaatttaactataataaataagaaatgatgcctaaataagatgggaagaacacttatttttgagctcattgaccatattgttacttcctgaataattatgactatgacgtctttcctttaattgatattcattcctaaaaactcaggagttatctatgtaaaagaaactcccatcaatttagtgtctaaaactaaatcaaggagattttccttttactcaacatgaggtgaggtgttggtgaatccaacttatagttttgtctatctacggagtctactttccaaaccctttggagtggctttcctattgttccctacttcctggtggttagccagaaatctctatacattttctttgtggcttaacaggaagaggttaggaacacgtagtgtcattt

SEQ ID NO: 300808 - DNA, 2839 bp, Cannabis indica
tttgtcatttaacaaaacacatggtccaatctgtaacttttgcaaaacacagggtccaaaatggtatttaaccttaagattattaactatatcttaaatttaattaatattattaagtgcgttccagtggaccacactcggtttggctttgaatattttttattacacgcagaaaaatgtgagtagattttggtgggcttaataatcactactgttaattatgcgttccatcaatttacactacttttactttattccattttatatattctctactttgctgcagctgctctaaatagtcttaaatcttaattttttatatgaacatttattgtggttattgaaaatatttatacgaaattttaaataatttaatatgttaaaaatatttatgtgcctataaattaaattatattgtacactactttttcataattattttaaatttttttaaaacttaaaaaatatcttaactaactataatatatatcatataaaaaaattgagactataaatctttaagtataaaaaaacacgaaggtgcatcgatatatattaattgtgaaatattgtattgtattgtattagtattatttaatacaatactatgtttggtattaaattgtactaataaattgtgcaaaattataaatttcttacaataaactcgatcccgatttcgaccacggtctggactgcgacccaaactctggacccagaacatgccccggacccaaaccgagacttggaccctaaatctcgaatttggacccagacccaaacacggatcctagactcgaaccgcaacacaaatcccaaaccctaaccaaaattcagaaaccggacacaaacccaggggtctggtctgagtccgggatcgggtctggatttaaggttctaggtccagattcaggtctatggtttgaggtctgggtccaagtcaggtccgatctagagttgaggttcaggaccgagctatccgggtcattcatctagtaatactacaattatctccacaaaaattagaattaatcaagtaagtaaagtaagtcatgtgtttccagctcaatttgaacattaatgaatttgatcataatatagatataaaatagggctacaaatttataaggaataaattggaatgaaaattcaagtttacattttatttatttacggccgcttaattactttattaatttcagaaaagtgcatgtaattgacattctatgaaattcattaattatagtatatatatttagttgacattttacaaagtgaaaaactaatgcttttgactttttattcaaaggaattaatgccaattaaataggactgcttctaagttctaccgtcctatgtggtacggtatcaattagtttcccttcctaaaaacaatggcataaattcgatgccattaatattaccactagaatttaggttatgtaaatatactttaattagatgtctagtttaaaacaagtatttacaaatttggacttaaaacaagtcaaatattgattaaaacataataaacaaaaaagtctaaatttcacctccttatttgtttataaaatgaagactacatgcactataattatttcagacatctagtaaaatttaaaaaaatttaacacgctgaaaataaggttcaaactgtttgttacatgcgtgactcttttatttagaaaagtgtattgtaaaagtattttttaatttattgtgtgcaaatttaaatgtgagaatatcataaattattattattttcaattataatttaagtaaaaaattattatatttttgtcataataaaaatattataaatttaaacacattaaaattaaaattagacaaactagacattacatttttattaatcaagagtacatgtactttatattaccaataaaatattataaaattaaaccacaattaacaatacataataattacattacaaacttaaatatacatttaaaattaaaaataaacatgccaaatacattaaatagaaaaacaataacatagatatgaacatttaaagataatataaagatataattgtggtattttagttaattaatataatattgttcttttattttattaatacaataataaataatatttttttggtgttatagttgaagtgaaaatattttttgatattaaatttaaagggaattaatccatatactattttttttaactttttttttctttcaaatttacagttttggtttctaaggtagttacagcgctagttgtaattggggtttttatacgattttttgttgcaatttaagttacagcgctagttgtaataagaatttttatgtagaatttcataaaaatacaaaaaaaaaactgttttgaagtgtaaaaattaaaaagtccctaaatttaatgtggtccttaaatcatgctcttttgactccattgtatataacataatataataaaatatactttcgtgggggttgtttggtggcttctataaaatggagaatccataacactagttagttctaatttctaaagaatatgtatatttacatatataatagaatgttgtggaaaaagaaaaagaagcacatgagacaaatattggggccgtgttggtgaccagttttttgggctccctaggccaccgtccgctgcaattttacaacaatatataagataagtcaaactcacattaacttccttacaatacacaagagaattgttcaaatatgtcatacataaataaagtgatatattttacatttatttgtagagcaatcaataatttttttttttacgtatagataaatggggttgaaaaatacctcttttatta

SEQ ID NO: 300809 - DNA, 4124 bp, Cannabis indica
atattttgacatcacttagcctgtttttgtattttggaaaagttggtcactagttttgggagatgttgctattttgcggaaatgagagactcgaaactcttcatctctgagtgagttgtaaatgagaaatgcaaagttttgaatttgatgtctttgacttcatggatctttgttattatgaaaaatcaaacgaattgtcaaaacgacatcataatcggataagcagaacccaacgcactaggtcttttatcaacctgggcgttgggtacttacttctgagttcccgggatctcatttttgatacttccaaggcttctgaacttgaggacgaggtctcttatgtcgtttttgaccattctagatttaatggtcgtattagatttggcatttgagcaattgaaggcagcgtcccaggttgattgtcaactagggagctaggcctcacaccaggtcaacctgggcgctgggccctgtttctaggggctcgagtttgcaatttactaaccaattttactttaatcttcattatttatgatggtggaaaaatgcacagaacactttttggtgaacttgatcggaaatagcccaggttgacaataggcgctgggtcctagttctggccctccaaaaattctgtttggtccccaaaaatagttgaatttcaatattttttttaaaacaaagaatattcttgaaagtgttttaaaaaaactccattgaaaatggctcaagttgacaaaatgtcaacctgtgcgcaaggccagccccaggcgtcaacctgggcactgggctcttttttggcacccaagaagtgttgttttttctctgaaaggacctatttccctatttttgaagaagaagaagaagaagaagatgcaaagtcaggtctttgatcaaatacttgaaaggcgcctagattgacagattgtcaatgtgggctctgggtgctcgggaccccgggtgctcaaaaatgaacttgctctgattctaatttttatacctcaagaatttctgtggtatgttgatgtaacaatgcaagttttgacccttttgcactaagacagtcccaaaaattaaaaccttagttggacatgtcaacctgggcacctaatgaaaccctaggtgcctaggttggcttctgggttgtaagttcgtgtactttcagctcttgagatttggattaggtttctccatgccttaatggtataaaatactaaaagatagtgagttggattcaagttaattaagtccaaacttccataccagagatccaaaagtcaacctgggcgcagggctagtgtcccctcccaagtcaactgctatgactcgggtctactcaactctgtgacgccatccttctttccacatattaaacatttatgtccacttcactaggaaaagttttcagtttaacattctctttctctttctctctctctttgctcggttagaacacaccaaagggaaccaaccctaaaccaaggattttagagccaatttctcatcactttcacttcaaaattcatctagaaggaaggattaataattagaattgtcaaggtaaccctctcctcctcatttctctttgttttctttaagagaaagtttggtttcaatggttgtttgcttggtttagctgctgtgagtttaagtgtgagttagaatatgtttctaggttagtattagagttgttttaaggttttaaagattgtagagcagttggttttgttaggtgaagcaagcttgagttcttggactcaaagcttggtctttaatgacaagttttggattgtactttgattttaatttctgttagttgggttatgttgtattgatgtttttgaattgttctgtgaggtttgagagagtttggttgaagtttggaaaggttggagatgtacaacttagggtttttgcttcctacagaaaacaacataccatttttgggaaaacggtctaccatttttcatggcagaaaactcagaaaaatggcttgccattttcaccaaacggtctactatttttcctagtatggaacctagaaaaaattcgtttttcaaaatggcctaccattatgggtgttgcccgagaaccttaatttttgtattttcttaatgtatagggtattgctaaagaaactttcggtgatgaatttaagacctataaagggttaggcaaagttgttgatcgatttatcgttgttgtgacataagaccgagatcatcgggcgtttctccactcgggttggctgacaagcatgaatttggattaaatataagaaaagtataattgtactacataacatgtcgtgtgtagatacaattgttatcgtttataagatacaattattattgtttataagacacagtcatcaccgttatgtgagaaaaagtcatggctattaattgaaactattgttagattttttatttttcggttatctcattaggtaacagtaatgacatatggttattgagataggtatcaggactgtcttatgagacaacaaaaattatatttgaatatcataatagggattagggttgtcttattagacaacgataaaattaattactttataagtaacgaatatgacttgttatattatacaagtacttgtgtattgttaaatatttatatatttgtaaatatatgattgtgattatctaattatgatgatctgagtttaaattaatattatttatgtactaatttgagatattatattattgtttttcttgttgagtctttgtgattcacaggtgctatgtggtgaaagtaagggttatagaatatttgggcagccatgagttagggatcttcttcaacgaatgtacatattagctaattcgacaagtgaggtcgagttgtcgagattcatattttttacaatgttttgaactttaaaatgtattttttgttaaaatactgcagtgacatctcttataatatttttaaaaagattctcaattttaaaagtgtgatgtccaaaattttttatgtttcaaaagaattaattagaaagatttttaatgaaatcataatttttatactacaaaaaataataatgtgtacattttatatgtaattttaaataattacaatatacttaatcataaaaaaaaattaaactaaaactaataggaagtgtactataaattttttgtctactttatactatataggaaagaaacctaaaacctaaaataaaaaacaaatataaacaaacaagtgttgtgttaattgattgatggagtatcttaatagtaatacacataaattagtaaccatgtgtaggatttaactttaagaatgttgataccaatgatttaacttagaggtaaaatttcacttcttggagtgaaaaaacttaaaattccaaagcaaagtattgattttaattgggaagattttgagtgcaacaatttagaagtgagaggccatgcggaccccactccatctaaacaccaagggaacaatttagaaaaagcaaagcaaaaggtcggtcccatggtcaccaaaaccccacactctttcgaccattgctttattaccataatacccttactattcaatcaattccccaaaagtcactacccttatcatcctcaatcattaattttaatactaaaatttaatttttcattataaataaatattaaagtttaatttttaatattaataacacctaaattataattttaaaactctcataagtatataattgtgtcaagtcaatgagcacatgtcaatccctaattgatttacattattgaatttttattttttttatttaaattcatttgaatgtacaaataaaaaaatgacacgtgaatattatcggtaacttatgtatttatctataacttgaaattaaatttatatatttatctgtaatttaaaataaaacgtatgtacttatttgtaatttaaaattaaatttaaaaatgagaagttctatttgcacggtagatacaccttatcattaaaagaataaatttaaataatttttaaaaattattttagtattttattttaatttttttctcatattatttaatgttaattttaatacttattttgattttattttcatattactatagattttttttttaattttt

SEQ ID NO: 300810 - DNA, 10705 bp, Cannabis indica
gaatagtttacaatatcgaaaattaaggccgactctgaaatttattagtgagtcataagaaaaaaaaaattggactcttatttagaaaaatgtgatctgtttcaaaatatatatatataattttaaaaaaagaaaatttttttggacccctaggttaggtggactccaagtataagtctagtccgcctatgctcaaggtcggacctgccagaaatagaattcttaatatttcagtttactgcacgtattcaaacaaattttaaaccaacattataaattatttaaaaataatattgtatttataacgaaattttgttattttttttatacgaatacaaaaattaattaaaaaattataatagagagtaattactcatcaattcaaattcattctatgaaaaataattttaatttttttttaaatattaaatatactataaaatgaaaatgaaaacaaaagtattttgacggctatttttaattaattttaataaagagaaacgagacatttgtattaaatgaattgagtgataaattaataattaatttgattggaattaacgcgccgttttagaggttgaggagaccaacactgaaaatttaaaaaagaaagaaaaaaactgttaatgggcaggaaaaaggtgaagccctacagtctgactctgacctgtcccccactctctttacaaatccacaaccccacgctccggattccacgcgccccctccctaatttcaatgcacttttttttagcctattctcctttcaaatccgaaccccaaaaatattaaaaattaaaaaaaaaattaatagatgcttccacaatgcaatacattaatttagattttttttttattttacttttttctcacaattataaaatttaacatgctaaaaatattggaagagacaaacttgactctttaactatttgaagactagtttttatattttaaattattttgaatttatttaaattttactaaaatatcttaaataattataaaaactatgaaataagaagaaatgttgctatttattaatagtgtctagtattttctaagcgtgtcattttgcgatcgattagagatactttctaaaaactattatattaaactatatgagattcgatacttaattctaccaataacgacagtaatacataagaaggtgctagacactactagtgccttttagtatttctcactaagagtctctcgtttcgatttaaatctcatttttatcgtgttaaatttttttgaaaatcttaaaattatcagtggtatccaacaccttttgtaggcgacactttataattgtttagtaaagttatgttttaaaactatacaaaactcaatacttaattctactaatacgatataatactaaaaaataactagatatcagaagtatcttttagcatttgtcaaaaataaattataattaacaattctcttaaaaattctaaaacagatatgaatgtagggacacgattttatcccgtaatgtactttcacggagtgtattctgtgatgtacgacaaccgttagatgatggagttatttgatctgagagctagggttgatctagagataagtagggttaaaaaatagtaacgtgctctgagacccatctaatataccttgagacataatgtaccacggaatacattccgtaaaagtaaatcacgggacaaaaacaaaatttgcaaaattaattaataagaaaaaaaaagcaaaaacctcgtaaatataaattctcactctctctttttctctctcttcaccaaaacactttccctccttttccacctcttccacttctctctctaaaaaaattctcaccattttcgctcaaacaatccattggaatgtggtgattttttgtttactgctttgcttcttctgcaaaactatgctaccgagctttgttacaatggaatttttcctcatttttctgcttattattgcatgaggtataatactatactacacttccttttgttcttttcttagcttaaaacattatgactactgttatgattactaggttttctttgttaacatatggttatggtagcttcttcctttaatttttgctgaaatttttggttcttttgctttgtaggtttatcttgagacaatcttttttatttgttttgctaatttttgttttatgggttatttttagaaatgtatttatgtgatattgtgtttgtcttgttttgcatattgtttatttttctttctcttatctttattgtagttcagaggggtagtatgaaagtgggtgaggtattcaattgaataaatggacatctttaaggggtttttgagttgccttattaggagctaagtgacccaactgagtagttttcttaaaattaaggtgtattagataaattaggaaagttgaaaaatgactaattgtactaatctgtggtataatgggatttggaaaacactggagctatcttaggaatgatggttttactttattgcatagatagggtttaagtctctactttatggaacatggttttgctgttaaatttagaattgagtgtgaactatgcaaatgactgtaaatatacttaggaaaaactagcaaattagctgactaaagacaattctttcatgtggtcatagggcatagcatgatggtattacaaatatggatttgttttacaattgggtgttttattcactgccccctgtgaaataattttagtttggatgaagggttttttgttctgttatatatgaagtgttaaagagtgttgttgctcattattgtctttgtgttttgctagaatagaatcaaactatcaagtttttgaagttttattttcactttaaggtactttttgtcgtcgaattttcgtgctgaaaacttgtattatgtcagggagattgcgctggatatttccttgagaatttttgatcacctgtaaagaatccaaacaattgcaagtatgttctcgtgtaagccttatgaggtatgtatagtttacaattacatacgagttatgaacggtgttattttttgttcttctaagctcttctccatgtcaaatttaatagatcattttaagcgattttccctttttggttgttatttcctttttcaattattaaagttttttgcccactggcttggttgtgacagtttacattgctttgctgtaggttgactctgatatgcccatttttgcggatgaacctgtgggtttggagcatttttggtagaacctcttcgtaaagaggattgggttggtgatcttcttgatttggatgcattccaaattgagaaatgcttcaatatggaagatatatcaggcacttttgattatgatcagaatcagataaaacttgatgctggtatggttactttttttttatctcattagttcacacgctaactttagtacttagaatagttaattagataatttccttctatgacaaatctttggtttttctgtgtcagttgtacagtgtgtaacatttatataagttattgttaacaaatccctttttcatatccttctctgattaaagtgatatcattgtattatctaaaagcatgcaatctgacatcaccaaagaatcttgatagtagttccatgaacaaccatagaattcaatctaaaagctaatgtgagaaaatggttgttgaacagtaaattttcaccggaaattctgtggaatttttgtcctagtaaaagagtaggtggtatgatggcatgttttgatgcatgaattgagttgcttgtgttgtttcaaagccactacattatttatgatgtctaatattttaaattatatagttttatttgattttgcttttgtgtattatcttgtagatactgttcaccctatgtctcctaaaggatccgaaaaaaactcagaggtatgtattgttttccttttcctattaaattatgctaagtgctatgcgtatttatgatttcaagatgtctatgagacaaaaaatgaatttgtctttagaggcatcttggcaatgggattgaagcctgcatttttccttgttttatcttgtggggaagggatttttcattttttgtcagtgtgtggaactttagtattatgttgttgggttctctaattgtatttatttcttttcgccaagagggatacccgtgctaaaatcaatctataagattaattattttgtattttgttggttaaatcttttatgctttcaagctacagctctttgtttatgtttatggtattcctaagtttttgtttgtagtaaagctaatgtcagaaaacttgctctgtttttctttccttttgctcgttatatgggcatatgtatacagtaaggaatgtgttttcttctggttttcttgtgcctttctccaatcacctggccactgttttcacccatttcttttctttgccttctggctatgatctaactttttagtggctctgtacttttcagaaccgaataagaggctaatcgggtcatcttttattactcaggctctcaggctcctaacatggctcatcaatatgcccttgctccatgtttctttttatcttgtaggaatatcacctactctgtctttatcaccttgggtgtctatgttgtaagtcagcttttagaaatcattctaaaaatattccatgcaaagtcattactgttgcattcttgtcaaaaacctcggggccactgcgaggtctcccagttgaactcccacggccaaaaattcaaacataaaaaaaaaaagaaaaaatattgttggagtcttgtttgtcttcttgccaaccacgttgagcatgatttgttccacttattgtacttgagcggtaagccactaatgttataaaaatttatctggacaatggtttagccgatgatgcatatgatatggggtaagaatttttataaacatgttgaatttagttggagagacacgagtaagtttagtaccactggtattaaattattaatttaacatttccaatccacatggcaagtttgtttacctgtatctaatgtgaatatttctctcggtgacatgtatgtataaaatcaaggttttggtttcttgtctgttgtgattatctctcattttagttggagtgatgattcaagcttacaaagtttagctgcattttccacatgaaatatgtatgctttgtttattactttttcttttcccttgctaattacaaatacgtaacgtgtctaaagtattgatatttgttctctctccctttaatagttgtcttctgacaagtttcaagacgtcaatactaaagttcacgaggagtatcatattggtgagtccactacacttactgatttgcagatagaaagttagttttgttgcattgatttacaaataaaagctttctttgcccccattttgtagatactacacttactgataaagcttgcaactttgattatggaaactgcaaagaaatgggaactggtggagtagaaaaccaattccaaggtttccatagaagcggctctggtaataagatggcggacttatcctctacaaatactcctgtgttagaatatggaaacaaccatcattcttctttgcttgatcaaggcagagccaaagaattacacgatacctataacatgtctggacgagaaccatttatggaaaagggttggccgaagaaagataacttgtatgatttttcagactatgcggagttggatagtagtatgaacctcgtgaaagttgaggaaacttctaatgtaaatgaaggcgaaactacattctcatcccttgtcgtgtactctggaagtgtcactggccatgtaacaagactgttgcttgacgaaaggagttcagaaaaccagcaaatgaagaggaagagggtagatggctgtgaatctttgaagacctccgcttctgcagttaaagttgaaatgtgttccttagacgaaggagatcaagcaggacttctagtctcaccaaagagagcaagaaagccacctaagagatatattgaggaatctctgaattacgattcaagatctcatcatagaaaatgtgggataggcagaaagttgaaggataggattctgcatgatgggtatcaaaagtacaagtggcatcagaaggaatttcatgcagaagtatttgaagatgattctttcaatggagggtgcattcaagttcctttcggtcttccgatggaaaaagagcactcgaagaaaaataaatacattctggtatgtacaactataattacttgtaaggttcttgtcttgagtttgtatgtagagatatccaacatcacaaagccacaatttgaatatcctaacctcaaaatggtcatttatacaataaattcggtagctttgactagaactattactcatgccgctttctccctttaatctcttttctttgcaaatgctgtggattttcttgtatgttgtgttaataggctattggtatttaggttacaaggcaatgattgttttcctttcatgagtggcaagtgtaaatcccggaaggatctgttttccaagtgcaatagtttatggttgttacagttgttacagttgttactgtatcgaatgtttttttttgttactattaaattaaatacctttatgctctaattgttgctccagggctctgaatctacaaaggataacggattggtggatcaaaacgagaaacatgatacagagcgttattcggtggactcccaggatgagatttcggaggatgagtgtgtactaaggagttctactcaaaaggccaacactcgtagaaagcgtcatatatcatggactccggaggaagtggtgaagttagttgaaggtgtttctcagtgtggagtgggaagatggactgagataaagagattactattttcgtcttcttcacaccgtacctctgtagatctcaaggtacttcaccgcaaaattatttctttattaatgaagaaatacttctgatgaatctaaaacttaatatcccaaaaaaattgttctttatcgggtggtttcaggacaaatggcggaatttgttgagggctagctgtactcaattgcatatcaaggaaaaggtgaagctaaagctgactttttcttttcttttgaagtcttgcagaaccgaaattcagttgattttgttcagtacattttatatccctaaactttttcgtattatgtttatttaggttgagcaaagtcgaaagcaagcatcgagcaattatgtaccagattctattctgtgtcgtgttagggagttggctgttgtctatccatatccaagagaaaaccggtcgaaagattcttgcaccgttccagcagtctcatccttttctaccggctcctctaacgcattagttccattatcaaccgttgtctaaggagcaaagaaagtctgcgcgagtagtccttgaacaacacttacaacacacgtcacggcctcacgggtataccatgctaacctgaatctaaaaagcaagaaagtaaaaaagtctgtcaatattttataaattggtgttttagttatagatcttagatgatgacccctttttttgttaatcttgtagtagtagagagctaagtatgcatcaattaacatcaaattaatatgtagaaattattaacctttgattcttttaatgcttttgagttttcttaaaaaagagtattttgttttctttaaacatggattctatcaatctgcactaggcaatatagtttcttttcttatgtataaaaaagaaaaattgcagtcttagttggacttttttttttgttgtggtctttgtttgtacaaattttggtctcttctcttcctataaatgctaaaataacaggtaaattattgtattgaaaatgaccttccttctcatgatcaacagttgttgatttctttgacttttttatttgtccaatgaattttgagtgttgacttgtacatagtatatggctgaagtttgattgcctcttcaatggccattattcatatcagaatcagtcatcttcagttgtttccttttctcaataaataaagtgtcattatggggtcgttgacattattatgtggattcattggagttgacttttgatatagtaaaagtcgtattaggtctaatgttcacatgatccttatttcattcatacaaccttttttgtctgtccaacgaatggtgtctagaaaaactacaaaagcttaatggtttaatttataatacatgtataattattgatttgaataaattatttggaattaaataaaaatttatccaatattaaaaaaaaaaatgtaacattttgagtcttttatggatagattttcttttgattacttttgattactattttactatagataacaacctttgtgtccgtgtacctaaaatatatatcaatttttttaaaatattgaatatctttaatttggtaacgtaccaatgaaaattgacttaatataaaaccaaataaattctttatcatgacgtatgttaatcttctattcaaagtaaatctaatacaatacaataattatatacagttatgtcttaatcaaaaataaaataaaataaaaacaattatccaaagaataaataatttcatcaaacaaacaaaattcaaaacattccatatttgaacccataaatataaaaaactactttcttccgccgccagaaataattaattattttaaaattaattacaattaaattaaattaatttcgaggggcaagcgaaacggaaatctcagttggaactcttaaattatcggaccatttctttgaagctaaataaagcttcgaaatcttccctgccacgcgtcccatgttgggccgttcgattggatccacgtgtacgcaatccaaacccaaacggattagcttatcagctacgtcttcagggaacgagtccttaagccttttatcaatccaagtcctcactcttccgccgtccacggcggccgttgccgattcaatcaccgaactcttcacgaaaacgcgttcgctcttatcgaatctgtacttcaatggctcatctccggacaagagctctaacatcacgacgccgaacgcgtacacgtcggtctcttgtgtggccacaccggagatttgatattccggcgccatgtaacccataactccctggaattgcgttttccgactgttcgatctactcaaatccggttccgtgatctcactgatttcatttctcgacttagattgtttccggttatcgttctcgtcgatctcgccgcataattgagcagtgccgaaatgacagatcctcgaattgaaataaggttcggttactataatactactactcttaatgtgattatgaacgaaatttatgcttaatccagtctggttatgaatgtaatcgagtccgtgagctagatccgtcgcgatctgtattctcgataaccatgtcgaaagaacagtgaaatcaggatttctagggtttcttaaacaatcagcgagattagctccattaataaactcataaaccaaataaatatgatcaccagagattgaagcaccgagtagcttaataatactactatgatgactcctacaaataacagagaatctttcttgtagctcaggcatctcaatctttctccaaaactttctctgaaacacaatcacatccttacctcgaagatcgcaccgccaagaaggagtcgaagacgacgaactataacgcttagctagaaaattattcgtagctacacagatctctttgaaatcgtagatgttagggttttcaggtagggtttcgcgaagactcgtaagcgatgtacggctcgaaatcgaggttccggaggagaacttgtagctggaaccagatgagtagccggcggcgctagaggtggagctggaagcctcggaggtggttggtctgtgtggttgcttttgagaccgagtcgactcgggcgggttggatcgttgagttcgtgacggtggaagagaagaagaggacgaaggaggaggagaagagttgggttgggctcggtggtggtggtgggcccgttgggccgtagtggcggagatgggctgggccgcttgagtggccattttggttttacacatgcgtggtgaagtggagaataaagatttgaagggtttggatgatgacataataaagaagaagaagagaaaaggtgtaatggttgcggcggagcatggtagtcttttttagtcttctcttttcaatttctttttggggtggatgataatactattaggtaaaacaatatcaaacttgattttttagaatcgaacaacaaatctttttttgaagaaaatgttttgtgattgaggtcgattcttttttatattggtggggtgatgttgaaatttgttgacttttctttaaggaagaagggagttgtgttgtgcttgtttgacacatttatgtggactcacatagaagcgagatgggatagtcgtcttcttaaaaaaattgaaaaatataattatatatattttacttagttacaatatatatttataaaaaaaatgatattcacaaatataataataactttggtgtaataattaagttaaattgcatggtaacaacgaacacttttttttttctttttcgagtttacttttgactccctcttttacaaaaaacaagaaaaaaaaggaaaaaaaaaaaaaaaaaaaattgctcatcccttattttaaatttt

SEQ ID NO: 300811 - DNA, 1253 bp, Cannabis indica
ttcttcactagttaagttgctatttatgcatgtatctatacttctattaccatcctctacagataaacattgacataaaattaaaaaaaaaaattattaccaataattcattataaaatatttatttaagggtgatcatattaaataattaattatactattttttttgtctttaattaattttttttattgtagtattgttggatgggggcgaattaaaatgcgacacgtgtcaatatatataccttagtcatgtcactatgaaaattaatactgagaatatatatacaataatacaaagagagagtactaagtttaggaacattgataatattcatattgccatatcgatctcttatatacgtaaagattccataattaagtatcgaatatataaatatatctcaactttgaacaagatctctgcctatttatacataaacatcactttatagtaccaaacaagcccccatgtatcctaggctaggcaacatcaaataatattaacccataatcttattattattattattattataccttataattaaataaatacattttctttatgaggaagacattcaaaaatcttatattgagggcatctaaaacccttatggagacttgacttttgttcttaagagattaggttagttctcatcatctcatataatattatcctggtatatatttgcaataacatcaatttgattgggatattataatattgagaatatggatcattattattattattatttattgacttggagttggagcatatagtctttctatctctttgtacaatcacatatataatatatatttcatgatcaatttggtttggtttggacaattcaatatcaaaatttgggattatatgcttattgtgtctcacttctctttgtgcgtaaaatgtgtatttgttgggctttatttgctatgtattctttcatctccactcttcctattttggtcattcttttcttcaacacaaaacgtgagctcctcataattaaactataacactactaaataatattacaaactatatgatgcatgtgtaattacactacaaaaaatgttatttttttctagtacaattttgtacagacaaaagtttgatattgcgctcacaaaacaaatttacttttgatgtgttgacaaaaggggttgacaaattaacattggtattggaacttttgtcggtgcaaaataaaaagtactggcaaaacttttcccagcacgtaaat

SEQ ID NO: 300812 - DNA, 6812 bp, Cannabis indica
tacactgtaactgtgtaattggaagtaattgagaggttccaattacactctccaattctcatggcccatcatgagaattgaatgtaattatacattgtaattactaaaaactttccatattaaacattagctactaaaaaatattattttcatatgtaattactaactattttgccaaacaagatattaggaattcatatgtaattatcaccttatatccaaacacacctttcattttaaaatatagtgtaattactaaactgtgtaattattaccctagtaattaccctacctagtaattacatagttacttccaaacagacccttaatggttaaacaaaaaggacttcttaaaagttaagtttgaaaaagttagaattacatagttaagccacatttttatatatctgctttaaatttatgtgtatatatcattactcaatgataaagagtctaattatttatcacactttgaatgaattatcaagatctcatctaagagcatttttgatataagattaagaggtaaaatagctctttaaaaaactgtattcccattatgtgagataaatagtgagctaaaaaataacttataactattctttttattaagagttagtccaacattgttaatgtatggaaataaattgtgatatataagatgaatgtgttactcttcccattgccaattgattttgagatggaaccacacttatcttatcccaaaattctaacacttttagctacatagtgacataaagatattatatattattttcttatatgatagagagaaaaatataaaaaaaattagtataatgtaaatatgtgagataaaataaaaagaaaaaggtaaaattttaataagatattttaaagaatatagtagagatattaatgagagtgcccttctaacaattatattttatcataatttttttaaatgtatatttattattgttgcatattgattttcttaattatttttaatcacttaatcaatctatttttttttttttgaagaaaattcacttttacaatacccaaagttattaggagagcttagaaggagtattttatttttggcatcgtaaaatattctaaattttttaaaaatttacaagtggttctaaatagttactacatacgtgatcatcaaaaaaaattagactaaaaaagttatctaaatactgaaacagataaaaaaaatctaccaaaatgattatttaaggagtctattacataaattttcttaattatatacattaaaagaagacaaaattaaaaaaataatataagaaaacaagagagtatataaagacacatgattttctcttttttccaactttttatagcaaaacttaacttgttgacatgatgtgccacaccactaaaccattgtctagtagctttattagagtatatatgtatggtacaactatgtatactattttatacaataatatatatttaaaaaataaaataaaaactatattgagaggcatggaattatgggataacttactaattattttgaattgtaatagtctctgaattatcttacctctaattacatccaaatttaattcttgagtaacttttctaacgcgctctaaaagaagttttgtcacaaatattttaattaatttttgttaagtctcaattaaaattgaagaacaaaatcataatataaacttaaagtgatgtagttgaaaacccaaaaggtttcaaatagtatcaaaagaaaaaggagaaagaaaagaagaaaagtattgttattgttcattgaaagagacccaaaactccatagaaaaagttaaatgtactatttgaggtattttgtctttaagtagagacaatttgtctaattatcctaatggtaccaagtgggtgtccaatgggtttatgaaagagtccaaatgggaaaatggtgagtttttggagtgacttgtaaagcaaagacctttctccttagcaatccccactatcaccacactaaccaacaacaaaggttgttgctttgttttgttactacatgtttggattgttgttatatcttagcataataccaaaactttggccagctcttattctccttccacttcactacttgacaaataaaaaactcatctttattgttatgaaaagaaaaccaaaacaaaacaaaacaaacaaagaattcagatagagaagaaaaagagagagtttttaatatgtgtgtgtgaaggaaatgagggctctttctttcacaaattcctcatattctttctgaacctattcaaaagacaaaccaaatcaataatgacaaaatacagactctttgtattgtcgccaaagcagccattgaaaagtccttacaaaacaagaccctttctttaactttattattaaacctttttatttcttaccttctttctcagatttcatccaaacccattttgttaaagaggctcttttgattgaaagagagagggtttctacttgggtttttcttcaatttcaaaacccagttggaaaaatcatttcttttttctgtttttgagttcttgatcatcatcagcagctgggacactactcaactttttttctctggtaattttttctttcttttttgttgaaatttttagttgtaatacttctctagctatacatgagttttaatttctagtaaagattgtgactttatctaattttctgtttggttactaagaaaatgttaggctcagatgagaaaaaatgctgtcttttttcatttctttctctgttgatactttattttccttagatatgtgataaagacaatacccttttatcagattcatgaattgttatatataatagtcattgtcaagaaagaagaaaaaaagttgttgttattataatattgaaataaacatcataatggtttatgctaaaagaaagttttttgctttgtctgaaattatttttcagataaaccccttttttggtgctccttaaatggttggtgaaatgatcaaagatgaaggatcatcatctgtgacttcttcaccattacaattctgtcatttgcttccatcacctggtttaggctcaccatatccatggatgagagagcccaaatcagaagagagaggactttatctgattcaacttcttgttgcttgtgctaaccatgttgctgctggtagtcttgaaaatgccaacattggtcttgagcatatttctcaccttacttcccctgatggtgattcaatgcaacgcattgttgcttatttcgccgaggcattagctgatagaatgctcaagagttggcctggtttgtatagagctctcaattcgactaagatagtttcggtttctgaagagattattgttcaaagatatttctttgagctttgtccctttttgaaacttgcttatgtgattacaaaccaagctatctttgaagcaatggaaggtgagaagatgattcatatcattgatttgaattcgagtcagcctgctcagatgattgatcttcttcagacactaagtgctcgccccgaaggccctccacatttgaggatcactggtgttcatgaacagaaagaggtgttggaacaaatggcgcttaggttgacagaagaagctgaaaaactcgatatcccttttcaatttacgcctattgtgagcaaactagagaatcttgatgttgaaagtttgcgagttaagactggcgaggctcttgcagttagtgctgttcttcaactgcattcccttttggcgagtgatgatgacattcataaaagaaactcgccttcatcaatgtcaaaagtatctcttatgaatcaaagacctttaaaagattggcttgagaaagattcacatagtttgttaagcatgagtcctgaatctactctatcgcctttatctgtaactggttcacctaagatgggaagctttttaaccgctctttggggcctatcaccgaaggtgatggtagtaaccgagcaagaatcaaacaacaacggatacaccctaatggagaggttatcagaagcattgttcttctatggagcattgtttgattgtttggaatctacaataccgagaacatcaatcgaaagacaaaaggttgagaaaatgcttttcggggaagaaatcaagaacattatagcatgtgaaggagcttacagaacagaaagacatgagaaacttgagaaatggatattgaggctcgagttagcggggttcggtagggttcctttgagttaccagggaatgatgcaggcaactaggttgttgagacagagtcatcttttcagtggctataagattaaagaagagaatggttgcttgattatgtgttggcaagacagaccactcttttctgtttctgcttggagatttagaaggtaaggcttagaaatatttaacaagaagtttgttgacttgagtgttcttcttttgttttatctctgttgtgaattttaattttcttttttcactgtataaaggatcttaatcatgttcttgttctttactgcatagtgttcctcagcaaatattacaagaacattttcttttcaacttcttattaacaaccccatctttgttttgtttggtcaaacttgttttgaggaaattaaagaatgaaagtacataccatataatgtaactctatagtgtatgtatatatatatatattatatatatatatagggtagctagggtgagagtatcgcttttgtcttacaggcggtgtacattatagttacagtaggtatcctgcacgtgcaattcacagtttgaatctcatttttgacggagttaattatctagaatttattgagaacaaactgaggatgtctactattactatactcctgtcataataaaaaagtttagttaattagtttattactttttttacatactaaattttgaaaattgaacaattaactagtgtaatttacctatttgaattttgtttttgacacagtaaattatttcgagtttcttaaaaatagtccgagtttcttgaaaatagtcgggatgtctactattactatatataactaatttttttatatgctaaaaataaaaaatggtcttacggttgaagcaaaagtgatactcttaccgaagaaactgtttcttttatatatagataaaattagagagattttattgcaagtggtgaataatttaaaccctcaaagtcttactagctcgatccactgatttgccttttaaaaattctctgtaataatgtgaaaacatctgaatctttgtggggacaattagtggaagaagatatgttattactttttagtcaaaacaacatgaactgccattagtggaagctttaacaccttggcaatgatgagatttcaatggtggatgatgtttctttcttcttgcttgctatgattaaataaaccgaaaacaaaaacaagaacagaagaaaaaacatctcttaaaacagaatgagaaaaaaagcttaatagtgtaagacataaacgttgtactcaacaatggcgtctccagttttgacgtcaaaatgaatcgtgttagctagggcataaccacgggcgaacctaaacaagccggttcctccaactagtggcatttctctaacgttttcaagaaccggattcctcccaagaatactaatagtacttccattgtattttccttcaatgaatacaaaattcatgaccattagtagtgctacatcagtctttgactgtgaggcaagagaataaatcccttgtgctctaccgacgatttttgaggttggttctgctttctcagtcaatgcatcatcgaccataaaagtaactccaaagccggtgaggcccttagcttcgaatggcgattcaatgattttaacagcactcggtttctttccactgaggatgtcatgaaagtagaagtgaaggtggctcatcttttcggttcttttcatttgtttggcttcggttatgtattgcttagcgaaagctccattgatggagtggatcgaggttgtgatgagagtgaagatgaagaatagagagtgagtgagtaaagaagccatgtcaaatgaatagagagtaagtgtgttgaagagtgtagtggtaggctatgtatatatagaaagcaaaagcttgatgtgatgaagattatgaatgggaaaaaggtggaaaaagtttagaacatgcttattgaatcattgttgctgattcttaaagaaatagcaatacatgtttgtcatattttaataacacttgttagtgcaattcgaaattcaatttttaatggcttgtttgtttgtggtaaaactatctaaaaccaaatcatgcatctttgtgtgttgttgtatgaaaacaaaagccttgtcttgtaggcttgtctccagaatctgacattgctttctttgaactttttgattttcaaaacattccttcttttgaaaaatttactgtattattactatgttggcaaaggtcttgcaattcggttgttacccttacaagttaggtgtctaatagtatcttgtacatctttttcgaagtaaaggggaccggggagaaaactagtagggctgttcacaaagtatctgatctaatctaatgtgcatgatctaattcaatctaatatgcaaaatgtggatatttacacttgcacggattgaaaaatttaaaatttgtacttgtacggattagatgttgtttgactttaaaaagtaagcgattcaatccaatttacaattaattatatatattttaaaaaattataatatataatatatattaattttctaataatattaaaaaaaaaaatacaaacatcttatttttaaactt

SEQ ID NO: 300813 - DNA, 3566 bp, Cannabis indica
tttttcttgttacacagattacaaagttactatcattcccactctcactccgactcagacagatgtttggcactccccttcgttggactgcatcaaattgaattgtgatgctagattagggttggagtttaagtgtattgctgttgttgctagagatcactaggggacgttttgtggggcggccactaccagacttaatttttcagatcctctttgtggcgaggctattgcttgttgcttagctttagagaaggcggcggagaagagctgcgaatttgttattgttgagagtgactctcaggtggtgattagctcttttaagggagtggagtctcgatggaaaatcgagaattactcttggcattgtttaatcacttctttatttgcgagttgtatttttttgtttttttagtggtggggtcaacctgaagaccatgcaatgcaatgcaaccatattggtctcagtaccgtactaggcagtaggcaccgcacagctctgctgtgtaatttcatggactgaggattggcgtgcgaagaggctagacagagtggactggtttataaaacgaaaagagaaaaagagtgagtgagtgacacttgacagaggcagtggcttactacatttatctctattaatactgtctactcactcaaataggcccatacccaatactcagtcacacacacctctcttctctccttttctcccttcttgatcctacctctgctctgctctcccgggttggtttctttatctcacttttgctactaaatcctttaatttactttttattttcaaagtttttattctttttcttttacttttcatcatggattcagtttcatttctgcacatatataatgttattacattttggattttgggtttttgtagttttattaaattttgtttctacggaaatcatgattagtctttcatcatgaatttttcttccttccctctttatggtattttcaatcatggacttggaatgagactttcttcttctttcatttccacatctcttttagtttctttcttctgatctacctccatcattcaaactttgtcatttcccacatgatgctattttcaaagtaatatatgtattgtacatagtgagtgagaaaaacctaaactgatacatataatataaaagtcttcatgttttgaagtgagctaggttactaacttggctagttctttcactgtttgttctgtgctgtgttattgttttcacattgtgttataggaacttacttgcaatgtttctagcttacaatcgttacataattcacagtataaatatatatatctgaacctgaaatcttcgtgcggatgtgtgtttatataagtttgttgcttgatggagctccccacaccacaaagacctaaactgccttcacgtcagcctctatctgctgctgaggtacctgttttacctctttcgcgcgcgcgcgcacacacacatatgtacatatatataatcttattacttaaaacaccatttcatttgcatttgcagatggaaatggtgaaaaacttgtgtttgaaaataaagaaagcctcagtggcagcacaatcacggtttaaggacagtgtgtacgaggttgttgttctccatttgatggtgcgtggaatgaatggttgggggtattgataaagaaatgaattttgggtgggacacatcattgtcttagcccattccattaattacattggctttaatgagtcttctgatgcttgcttttagattacatcatgtttatataactcacactctatatgcttgtgtgagtcgttaccttagtattagtgatgctgatgatactgatgaatgaatgggctcttaataagtatcaaattgcactctacctacctatgtctcattctacgccattttcatccaccttctcaacctcatctttgagttactctactttaattagtatttgtctttaattgaactagctttgaatttgaaccttattcgtggtttattttgtaggcatttacattacatccattaactccatgtttttactcaatgtcagaccagattgggacatcattttatttagaactttatgaccaatgctttaattctttttttttttttttttttgggttgaaacaattttgattagaggtgtttataaaatattaactcgattactgtatcgactttgaggttttattgttacatatacacaagtgtatatatttaactggcgtgtcaaatttgcaaaaaaaaaataaacataagggagttttgccacaaaaaaaaagataagtgggtaagtgtataaaagttaaaacataagggggttttgctacaagaaaaagataagagagttaagtatataaaaattaatacataagggggttaagtgtacgtatcatctaggtgttgtaaataattcccctgcatgtaggtgtcttggatgtggctgactaaatgaagataaaccagtacttgttgatgatataatgttcttagcaagtcgtgttagcaaaggccaaacatttccttttcagaaatttattctgtagcgatcatatccattatttggtaattttgcacctttcatccaagagccaaaaaatagatcatcatcattcatgttgtccattcactccataaaagagaaacatttctcaaacagatgaccgagtcggatgtactcaaagcaaaatttaggtaagtgttcttagtgaaagtctatccaaaattcatcacttattttaggcaacctaatcgtacgcccacgaagaagaggtttagtaatacaaatcttaacacgaaccttagtccccaaccttcattagtggaatcctcataaacttcaacaaattcgccaataatatttctaagagcctctgctagttctcatgtcttactcaagaaaagtaaacggtaaatctggacccaaaaaggtgtatataccatatcatccattgagacattttgtagaatacttagtgagtgtaagacgataatgtattctgagaatgtcaaggctctttgcgtaaaatttgtcacttgcacatccaaaagcaacgtgaaagatgtcatcatcataagtcgaaattgtaaccgggaatcgaccctaccaatgttcaaacatttagtcaagaaaactcagtttgtgcacgacattgctggttatgacacgagcaaatatcacatgagcagagcataagtccattttatttattaaaacattatttttttataactacacctaatttatttcctaaggtgggtcttatttgaaaaagaaaatacaccctacacttagttttttcttattagaatttcgacggtaaaatcctccaaactactgaatcagtagcaaatttaaggtgtcattcagctaactgtcattatgggttgcttatatgtactattgtacaaatgacacatttatattggtacacttaatattattatttaaaaatttatttttaaattaaataaaattataaaaataaaaataagatattttaaaaaataaaaatattataaattttgaaataattttcatttattgatctatgctta

SEQ ID NO: 300814 - DNA, 1776 bp, Cannabis indica
tttggtatccatcttatcattttaatattatttgtgattttttattggaagattttctaaaatttaaagtgtttcatcaatttttcagttggctagtgaatttgatttatattttcatgtagttaatttttaaatctcaagttgtcagagaatttgtatattctattaattggtgaagataatcttgattgataagtacacttttatttttgccaatttattaattcacatttatttttttattattacagcacttgaggccaggaactgcataagttgtccattcagagtatatatacttgatgataataatgacgagcttattaacacaatctcacctaaaggtaaaatactgtttttttctttttcctgtgatgggttatcttttgcagttaatcattttacctggttttactctgaataagaaactgaataattgtaacctgcttttattgtaggctaattaagattcttgccccctaaattttgacacgtaccaaatcatgacctcctgaactttttaagctgttaaaaaattccctaaattattgaaattaattattgaaattgttagatttaaagacttttgtctaattttattcaattttactaatatgaagattgtccatatactaaatcctacccctcgaactttgatatctactaaatcatgccctcaatcttcaaaagtataaaattgcgtcttctaaattttcatccacgtcagactttgtttagtaaaattggacaaaaatccttaaatttaacaatctcaatagttcggggaaaatttttaacgacttgaaaagtttagggagcatgatttgatacatgtcaaagttcaggggtaaaaattcaaattagcttttattgtattgtcaatgaatgtagtactaaaaccattttaaatatccatttttcagatctcgaacctcctcgtccgaggccaaagacatctgcaagaactgcgcagaggctgattgcgcagggtatgggattaaaactaccttcagcttcatttggttcaagagaattgagaaaacaggaaggtgataggaggaaccgcattgtgaccaggcaaagactaaaagatgatgcttggggagatgatgaagattgacctttttaataatgtatggccatgtcttaatctttactaattaaaatttcttttgtaaatcattcctttcacaattgcagatttgtggtgcacaatcatttttatttgttgtctattatttattttgtggtgaggttttgaattattattggggttttttttgggagggggaaccgcttaaagatgtgttgatgagacttttatctatctttgctatttataattgacatgaaaatttatattaatctcttgacatatcatagtccaaaatttgtttaaaaggttaaacacttgttggtaccggttaatggttagcctttatttgtgagattttgatatttaattccaatgataacaataatatgacactttgtagtttgtaaaagtaaggggggtattttggataatgtaatttgcaaaaattaataattagattttttgttttgttaaataataaattgaattttgtattttttaaaatagtactaaataatactttgaattgattttttcgtaaaataaaaataataactcaataaagaagtgttatgaaaaagctgattttgtttttttactattcatttgtgctagaaattatcttcaagttaattatattaaaaaattaattgataaaaattgagctcagagttttattt

SEQ ID NO: 300815 - DNA, 2015 bp, Cannabis indica
aagaaaataataataaaaatatattttaaatatattaagtgaaatttaaaaaaaataacaatagaaatatatttttttagatatgtctagttaaatttaaattcgaattataatgtttgaaaaaattacaatttttaatttataatcacatttaatataagtataataggaaaaaattggtaatgttattgtaattttatttgcttaatttatttatggttccaattatataattaaagaaatgttaaaagatattatttttatgtgtcgatatcgttattggtctaagtatttaatctcctataatttacaatataataacttataaaaaatatcgctagttaatatcattgtgcatgtctataaatgttaagcatggctggtgctcatcaataacaatggtgatcaattacaattatatatatggttatgaaaattgaatagaaattaatttataaagtttcttaggagctcagtaatctatattttttgaactgtatatatatatatatatatatatataattaaaaaatcattataattaagtatgtgtaatatggattaaatgcatgaacgctaaaaagttggaatattaattagagaagtcacaatctatgaattatatatggatatatagccggcaaagaataattctcaaatatttttgtttttttgttttgtttgacaatgaataagaaaagttctctatgtacgtgtaaatctaataataatattatttagagacacctatatatatagctacttcgtagaaatataatgagttcaaacaaaagtgttttctggtcataaaaggatttgggattgtaattaattaactttctctataattgtttgactaatactaatatgcatatatggattatatattatatccacaatattattagtgcaaaagtgagtgatccatataataatttgtgtattatataaattttccactatcgccgctagctccttaaaataaataaatatgtatatcataattaattagaaaacataaaaaacgtgtaatacttaatatttactattagtactacacgtacgctccacgtattacatataaaccacactttttcttggcaagcataatactttttctaattagctagctatatatatataacaattctaaattatcaattttttcaccaaaaacattaactcaatctagtttaattaatgggtcacaaaacatatatatatatatatgatgatcatcactgatcatgatgaatactactaggtccaaccctaaaatatagtgggacatacgaaaaataattttttttaaatgagggaaatttttatattgagcccttaatctaagtgggtgctagatacatgtttaactagcttatgcctaatgtcgggtctgattagtagttattattaaataaagctaagattattagtgttctgcatcataaataaatatgtttgtcatattgttattagtatgattaaatattagtaagatattaagttctacccttttggtatttaggcatctcgatttatttagagtgtctttcaactgttgaatgtgatggattgattgaaaaaatgactcaaaggattaaaatttggagcataaagaatttatcttatgctggaagaacaacaataatcaattggtactgcacacagttcattcatattgagctcaaattatgattttgcccaaaaaagtgttaaaaaaggtgaatgtaatttgcaagaactttctttggaaaggaattgctgaagcaaattgtgctggctatgtagcttagaaagacatgtgtaaatcaaagagggaaggtgtagcggtataggctttcaaaatactcagctatggaatgaagcagcgattggtaaatatgtttggttaggataacctatgggtaaaatgggtacatgccgtttatttaggtaataaagattgatggacttatgaagctcatagcaacatgcgtatatgaggtaggttgtaacaccctaactaatttaggcgt

SEQ ID NO: 300816 - DNA, 2592 bp, Cannabis indica
cctctccttttgtagtaggtaaaaaagatgagatgtgaatgaggaagaagaagaagaagaattggaaaagataagagtatgggtgtgtgtgtgggagagagatggagagcctgctctgtgatgagcttcttgtaaaaatctttcaaagactcccactaggttcatgttcttcagtctctttggtctcaaagtgttggctccatctgtatcgtacttctaagtccaccctcttcctccaactttctattttctgttactggttcttttgttattgttttaaggttgttttactaatcttttctttcatttctttatcaaattttcccaaatattattatacttctctatataatagttttggaaaaataataaaatttgtatgtaagtattttcttcaatatcctatgctccaatatatattcaactttcctccattgttccactattattttttaattgttctgcttctttttagttttgatgctttttcctgtaagttttcttgttgtgtccaaactcccaacatttggtgcatttgttaagttatttttttcccagctagcttcgattctcttttttttttgtcttccaaattttaccatttcaatgggaggtaagaatattattgttcatgattttttatattctggctacctcaaataaatattcagtggttggtttaacctgtgtaatttgaaaccaacatttgttcaacatacaaaagaatagttgaaccacccaaaaacaacattagaaaaaccatgacagtccaagtattaatagttttaatgtttctgcttcatctcgccagatttaatggttgttttttagctattctagtgttgctgtagtggttttgtctgtgaatgtgaaagatggagatctcgttttttattttcagtatttacagtataaaagaaaaaaaaagaaaaactaaggcaataaaaatgtaaaccttcatccaaaatccggtatatttttgtaaatactcctttaatataatcttgcttaccatttaatatattttattttagaatctctattatggttcaaaaaaaaaaaattaaaaataaacacaaattaaaatccttatattaaaataaataaataaaagaatatagcatgtaaaatgttgcattgatatgacaataaaacacaagggcctaatatgtaaaattaactttctattagccatgtagaacagaaaataagataagagtcaaaacttaataacaataatagtttgtgggaatactaagcattattaatagttcacaaacataagtttttggataatattttaagggaaaagaatctatttatttttataataatttgtgccaattttaataataataataataataataataataataataataataaggataatagcttcaagtatgatagatttatcttttcaaataatactcaagaaatatcttaaaaaatatataaaatttacaactaaaatgaaattccttgaacttatgaaattttcaattattataaaaagcttgccctagttaatattatagacaactacatttttattattaactattatagaaacctcttaaaatgtttgattttcatacaattataaagaagagcaaaaaggaaaaagaaagtacactggatatataaatataatatagctccatttgaccacatagctatggaaatgaacttaattttctttaaaaacaaaacaaaaactatcattgcatcactaattaaatttgaattaaattgccttaaagttttgtgctggtttcaaatgattttctaaatggtaaatacaattggtacatatagatactttaaagtcactttaatgaaatgaaatttacaaaaaaaaaaaacattttgggcctaagtgaatagttcattaattaagtactaattaattataagcttgattttccgtagctttgattatcttattattctatgagagtaaaaccaaggagcattgatatttagactttcatgcccaaaaaataggtcaagattcttgaatttaataatattgtaaaggaacatatgaaattattaataagagataatacatgcctgtgtatgcatactacaaatatttcattgaattaattagttagacttagtcgtaatttcatttagaccttgttaaagtttttcatggtttcaaaacatggctgaaaaggggtgttttatgatttggaactttaaattaatgtcatttatttgtttatacaactattaaatttctatgttactcattacaaatattatatgtgatcataggctaataactgtaggttattggcttggccacattgttaatttcattattgacgtttgtttgagtatcatttttaatttattctctccctctttgaaaatctcatcaatatttagtattaatacactcaaagtatcatatttgaccaagaaaaaaaaaatagacattcatgactacaacacatttagggctcgtttggtacgccatattgtattgcattgtgttggattgtgttgtattgtattgtattgtatattattcaatacaatattatatttgatattgacttgtattatatttgtatt

SEQ ID NO: 300817 - DNA, 2535 bp, Cannabis indica
aataataaggaatattttttttagtgtaatttttggtgttgtggttggagtagaaataatttttgacaccaaatttggtgatagtgtaacaccaaatttggtgtctctttggagatgctctaacacaatttaaacccatccgctagagatggtctaataaagagttatgccacaaaatgaccttgtagtgatacaaaagatgacataatcaaaagaaaaaggtgctgttggaaatcaatttgttattctgttactcaatgtcatctataatagtcattttatatattcaaagctatagctagctactaaacatagcctatatgaatatgacccctttattattggtcaattttagtttttggtcaattttagttaatattggattattactttcatctaattctatacttggtgacttgaatgaatgaaatgacagtgtgaatatgactcatatagccaagcactttttttttttaactattttattgggactgactaatgattataagtaaagacatttcccaaatttaactttatacgtcagcactttgaccatatgctaatgataataatcataacaatgatcattctgtgaaacacaaaatcatgaatccagggactttgaatcctgctcacaatcaataaaaaaaaaaacttcaaaatagtaacacatttctcattattatcatctatctactagttgaatccatcattattatatatttctagtgaattccctatatatatactcttgaatgatacattcttttaacttaaatgtttttctttgaaaaaaaattaaaattgtgtagcaattaatttttccattcattgtgattcttatccagaagaacatgtataatacatagacactacaacagtatgtatacatattaaaaagaaaaggagattttttatatttacactttaaaatatatatattttttttatatttttacagaattttacatggaaatttttagcgttgcaacttaaatcgcaacaaaaaatcgtgtagcaacccatatagaaactactggataaaccactttaaaaactcaaaccgtaaatttaaaaaacaaattaaaaaaacagtacataagataattctcttaaaaaaaaatcaagaaaaaaaatataaaaaattaataatttaatatttaagtatctttactacatatatgagtgaaatttaaccaatttcagccgaaagaagatttattttttgctgttaatttcagccgaaaagaagttggtaggaaaaaaaaagaagaagatgtgtttttttttcctaaaagatttgaaaaagaaaaagaaaagacggctggtcaaggaaaagtgattataataaggaaattttatccgaagtaaaataattgcactgtaactgaactttctcttttgtctccaattaatatcaatcatcatttcttctctgcatatcataaatagaaaaactgctatagaatagtgctattgaatgattcatataattaataaagaagaagatagaacaagatcgaagcatggtttaattaaataattctaccaccaacctttgtcactcttctttatatatatgattataattatatatatttgtccttttatgatgttatattaacaaaatactcaattcaacaagtttatttaagttttctttaaactattaaatatgatcaatatactaatccaatacttaattatttaattatgatatcatccaatctaaattatataaatgttgttttcctcttaatccttttctataggattattatatatatgtacatatttatctgtccttttataatgttattaatacactatgttggataataactctcatgataactttaggtgccataatgttacaaatataatggatcataatattttatacaatcccttgtaagttttaattacgtaatattattcatttccattattatacacatgcttgcaattgatgaactctctctcggatcctaattgggtcttgatcatgacaaaaaaacacatttaatatagcaaaacttgaaaagaatcttttgactaaaaacaacatatataggttatgttaatataacttaagaaaaaaaggtgaaaagttcttggtatatgcaaagactatttaattcatttttttttttcgttaaaaagaggtaaaataattataggattttacagcaataaataaataaataaaagttagaaagtgaaagggatacgtatcaaaatgtaatcatgcaaatgagctatatataaactttgaggtgatatagatgtttgtcactcactcttttgaactaataacattatgtacatatacatatatcaatatatatatatatatttatatatatataatcagtgagcttttagaagatttggcatcattttattttcggcaattaattctgaaattatgttttatttttatatattatagtgataatagaaattacttatttttaagaatatatgaataatttataattttgaaaataaaattttaaatagtttttttttttt

SEQ ID NO: 300818 - DNA, 2939 bp, Cannabis indica
gagagcacgtgactccaagtgaaatttccagccgcacccggctgagcaggcagccgaagccaggtgtggctattgtattcggtttccacgcacaccaaaaacaaaaactctctcctttcatttcccgagaaaatcctaactctttttcccggaaaatccaattttaatggactccacaagaagaaagcagcagctcccagccttactttcttccttaatctcacagctccttcttcttcttctcctcctcttctcttcctcaactcctctctccctcgattcttccaattctgatcacactttttcctctctcatccatcgtttcctttcttcccaagaaattgccgccgtcttctcccattttgccgtttcccgcaaacgaaagagaacccatttcttagacctgaattccgaccctggagatgaaatttcaccaggaagtgttcgacatagtccccttcggagcccagattcgttcaggaattcttttaagatgacctccgagaccttcgagtggctcgctggttctctcgaaccgttactcgattgtcgtgacccggtcggttcgcccctcaacctctccgccgagcttcgtctcgcaattggtctattccgactagccaccggctccgattaccagacaatctctactcaattcggggtttccgaatgggtcgcgagattctgcgccaaacaattatgtagggttctctgcactgatttccgtttctgggtcaacttcctaaaccccaatgagcttgaatcagtctcttccgccttaaatgaaaagactggtttcccaaattgttgtggtgtcatcgattgcgcgaggttcaaaatcgtcagaggtaatggaatcaaagaacagaatgacaattccagcgaagaaacaatcgctgcccaaatcctggttgactcctcttcaagaattctcagcatcgtagctggatttcgaggcaacaagagtgattcaaaggtattaaagctctcaactttgcataaagatattgaagaaggcaatctcttgaattcacctccagtttaccttaatggggtcgccatagaacagttcttgattggagataaagggtatcctttacttccctggttaatggttcctttcgaagatgccattcctggctccagtgaggaacatttcaacaaatcccaccatagaattcgagtctctgcacttcaaaccattgctagtttgaagaattggggtgttttgagtcaaccaatagaggaagaagctaagactgctgttgcttatattggtgcttgttcaattcttcataatgctttgttaatgagagaagactattcagctttggttgatgagtttgaaggtcactctttcattgaccaaagctgttctcactctcatggtgacactagttttgtggacacttcgattgagctcaaagcttcagttattagaagagctttggctacaagagcaaaagagtttcatgattccaagcatcactccatggtaactggtttcttgagtttggaatccacttaggaaattgctaagacaacactacctggaattccataaagaagcagctaaattcaactctgttccacattttttgtgattggtaactgagttttttcttcttctttttctttttttctttgccatcttgcttagatttttttaatgccttaatttttcactttaatgcttcttttttctcctactttttttcaagggtagctgtagcatttatattaatttatttttggaaatttatttagtagaccaggtattttggtacacatccttattttttcagtatccagtaaagtttttagtctaatttaaatagtttacaataccgaaaataatattcaaataatttttgcttatcctaattctgaaacagaacatccctttagaggtttactatatttttccttttctgattttaaaatgcagtcagattcttaaggggagtccataattgagatttttttctcaagattttattcatttttatcatgtaataatgttattttagatttgccccctctttttgttcaatggaagattgtcttgttttatgatacaaacaattgtaaccattcatataacacagaacatgttctactaaataatatggatagaacacatgtgaatcgctcttgttactagtgatgatcacaaaaccattatcttgagtcacttttctctttcttttcagttattttataatagatgtgaaaaaacatgtgttgatctagaaaactgattatataagaatttaggaagagaacgtttttttgcagaatttgtaccaaacagtgacctcaataataagttactattatatattgtagaaattaccagtaagttacaagtatcataatagctttaactacaaacagaatgtaaatttaaattaaaaaaaaaaacagatttcaggaaggggaaattgaacaaaatattcatgattaacgaacttcttgatgagtctttaccataaaactggccttcgccattgatgacttttcgaactcataacagacattgtgaatgacgtcttctattctcttgaatgatattctcatttacaaccaatatgtgggaagtcactaaaaccatttagctactatttgtgaagtactacaacaacataagttgtatgccaatttgaagaaatgtgagtttggaaaaacacattgtctatttggagcacattttagggataagttgaaaaataccacttttattaatcaattaatcaaatttatctctaattttatatttaattgaaacatacctctttttatatatcggacccatcggaccccaaggtccgaccatcggacctctttcttcctctctctctcaaatcgcagaaaaaaaaaaaaattaaaagacggggaccttggggtccgattaggtcggacccatcggaccccaaggt

SEQ ID NO: 300819 - DNA, 2032 bp, Cannabis indica
ctctctctctctctctcatcagtgacttggaggcaaatttaaagcaagctaagcaggacctcaaagacgcggagcgaaagcatactcttttatctcaagaatatgacaagcaaactcgccttctagatgataagattgtttctatcgccactgtagagaaggtgaaacttaattcaaattttgagcagaaggtagaggaagttgagaaggatgctcttaaaatggttaaggaaactacatctaaattaagctctaccaagcaaatattggcttaagaacaacatgctcgtgaagaatccgagaaaaagactttagagttggagggccaaattcagaaaattactcaggagaacaagaccaggaggctaggacgtcgaaagtgttgaagcaggctttcatgtattctttgaacaccatatgggaacttaacaattctgtgatggattttctagatgatgaagatagagaacaactgatacctcaagtccttcaactagttgaagcagaagaagccaagaaagcagcaaggacatcaaaggttgtcgatcttggaacttcccccctggagggtgagaatttggaagacccaactcatccgactgttgacactccttccatggtcgattctttagtcccgaaagtctctactgatattcagccagtcgatactcagccgccaactgatctagctatgccttaactgatttttaaccaactcatactattttttttaatctttgggggataaggatcccttttttgcatatgcggacacaatttatatgcccttgtcatggagcttttaagtatgtgatcgcactttagatatttgcactttttaactcctagagatttaagactatacacatgtttggaaaaatacaataagcaaagcgtgctattcttttagtttaaggtaaaatataaattattttttaggaaggctaattaattaaagagacaacctaaaaatataattaactatttttttaatattttttattatatataaataatattttaatatatattaattgtaattgaaatggattagtttttcattaaattttgaaattatcattcaataaccgatctaattcaactaaacattcaatccaatctaattataatctaatatttaattttttgtaattagattaaattagttcggttcaattggatcagattagatctatccaattctaatgcacaaatacacttataagaacacaaggttaatcaagagtatgaattcttaaaacaataaatgactgaaaatgaaatggacaaaaaaacttaacgaggttcaatcacaaatcttagttaaaatttagatttagtccccaagaaaaagtagctctattggttgtgattttttttattgataatggtaattacaatctcgaatcaaagacacagtttttccaaactacagggattcatagctttacacaaaatctcatctaaggctactcaatcaaacacatgagaaagccttttacaacccttaatttcactcatttaactaatagagagaattcatctcattacaatgtgtgtctaaaccttgattacttccaaaaatgagtcctaagactctattatataggactcgggcaattaggaaacccaattgttctaactacctttacagttgcttgatgattaagaactaagtaagctaaatctcacaataaataacacaagaaaacatatatataatatcagttgcttttggttccatgattcaattatcttttttcattaattaataaactttatcattaatgagttaataggttcatttagagaaatagtaagtagattactggtaacattctccttgctattatactctaattaagtatcaggttccatataacttaaaaacaaataaaaattactaaaatgtactactggcgcctaacatttttcgagtttcatactgctatggtgtaattagaatcgagtctaagataattaaaaaatagcttttaagaatatcttatgcaatcgtagggtgccacctata

SEQ ID NO: 300820 - DNA, 2427 bp, Cannabis indica
aaaaaaaaattaaaaaaaaatgggttttaaatagttgtcccacatagaggacaaataaatccttttatttatactttcttatataaacaatcaagctccatttcaaaaattaatattaaaaaaattgaagcaaaaaatttataatatattgttagaattcttaactatattctatttataggtctttataagtgtttcaagagataccgtgatgctatctctttaaagggttcatcgagaaagaatcatttatgtataagaattggggtaaattagccattttttctagttctagatttgtaattttttatatatttctttgaacatatttaataaataaataaaatttcaattttttctttcaaaatttgaagaagcatttaatttagatttaaaagaattgtgttattagggatgaaaagaggtttaggttgatgaaaagaatatgagggagaagtctaatagattttgtgagcaattgtattcatatctaatttaaaatgaatataagcattttactaattcttcaatacataatgtttggtaaatttttcaattaatattgataggaaaacttatactaggtaaaaaggaagataacctcatttttgaaagatgtggtagagttatttacatttgggatttgtagtactagtatctattctattgtggaattttaggctccatttcgaaataacatggatggatgaggattgaagcaaattgtgagctgatcattaaaggtaatctcatgtacaattaaacttggcttagtaataccattttggccaccccatctaagggaatatcattttcattagtatcagattctaatattattgcataggctaggcaagagttgcaatgaactaatccaaactaaccataaagtatatccacaaaataactagaattgattacttgtagttaactgaactggctccccaattttattttatgcagagttgagcttctgtaacatcaacatccaacaagtaaattcttgtggtaaactatgtgtgaacctaatccatagaatctcacttgcaattttgatataaatcatgcgtgttcatattatattatattcatttggcttctggtgcagtctcaatccgcactgcagtactcgaatccacaaatataatttacttaactgaccaagacgaagaacgctctaagcaatggcaaagaagggaccttcaaaactcaaccagagtaatccgattgatattcatggtttaaggctagctcaaaaagttgggtggctaatgtaatacattggaaattaattcttatacaatggaaaaacaatcacaatctttataagcataaatttgaattgaagggcccagaaagcaattgttgctataatcacaaactgaggggcacaccctattactttaccccattatatctcccataccatcagatcccttggaacaaaatctttttgtcggttaatgtaggaatacagttcaatcttattattatattattattcatcactcatttaactcaatttagtaatttcaaggcccactaatttcatcatcaatatttattataccttaatcaatctaaataaattaagaaaataatttcaaatccaatattattataaaataataataagaataaatagtggtataaatacttaaaattttaaatttgttagtagcacaaatccattaaattatttagtggctgtttacccaaattttgacgacgatgacgtgtcaagaatagcaccacgtggcacaaaaataccgggactgaattaatgaagaaggagtgacccccccttctctcaagttgaatcttggggggtgacctaactatgatggtggtcatccgccctcagcgagagtcttgggggtgttaccctcaagtatgggcttaatcctcaaaggtggttgacgaccatgtcacacccataaggaacccttgtcgtcagtgactccttcaaatgttcaaatctcgcgaaaggctcaaagacagttgtcaacccacgaaaatagcgggatattatcctaaatatcagactccaaccgcctccaaaaatcaaggagacggttgagatggttccgcgttggtcgcgtctcctaaagcgagaagcatcgacccccccccctcccctatataaggggtcacccatgacttgggagggggatccgcaatctgaaatacttagaaaacacttctcattctttgcaatcaagagcatgttcttgactattgcaactcagatcaataaaactcaaggggagtaggctattaccgacatccggggccgaacctctttaaattttggtgtcttttatttacatttattacgaattccggcgttattaattgcatttattattgtgattttggttttaatctcatttattacgactccgcgtcggttggctaaaaatccag

SEQ ID NO: 300821 - DNA, 4663 bp, Cannabis indica
atatatatatatataatcttacacaaaaatctaatttttttttatcgctcttcaagagtatacgagtgtatatatagacaattgattattcatttaatggtgcagataggaagaaatgaaagaccattggatgggaatgatgacacacaacgttcacctaaacaagatcttagctctgagaagcaacaaaaggtaattaattaaattaaatctcagtattcctaattaataaactcaactgtaatctagaaattattattagcttattaacaagaagaagaaaacaaaacattttgatataatattcttaattttctcattataataaataatatgtgtaatatattatgccgcatgaaaattaaagctaggtatatattaattatatagttattattaaactcggtaaatatttgctaataaccaaataatgatatatatgttcgatcgagaagcttaaccattatttattgaacataattaataataatattaagaaacaaaaatgattgataaataatattacatagtacatatattcatgattaattacatcaaatatcacaattacaatgctttgagcttaatgatattatattacattaatattattagcagtcaaaattaggcggtactaaattaattattagttatccttatatgatcatagattcataatttgtatatttatatataagggccgggaagacttagtacatgtaagatagatcctaattaatttcttgcacatggccgctagtataaatataaacgatatatagactacatataatgatgataagattctttttctgttagatactttttaatattattgcttgactttcttataattattacgaattaattagttcttaatttttcaatcaagtatatatgtacattgtgtataacgtatacgtacatatgaatggtcaaataggtaccgcggacgacgacagatcacgtagaaaggtcctctacctcgattgaacccaactcaatggctgctcctataacttcaataacacaaaataaagaacaggttaattacattaacatgttttcctttttttctagtatattttattgtctttatatagttttttcatttaaaatgaatatatggaatattgtaaatttccaatttaaccaaattaattaaaacaagctatagtataaatattataaaagaaaaatctttgtgtctggtcattatggttatgtttttgtaaaaattacatgcaaaaccatttttctaaaattcacatagcataattcatgtatatatatatgtactatttaataatgatatttacgcaaatttttatataattaaagttatatactttaaaatagttaaggtgaagcaaaacacaatatcaatatacaaatacaactatatactgatcacaaaattcaatatataaattttgtatataaatatacccatataaaagtcaagtataattaaatatttaaattattattctaattattaatattttgatttttgtaggatgatcagcttgaatctagcaaagctgaattaggaagaaattaaagaaagaaaatcaaaggttagaaaattatacttgaagtaaaataatgaaggactaccaaactcttcaaatgcaattcaacaagcttgatcaagaagcagctaataagaagaagaaatctactcataataacaatcatgagaataatctcgaagctgaaattgaagaaagtgatcttatctccctaagtcttggaagcttttctaataataatcctaccaaaataaataattttatggtgaaggaagagaaaaataaaaatatttccaaagttattgctggtgatgatgaagaaggcctttctcttggattggagtacaataaatatcatcatcatgatcagcaaggatcaaagtcctcagctggtacaggaggagaacccgcggtgtcaaaccctagcgcggcgagcagctttgacgagcaattgatgatcaacaaggaagaagccggcgaaacttggccgcctagcaaggttttgaagacaacagccgtgaagagaagtgttacagaagatgaggtttcacagcaaaaccctgctaagaaaacaagggtttgcgtaagagttcgatgtgatacccctacggttagtatatatgtattcatattattcaatatccatgtcaataccactagtgcatgtaattattaattaagtcatttaatatgcatatgtgtgtgtgttgtaaatgagcagatgaacgatggatgtcaatggaggaaatatggtcaaaagattgcgaaaggcaacccttgccctagagcatactatcgttgcactgttgcgccttcatgtccagtgagaaaacaggtgtatatatataatagtttattatttagtgtataaacaagaaaatatagttttacataaagttctgatcacattataatagtcaactacgtactattttcctaatatttctcaaagtaattataaaataataaagcttaattatctatatttccacttaaatattcaacttttctcaatctgaataattgacaattattgtctaataaaccccaagtcaattccaatttgcataattaatgatgtcacatatattttaaacttaaattatataatgaatggtgtccatatatgtgtatatttgtatacatatataacaaatatatttgcattaaatttcaggtacaaagatgtgcggacgacatgtccatcttaatcaccacctacgagggaacacacaaccacccacttcctgtctcggccacagcgatggcttccaccacctccgccgcagcttcaatgctcctctccggttcaacaacctcctccaactccggcaaccacccatcttcggccaccacctccgccaccgccgagctccaccgctttacaactttggacagctcaaaatggaaccttattaacaacaaacaaactactttctacttaccaaactcctcctcaacaacctcctactcctcttactcatcttctcacccaactatcactcttgacctcacttcctccaattcctctcctcttctcaataaattttcaaccacaacaacacaatccccaaactaccctcatcaccaccacactctctatccttcttcaagtctaagctttggtcccccttctaataataatatcaattcttctgatcaatactccaattccaatttgtcatggattaacaacaacggcttccttaattatggatcttcttctcaagtactaccttacaacacaaggaaccaatcacttggaaccctagctactcttgcaaataaacaaaaccctagtagtactactactattcatcctactactagttccactcatcatgttcaaaactacaaaaacagtcccactgttgctccaactgatcaaagtagcaccaccattgctgcagcaaccaaagcgatcaccgcggaccctgctttccaatcagctttggctgccgcacttacttccattatcggcggtgccaggggaggaggaggagataataataataataataacgttgatttagctcagaaattaacgtggggtagtggtacttcttgtacggatcattatcctcgtaaccagcaacaacaactacaaagtagtagtagtttaccgaaaggaattaatggtggaaacttgacgttcttatcgccaaataattcgatgtcgttttcttcggcatctaagagtagtacaactgctactactgcttctgcatctccgcatagcgatcatcacaccacagaccagaccagttaattcattcattactataaattacttcatttttaattgtctattaaacatattcggtgaatagtctgttcttttttttcttttttttttaatgtttggcttttttttcttccatttttgtctttatattaaggaattagttcattcgacagctagaaaagaaaaactagctatataggaaaaatattattaaactagtttacgacttccccatttttttatatgtataggtacaatgtacgaatgatgcatgtatttatatgaatacgtagtattatattcaagatgcacatgtttatatatataattattactttttgttttcatgaattgaaaagaaaattgtattgctcaacttcaaatctgtacaactttggcaccataggtcaatccctttacatcaatgacaaatttaattaattctttacagactatccacccatttactatctttctttgtaatttttttatttttggcaaaataaaattaagtctatgctttacatcagacttaattcttttttacaatggactatatatatattgtataggtgctatgattccatatgaactctgtttctgttatgccaaatgtcacgatccaagctctagatcgtggcagatatataatatctataacttgggtggccaaaggtcacactttgacccttgtagaaagataaaacttataaatgatcatttaatttatatcacaaaatactaacttaaaagtagtggcttaactcttatattaataagaaaatattagtaacaaaatcaggaccactcattaatacaaaagaaaaacaatatccccataattatgtaatcaccaaatggataaatttaataagtcaataaa

SEQ ID NO: 300822 - DNA, 2692 bp, Cannabis indica
tttacctctgtcacttcaatatactcttcatttaactattttatgtgtcaacatattttgagtacaatacatatagcatctttcaattaaatataaattaaaggtaaattcaattaagttataaatatttttcaatgtacttttttttgaatgaatgttaatggacatacgttaatttcatttatttcccaaactttgcttttgtattattattcttgtgaaaaaaaaaaaaaaagaatttcaccaccacctggacgaagatgatgtagctaaagaactcctcgtgttcactacctgggaaaagattaaatgatagcatataataacttttaatatcaaaacaagccaaaaacagaccacaagattagttgcagttcaaatcaaagtaaccgattgagcaaacccattaccaatgatgctctctcatcaaaaacttcagtcatgatatacctctctcatcttccacaggagagagttgagttacaaatatggccttgattgcacttgcacttgtcaatcgtctagtagtcactagattttgggactgtattagtcaatgaaagaaagaaaggaaaatgaaatgggaaagccttgaaagtttttctttccatctctagataatcacaaaataataattgaaaaaaaaaaattgaatgtacttcagaatcaaatccttctatatccctttacactaacaatcagccaaaagggttcttcacatgtctttgttttgtagtggaaaaaaaaaaaaaataatttcacctctctgattacacacagttggcttggttggttggttggtcctacccggcaaaaactcacgggctctattaggtggtgtgtacacagaaaatgtcttcttatattcaaaacacacatactcacacacacaaacaactcatggattcaattattttctttgctcttcttgttacagcatcattgttttcacaatcactagctagacaagctcgatcatcaactacacattatgccactcgaatcacagttgtaggagctgtttattgtgatacttgctcaaaaaatgctttcactaaacacagctacttccttccaggtaatatacatactagtttgttatgtattaatcatagatagtcaaagtaatggtttatttatttatttattttggttttgttggtgaaaatgatcaggtgtttatgttcaaataaaatgcaagttcaaagtaaactcacccaaatcagcatcacaagtgaacttcttagctaacacaaccacagataaatatggagtatacaaattggacataccatcagttgatggggtcagctgtttgaatggtttgtcaatggtgtcaatgtgccaagcaagtctcattgggagctcatctcaaccatgcaatgtgcctgttttaagaacctcatcagatgagatatcaatcaaatcagaacaagataatctctgtatatacagcttaaatgctctgagttataggccatctaagaggaacaataccttatgtggagttagaaagaaagaagaagacttagtatactcttccaagtgttttctcccatggccacctttacctcaattcaactttcccccattaccttttccaacattgccatggccatggccattccaagattccccatctctgttttcgccgccaccttcgccttcacagcctgcatttagtcttacagatcccagaacttggataccatatttttctccatcacctccagatagacatcagaaccaaaacccttagtattaaaatcattatcattctcattattattattattgttttgttctctatattattttccaaaataattattttcaactgtttattattatgatttgtgagtagtgctgggataattgttgatttatgcttattaacaaactgtataagcatatactccattttgatattatggttggtaataaatttgtgtacaaattatatttaattacaatgtataatgaagcattttactcatcctgctactgctaaaacatgtttcatcttaccttgttgatccttcaatccccaaagataatttttttttcttcttttcacatgttactcagtacgaaacataatcaattaaggtaaagaaaggcttgataagagaaatgctaaaagtcactaatggtgcctaacaccgtccgttaatatcgctattggttcaactaagtatcgactcccatataatttaatataatagtttttagagagtatcgctagtcaatcgtaacgtgagaagttactaagcactactggtgcctaatagcaatgctcttttgataattatttaacactagtcacagtagataaagtttctttttcattatagttgcacttgcgcaacttattttggggctattcatattaagaaaaaaaaaactatcgtgaatatatttgtcgttaggcccataattattttttcgacaaataaattcaatctctacagttgacctgagaattgttaaaagcaaatttctgctacctcaggcaaagcaaagaattcatgacaattaatttataaaaaaaaaattaaaaatttggtaaaactttaatttttagacaataggatagaaaagaatagaaaagaaacaaaaggggagaattcagcaaaatataggagtttaaatttgtttttataagtaaagaataaaaaaaaaataataataa

SEQ ID NO: 300823 - DNA, 2307 bp, Cannabis indica
ctagtcagctttgttcctattacaaaaaaaaaaaaaaaaaaaaaaaactaacacaacataatttttttttgtatgaatcagaaagttgtattgctccacaaacgatttatacaatgtaatagcacctcaaggaggcctaaaaaaacactatacattatttgcttaataattacaattgattaaaccactcattatccacttgagttattctttttggaaaaacacatgatattctagttttaatcattgtcttcaatatcttctctatggaggtcgggtctgcctttgagttgttccataatatttcattcttggcttcccaaatcaggtacaccaaaccaacagtagcagctgaaaaaatattcttcttgaatcgggttttatttgttctttcaatccatcttaaggtgccttgaagactaactgtgtgtatattccagttcagccacacctttatcaattgtaggcactgttgagagaagctacattcaaaaaaaaatagaagggaagttgtttcttcatgagagttacaaagaagacaacttggttcatctatcattttgaacttgtataatctctcccttatcttaagtctgtttagtgtagcaatccataacataaaactatgtttaggaatgttcaatttacaccaagcaactttgctccaaaatactttttttttttaatttttcagcaagcattttatatccagccgagatagtatactgttcatttgtaaactgatttgaattgcgtaatagtttgatcttctctttgcaatcaacaatcttcttgcaataccagctgccaaaaattagaggttgatattcccaccagtcggcatctttaatgtatacatgatgtatccatttgacctataggttgtccttttttgttgcaagagaccacacatgtttgagaatagcagccttgttccattgtgatatgtttaagaaccctaaaccaccaaccttcttaggttgacatagtttctcccaagctacattacccaagccactcatattactttgtcccttccataaaaaagttctacaaatgctttcattctgaacaataattttcttgggaagcactagcatttggcttcaataagtatggaacgtaagcaacattgaattaataagtacaattcttcctgcatatgagatatttctagtactccacattttaaatcttgctgtcattttttccacaagcaaattgcagttagccgttgatattctttttgagcatattggcatacccaaatatctgaatggagtatgttgtctactgagatccgagatgtcaagaactctctttatttccgcttcttccattcctgagcattacaagtctgatttctgcgtattcgccttcaaactagatgaattcaaaaaaagtttagaaccttgtagcattaagtatatgctcttgaaatcacctttgcagaataatagaacatcatatgcgaaacctagatgatttaacttcaaagtactacatctatcatggtagtagaaatcctttctttccccaattttctccatgattctacttaaatattctattctagtacaaaaagcaatggcgacattggatctccttgatggagatctcttttggattcaaagaaaccctgcatagagccattaattaggattgaaaactttggagtagtaacacagttcattatgagggagatgaacttgtttgggaacttgaaagcctgtaataaatcttctaaaaaaccccattccatagtatcataggccttttgtagatcaagtttgatcatacaatttggtctactaatttttcttccatagtgtcaaatcaagtcttgacatatcataatgttatgcactataaacctgcctttgacaaagccaccttgatttggagcaattagatccggtaaaataattttcaacctggagcatattagctttgttggaattttataaagcacattactacaggcaataggtcgaaaatcacttactgagtttggacatttcatttttggaacaagagtaaacattgttgagttaatctccttcaacaattttcccattgaagaaacgagttaataactgcacatacatcaactccaattaactcccaattatcttggaaaaaatagctaccaaagccgtctggactcggggcttttattccaagtattctaaatactgcatttttgatctcctcttgtgagaaattggccatgagcaatacaatgtgttgatcagttacacaaggtcccttgtaacaccctaactagcataggcgtattacgtgatt

SEQ ID NO: 300824 - DNA, 4382 bp, Cannabis indica
tttaaaaatgtgttaagcatatgtgtgtgaaagtgtaagtaggaaaattgtccaatttattaaatagactttctctaagtatttgtaacaacggagacgctatcacactacctcaatagtaacacttttcaatgataatgtctcatttatatataactcctaattacatagtaccaacttactcagtgacgactttcacacattgagatagatagctcttttcttctattagagcttgaacacactttttttttaaaaaaaaatggtagcttacataatattgattgaagtactcaaatattcttaggaggagtgaaatgcttttcctgaactaaacttgtatgaaagcattgcaccgaaaaaattagcaataaaaataataatttgcaattctcttagagtttaaaactttcttttggaacaaaaacaagacaacaatactatgtacattaagccaaagcaaaaataacaagaaccattaagaacactaaattaaatggtgcacacccctaacgaatttccttatagaaacaaaacgaaccaaataagaactttagtaaaaatatttgctatttatttacttgtttcaacatgttttgagacaagagtttatttttcaccaactctctagtgtaagtgtgataagtgtgtgatttagataatatgtaacaattatcaactggattataaacttttaacacacaaatctcacccttgtcaagcacataataattattatgagaaaatttacaaacaagtcttgctcacaaaactgacttatactaattaaattagtcttgagtccatcaagcaaaagaatatttttcaatattggtagtacctcacaatttagagtaccactaccaagtaccttagcagaagtgaatctctaaatgtgacttcaccattttcaaaggtttaaagtcagtgagcatgcgatcatcacctattatgtgtctagaattctcattatcaaaatatcaactcttagaaatacgagtgcattataagtaaaattagcaagacatttagattcatttttcttaacctaaatcttcttgaattttgttctctttttcctaacaaattgttttctataatgattgaaatttttatttttgaagagatttatgtaaaacacttaggtcaaatgtgacatttaataccataaaagtgacaaattggtatgaatttttggagtattaccaaaatattgagaagccttacctgaagctctgctccaccaaaagtcttttttgtactcgtggaaacttgtaatgtagggtcagaacagattaaggataaaactttcagctttgacaaacagattattcacaaacgattgggattcaactaaccccatctccgcatgacttctttgtccagaatttcggacctcctaaaaaattgaagaaccttgattgtgcattctcacattctctttagaccctcaagatcttttaaaagcctaatattttcttgtttttcaaaatcaagatcagtttcaaaaaatttacatttggatttaagatccttgttttttttcagtcaaacttttgatagtcttggacatcaaatttacatttaccatgcatttccttgtaggattcacgattcaaccaatgaatcttcatccagttcagattcatcatattcagattctataacattgttagaaactttattttccaaaatagtgttgtttaggcaaacgaggtttctctttttctgtaaaaaatgagacatgctagaaagagcagaagttaaagtaactaattcatcatcactactttcataatcattgtcactccaagtagcatttaagtctttttttattctttttcaaagtattagcacgttgagattgtatgtgaccaaaaccatcacattctctacattgaacaactcttttattattatggatgaaattttttgaagatgaattactttttgagaatttagaaaattctttttgtgcgccaatattttcatgtattgacaaaacttcttattaatatggttaattcattatcttcctcatcattagaactaacactctcccaacttttgaaggctattgatttttttcttttaccttattaggtttctccttttgtcatatttgttgattaagttcaaatgttcgaagtgatcccatcaacttctctattttaattatgctaaagtctttagcctcctctattgccaaaatctttgcattaaacctgtcagtaagaacttgaactattttccctaactaaaatagatttgtcaagtttttcacccaagaccaaaaattcattagcaatgttaggaaatttttcataaaattcagaaagagttttagaatcagatattcttaaataatcaaatctactttgtaacataatgaaccgagaatgcttgacatctacagttccttcaaaccaagttttaagcattagccaagcttctcttgcaaattcacacgaggagattaatttaataaaacctccaccaacacaattaaaaatagcatgcaaagctttattattattactagaaaatctatcttccttagttgaccagtctaattcaaattttaccttggtattaccttcatcatcttcttcaaccggtggagaccaactagttagaatagatttccaagccttttcatttaagatttgatgagagtcttcatcctaaccttccaataagggtagttagaatcatttagcaatggtaaactaattgtagatctttcttctacaagaagaaacatcacacaagattaaaatataacaaccaaataaaaatacaagatctcactaagagtttagtgagttgctctaataccaattaaaacgttatattttaatattactaatttattatttaatttatcaattaattaaatacgtaataattaaatttgttctgaaacaaatgttctataactatagaaggcgattatgtaactacataatagaaaaccaacaaagaacaaaagtgcagaaaaataaaaaatacccaaggtttttatatgtggtatcaacaatccctacatattattactagtccacgagatcacgctcagagataagatttattagtaagatctcaaaactatacagtatttgacttatgcataaatagacttccccttgttatacatcacaagcttgatgtattccaacttcacaaataaaccttgctgaaacttcaagtgttcgaactcccttagatttgttggaagagtgcttgcaacctcccgagacaagacttgaaacactttcttctgaaagcttaaaaaatcttgaaggttttcactttttctcttcttctttgttaacttgattacagacccaaaataataacacacatatacataaaggtaaagtcgaactcactctcctttacaaaataaagatactatttcttacaaaatataaaattaattaaacacaaagagatgcaagagatacaagatctagctgctaatatgagtatttatacacattatactcatattagacagctcatacacggactaaacacatccacatctcatagaaaacttttctaaaaaaaatcctcaatcagcccaaaaatttcctattctttacttacaaaattgtgagcagtaagtacaggtttctttttataaaaacaaaaatatatattttaattttcttcaaataatatcatttatgtcatactttcccaaattagaaaagttagacaccaattataccttaaatgaatcaattataccttaaatgaatcaatcaaatataaacatgtatatagaaagtaatatacaacccagtcgaaatatatataaatattataaaatattttttttcaattaaatatactaaatattttcttcaattaaatatacaaaaaatagaattgatactctctacaatattttcttctatttatttatctttcctaagcatgcaattcttcttcttagatgattcttccatcaaaggtgattcttcatctctgttctcaagattggtaatgtcttgaagagtgtattttagaagatttatcctgtttcaaagatgatccgttacctatcttcctcctctttcttaaccatgaaattcatctctttcttctccttgagctatctcatctcctctatattcacaattttacttttttcaattatatttacgaagtttttattgtcctagattagtttttttaacggcttattctaggttaataaaggatgaagaatttcaatggaggatccttactttgttcgttgtgagtttgaagccacactacatactgttggattttgtgccctaaataaaacctattttaatataatcacatttactaatcaataaaagatcagaaatcattttatgttgcat

SEQ ID NO: 300825 - DNA, 3708 bp, Cannabis indica
tcattttctctttggtttaggggaacctgctgtggatgtggagaaatcgaaggcacttggtccggccataactcggtctaagaagcgtccaagcaagctgccaaagtcaaatccgaaggttgcatggggaaagcttctttcccagttctctcaggtggatttttgcctttgttttgtactgttacttctagcttatctgcatagtatggtgtaattgtatacctggcggctatactttttattatttttcactcttatcccataaatggtataaattttcttcattgttcttccctgattttaatggtgaaatgctgctttgttttgtatggggggactgtttacttctgtagcaatgcacactaacataaagaacgtttttgtaagtaccgtttatggtactagtccgggcttgtgggctgaactggagatgtagatatttagtctaggagagtgattgtaaggtttaaatgtaaacagtgtaacagcatagctaaaaagagtagctttcgcaaactgtgaaaacttctctcaagagagtggattggaccagcattgtttcgtaattagtgtaaatttgatggacttgagagataatctgggacatgttgtagccttgaaagttgacaggataattgccatgcttgttccatgaggctttgtgtgctgcatactgagacctcagcttgacattttttttacctgatacttaggactgattgtgttgattgttttttaccaagagggaaatgaatgagaactatgaatgtctttgcttgtgatcagtttcccagttttgtgttgtccctctgttatgagaggttagtagattttaaccaatagtgatcatataagattgtactgagtttgttattattctttcagccccagaaactaatgttcatctatatcttcctcagcctttttaaaggttcatgtactttatatccttgaccaaaggatgtacaatgttgtgaatgattgaaattctaattggcatctgaaggatgtttttacaacaagttttctttggtcatttttccttgataagactctctctctctctctatatatatatatatacatatatataaataactgaatgttcaaatgttatttggcgcccattctttttccctcgttgttgttaaagcagatggataacctaatgctgttttctttccctactagttagattgagaaaggcataaataagatacaattgtttcatgtgcttttttttgaatatatctcatgattttggtcgcccttccagaatcctcacctgtcgatccgtgattctaatttcaccgttggtcaaagccttcaatgcaacttagcgattaaagatccatcaattagtaatactttgtgtaaactgaggcacatacaggtatgcctatttgtatcaaagacaagattagtttaatatttacatacctcatagtatgaagtatatctcttgatttgatttgttgtatactgcaatgtcatattggtactgacatatgtttactgttaattttaaatcattgtagcgtggtacttcatctgttgcattgctggagatcatggggggcaaaggtgatgtaaaagtgaatggcaaaagttatcggaaaggttctagtgttattttaactggaggtgacgaggtcgtgtttagtgcgtccctcaagcactcatatgtatcctttttatcaactttgccatattgcctaatgcctagagcaatgcagtttgttatttgcattatttagcctttcgtgatagcgtcttcatactatcttctattgttttattttatcgaaatgaagcatcctgcatgattacatttcttaccttttctataatttgcaaagtaatccttgacgtcgcttaagatttttcagcagcttgtgaatgataactttgctgcttcagttagcatattagaagcccagagtgctccagttaaaggaatacaaattggggcaaggtctgggtctggggatccctctgcagttgctggagcatcaatattagcatctttgtcaaattataggaaagatttgaccctacttccccctcctggaaaagctggtgaggagatgcagcaagatgcagaaatatcctcagtacctactggctgtgcaggatcaggggatcttgctgccgatgttgacatgaaggactgtgctaataataatgatcagaatggtttgtcaagggaaaaagatatcactccatctcctgatgctggcaatgcaaactccaaccttgatggcattggactggatgcttctatagatgctgaagtgggaaaggtttctgggacatcttatgaattaaggccacttttgaggatgcttgctggttcatcttcttcagactttgatttaggtggcagcatttctaaattatttgatgggccaagggaaattagagatcttctcaaggatattgatcgtccgctttggatatcaaataggcgacaagctttcaaagataaattgctacaagggattttaaattctgatgatattgaagtttcatttgaaaattttccctattatctaaggtgctgttttaaattttcttttcttttccctttttctagataaaatatctttggctttacttatgttttgtctgcattcatctgcttcaattattcgtaaaactatactaaattagtgtgtggtccctattctttcttcatcttaggtgatgattgatttgtagattatttatacttgctgtttatagtcggttacttgtgggattgatggcaagttttggattgttacagtgacacaacaaaaaatattttgattgcttcgacatatatacatttgaagtgcaacaaattcgcgaagtatgctttggacctcccttcagtgagccctcgtgtactgttatcaggaccagctggtacgtaaatttacttgcaaaacattggcttataatatgtgacctctggtgatatttcttattctgatcctgtcttgcatgtaggctcggatatatatcaagaaactttgataaaggcacttgccaaacattttggggctagactgctaattgttgaatctcttctcttgcctggtgtaagttatttagagtttgctctttattcaattaccattttttggtttttccttcattttcttttctatgtatgttgttatcggactcggttagaaaatcgtctcttataaaagaaggaaatgaactaaaatttagtaggaagctgttttaagaatctattacttgggtcggtatgattttattgaatgcatatttgtttggacatatttatttatatgttgtcctgttaaacttcaaatagggaccaatgccaaaggaacttgataatgtgaaagaaggaccgagacctgaacgattgttatttgccaaacggactgtgcagtctactggattatcacataagaaaccagcctcgagtgttgaggctgatattacaggtggatccactgtaagctcacaggttccacgaaagcaagagtcttcaacagcatcatcgagaggcaatacatttaaaaaaggcatgatttctatttatttatttattagctcataaatttaatttgttttacgtacttgtgttaacccttgcaatatatactcaggtgataaagtaaaatttgtaggtccttctggacttgcttctctgcagagttgccccctaaggtgttgttttcttacttt

SEQ ID NO: 300826 - DNA, 4319 bp, Cannabis indica
ttatctttgagcattataataaaatttgtccttaaaattctctgttaacgaagcattgatctttctctaaaaaaaaaaaaccctgcgtacaatctttttattgcatattttttttagggaaatttgcgacataaataccatatgttttcaactttatacacttaaataccatatcttttttttttggcagatttaacaccaaacgttgtattttaggcctctttgttactactattctattaattgtaactcattctacacgtgtaaggcccaaattaaattccaatttttttttttaaatatttaattaaaattaaaaacttaactttttaatctaatatattaacttaaattttatttccataaaaatattttaatgaattaaaataaaaaaaaataaaaaaggaaataatttttttgggggaatacgaaagggttaatcccttagccatcttcttcctcctgccatcttcttcctcatgccttcttcaaccaaaaaaaaaaaaaaacttacaaggctgttgaacaaacctagtaaccaatccgaaaccaaccccacattcctgtccctacatcttccaaactgcttcgttcttcgaaccaaagaaatcaatcccaaatctcatcgtttttcactcgctgacaagctagacggaggagccaaaagcgtcgacgaaccagacccaccgaataggaagacgaacctgattggcaatgggagatgcttcctcttcatctcgtgtaagtcctcgaagccattttgcgaagatttagccctcgtacatactctgagatcatgaaaaatatttctgaagttaggaatcctaacatttgtgactgtggggaaccatgtgttcaaaggatgtcatggacagacactaatcctggaagaaggttcattggttgcaagaagatgaaggtaatgactttttatacttgaatagttttgtgatttgatttgggtattcaatttactgtgtgacaatttatatgaccatttgttaactaactagtatagaaagtcttttaattgtaaaggatgaaatgatgaaagtgaggttttttgtaacaaccacccaatacgaatttgtgccaatcttaagtttattttttgctattgttctcattttactttacttgtattttttttcccttttaatcttctgcccttttatgttctgttaaaaaaaaaagctacagttggcaagttaaatttgggagatgatgatgagtagttttaggggcaattgtttttacagtgatagtatttattgttttttgattagctaaagtttgtcttcgacaatagaatacagtgctatatatctcattgatctatttttggtgttgccattactgacatgctagaagcttacattacatgttaagagtagctgttgtagttggaagtttttagaggttttgtttagagtttgctatcttgtgtctttgttatggtgaaactctatttgcctcgatgaatgaaaatcagttgtgtttctctaaaatgatgataagtattttatgtattgagtcttttgttgttcgaaactatatttttgagctctgagttcaattaccaattcacaaatggtacttattcattttttttttttttcagtcaccaggtgggtgtaatttttttcattggattgatcctgaaatttgtgaaagatccaaagaagtcatacctgggctgttgaaaagaattaaagagcaagagtgggagattagcaatatcaaagaagtgcatgctatgaaaaatgaagggcaaataataggacaaatgacatgtggatcatgctatttaagagaccagactactgattatgggaatggttttgtttgcttttgtacaaaattcaaattaatattactaatgtctatattagttctagttgtgtttgtttggttaaaatgtgtgctttgataaaatgtgcaactcaaaaattgtagcatttgtattagacattaatattagttctagttgtacaattgagctatataagctcaactcttatccttttctcattaatgaagaacatatattttcaccattccaattctctctcaaatctctctattttcctctgttcttcttcttcttctttctgctactaatactttctctttacattatattataattggtttgccttgatcattcgtaagattgtaagtatatcttattatttttagttttttttctttaaacaagaatctataagatatatgatagtgaatttgaataattgtaatatagttacgtaattcttgatctatatacatataaaattattgttcaattatattggtcatcatctatacttatattagtaattttttcattgctggtaaatttttaattgtgttgtacatagtttcttttaggtaaattcattagttgttgaaactttagttcacgattcttgataaagaaaggtagtcttgatcacgtgtatttataaatttactagtttacattcgcctgagattgtttttatgattctcgttcgtatttttaagttcttggatttatattaatacttaattatatgaatctgtttgaacagattaatggcttttattcgattcttagaatttttgaaacgaggaataactaaaagaatttgtagaagaaggcgaagaggaagacagcaaggtgagagacctctaggtacagacatgagaaatcaagaagagttcattgtaggttctccagtagagtcaatgagagcttcagctccagtgcccgacaaccatggtgatagtgatgagggcactaaatctggtgctttgcaagatgaagctctagttcaacaagaaatctataacgaacactgtagaaagatgttgtgtgaatctgacatagagcatggccttgaaataccagcgacagtcaactccctcatttaccaaaacaatcttattagtgacacctctagtctcatggtacgaattacagagtttacactcgagtgtcaagtaagagctagaaattgtaatagggggtggggggtaccccaagacaaagatcactaaagaatcatgggatagagtgattttcagaggtaatcttcaacgctcagatctcataatcttcaccatcatcacacctccaagaattacttataaaagctcatgcaattctttctatgggaaaatttaatttaatttcattgcaatctaataaccatgccattatttgtttttttaaaaattaaataagctaaattatatgttaaaaaagactaataaaaaccagaaaaattcagtacaactataggatcatcctaagcaacaaaatgatcttcttctgccttggtcttcattgtttggactcatggcattaggttttgaggggcaagcttttgtaagtaaaatagtaattctcatcccactattggcccatcaacccctgcgccactgcaatttcatctcaagccttagccctgtagaatgtgctttgtcccacattgctgaatttacttttttgtgtcattcccacaaatgcgctgtaatccatgtttggattaagtctgaacttgtccaagaaatgcttggctaaccaagtgcttgtcacaagcttgttattgaatactatcccacaattgggttctgactcgtacttgtttatcctaatagtcttgtgatcaatgctctgaactcttccataaacaaaccactgacaaccttcacccttgcaaatggcttttaatctagatttgtcattgtaaaccaacgagtatgttttaatactgttgataaaataatctttcaaggcctcccttaaatgctccatagttggaaattccatcccaagcttaaactcaaacttcacaaacttgtttgtagggttgtattccctcgtactccttctaaccaggtgctcatcatcatcactacaaaggctgttgagatcatcctcggacatgactccttcagaatcaaaataatcttcctcattacataattttgtgattgaaggccaccacagttttggatcagttgtgttttctaaatcttttttatgctcaccatcatcaacataatcttcctcttccaactcaaaatcgctatctgtctcaaccttcccctttccctttctcctattcttgttacactttcgaagggctgcttgcattttcttcttttggttgtagtgttatggatttgaggtggtatttgagcctcgagaataggtgctttgggttgaaatgattcttgtgtatcatgggtttgaggtgatatttgagcttcgggaataggtgctttgggttgaaaaggattcttgtgtataatgggtttgatgtggtatt

SEQ ID NO: 300827 - DNA, 990 bp, Cannabis indica
attatataattaatttattatttattatcattataattttattaagtaattagttagatgataaattagtttttcacatttagatatctcttttttttttctttcgtccaaatttgaatattctcatctaagtaacaagttaccaatattaaaagcaattggttactcataatttgaatagtttgttagatcaaaataattgacaataaattgcataaaaaattataaataatcgtaatagaaagaaaaatactaataatgccaatatgataaattcatagtaacactaaaaaaaataaaaagaataaattcatattatgaaaacttcctataaccatcacattagttaccattaaaaaattgtttggtaactacttacttttgcttgaatttgtgtacgcaacaagttttttttttttgaatagaaagtatacgcaacaagttactatgtcaaagacattggttacctttctcacagtaactggttactcgtatttgttggctgagatatgagtaaagacttataaattaaatacatacacgatcaatcaattatatagatttgtattttttcacaatttttggtaactacttactcatttgtgaagtaatatgggtaacttgttacccctctcacagtaactagtacgatcatttgtaattttgtataataaaatgggtaaccgttacctctctcacattaactagtaaagcctctcaagaagaattattactcatacttagagttatgggttactagttacttggaaattaaagtcaaagctcattaattatatggttgttgtaatataagtaactagttacccgtatttgcagtaatatgggtattttgttagatcgtaaatatgtatattatatagagtttttttttcagctaaaccttctcaattatcactcaacttgcatttaatcctttaatggcatgtttacttaaagggaatgagaatgaatggtatggtattgattccc

SEQ ID NO: 300828 - DNA, 4110 bp, Cannabis indica
actctgtttatcccgagatggatgggttgtctcatcaattacatctgataatagttgttattcttatctcgcatatgcttatgtactgaacgagtttgaatatttctatcaactttaattaattgaaacgacactactacaaaaatagtttttcctaacattttaaagcagtcgtttaaagtattgccattagtttctataaccattgcctatacgtttgtcgcaaaatggacaaaatagacgacggttaaaaaccttcgctaatgtgcacttcccgacggtttaaaattgtcgcctataacagggtataggtgatggttttaaactgtgtcctatactataagcgacggttttaaatgtctttaggggtataaccgtatttctcccatttaaaaattacatgcttggaattttggcggttcaaaactttgtggcacattatttcgcatttaatgttctgactgttcaattcttataacgttcccatgcgttagattagatctcccttgatcgaacgatgagcaccttttgggtataaattaaaaattgtgcatcttttttgccattttcaactttcaaaccttcgagcttttgccaaaatctcaaccacctacttcttaaatttgcatgccctcgttatctcaatcaaaaacttcttcgctgcataaaatttctcatcaagacagtaagtgacactctttttcattatttttttcttctgtgcttacagtttctttttcatggtaattattttccttgtctgcattgctttgttgtttgggtattttgattttgaatgtttgcataaatttaggattaggaaaatttaaggttatacaattgaaaaaaattggcttttatttgtgccctgtttttctaaaaattgagacattattattataatcatgtctcaatttacctcaaaaatcacaatctcgaaatccttagaatttttttgtcttaaattttcttccataaaaattaagcccaaaaataaaaaacctcaaaccaatgttgaagtgaatgacaagaaaattaaggatcaccttattaagtctagtcaagatgaaacttctagctgttataggcaattcttacaagagataattgagggtaggcgccactatttgcgaaaagcgggttggcctaaaccttctaaattaattgatatttcctaagcgaagccgatgttcttacgcctagccactattgctttttcaccaggtgacttagattttgaaataatagcttagaaagctcacaaatcaaagactcctcaggatcctacaatcacatttgagggctgagttaattgagtccaaaattagatttataagaccttatgtcagggacgtcttaaggtcatgcggcatatcacaaatgaaaatggatttcgcattaggtttgttgctgagggggagttcagttgttaccccctgaacatctagcttgagatgaaggctgcagcaccagtgaaccttctaggataggtgcttaaagcctagaacatattagagttggggcagttctccctttaaaggactatttcaaggatttctacaactacctcggcattgccccattccaactagcaccaaattcatatacgattctatcctatttaaagttgttatatcacattttgaagtgggagtacctcgacccgacatgaaaatctttatttttattttgtaaaggcttgccctgtaatgaagcgaggtgcaggtgatgtctactatctccagacacataccaatgatcacaggattgttgtgaggctacccaacaaaaaggagttgaaggatgacttcttttgggccacgggtctttttcccatcaacaccacaaaatttcaaatcatatgtaagtatagcttcgtctcaaaaaacttgattgagttttaattaaatacatattggttatacttatttttttttatttgttgtgttaacaacgatcactaggagacccattctaactcctgagatcgagaaaaggcacaagactcttattggtcttccctttgggttgtgagcaactgacttcttgttgcatgagaaaaacatgaaggcttgtgccctccttggcaagtatcaatctactagtgactttaaggtcccaaaattttcagactggtgacaagttctagttcctactgatgaggagaatagagactatgtggctcgcagccatttatttaaaaaatgtgaccccttgggaagctgaagatgatgcctcccgaggtaataattttggtgtttgtggatggtccccaagcgttcttagagcagagcgaactacactagttaattttagggatagccgatataacttctgtatttggaattgtgtggatcttattttccataggtttgacaattgatatcccaagcaccacgtccaatttagttgtaacaactcttattttgggatcgccaatcaatatggcactaattctgataggactggccatctagattgggacatgtctcctctaaatccctttgatctttttatgattactggttctagagagtttagtaatcattatagctctttttcctcgtctgatgactatgataatattctttagtggggggctatctcaccacatattttttgtttattttgtacagtgttgatcttttatcttttgtctcgcatatatggatctgcattttgaagatgtcttgtgtagccccactagttccatcaagaaatccaagaagtgcacaacttccacaggaactgccttgagatcagccaggagacattgaaaaggattaaaaagattgctaacaagaaacgtgcctcgacccaactcatgatcgagccagaaaagagcccaaataattctactgccccagttgttgcgagctctggtgaacaagccttaggatctgttcaccaggtcaagttctcgggatctcaacccgagcttgtgttcctagaaccctcttgccctttgccaaattttgcaggcattaagggtttgcaagtttgcttgcagtatgctactacctactgccgtcactacagatgttttcaacaagatgattgggacctgattaacgatggtgatttttagagtttaaagcgaggagtgttgatctcaccctctcggttagtatgctttttcttctttgtgttgatctcaccctctcggttagtatgctttttcttcttttacttttgaacttttacttttcctttacctacttacccctgacttatttcttttataggcatcttttttgtctcacgtggctcaacaaaggggcatccagagaatcaatcagctagaaaatgaattacgcaggtcaaacgatcagcgtgaagccattgcgaggtaatggaatgattcctaacctaagatttatctgttgaagaaggattctgaagagcaaaagactgtccacaaagctgagctcgaggctgtccagaaaaaagctaaggacttcaaagatgcgattcagaaggtccaagctgaagctaataagaagattgaagaagccaaagctaggataaatatgatcgctgagagatctatttatcttgctgggttagctaatcctctgatggatctaagtttcatgggagctataactgaagagatgcaaactttctacgagcagaccaagaaaagacgaggcagtggatgctgaggaagaaaaagaagaacccactaagtcactgaccatgtagacttagttatttttattttaatttccaaataatggccattaggccaagctaatgattggatggccaacattgctaatctatataaatttatttttatgcctcttatcctgctttttcttgagttattaatgtttgcttattgcatttaattcacagcaaaacactttcttcgatctagcttgggtctttagggttacacgcataccaatgtcattatcttgttatttcatttgtgagcagttaatattctgccatgtttttgtgagcaattagtagttttctatgttttccgagaacagttagcaattcgctatatttagatcaaacttcaaatactttgaacatctcttttaagaactatttttaaatatttttgattgctcgtatgagtagttaatcctctat

SEQ ID NO: 300829 - DNA, 1642 bp, Cannabis indica
aatttaatatttatatatatatgaatatataacaaataaacatgtgaaaacatacatgggtagagacaaagccatcgtgcactagcagaaaaagccaccctctgcctattggatatgtcatggtgttccaattgaagaggaagagatcgagatagataaggagagaaggggtgagagagatctagaaggtgagaagggacgagagtaagaatgagaagaagagaagtctgaggaaaaatatgggattcttttatgtatatcaacttattacaggcatgactcctctggtaataagtataaaaataataaattaatatttattaccagcgttgtccgttggtataagttcgctgctaatgataaattacaaataaagatgagatttttcccgcacatttcacattttgataattagcaaaaagttttgtcgataatactttgttttctgtcgctatcactaaataagaaagattttaaactaaaaaaattaactttcttgactattatctgcaaagtgtactctgctggtaataactcttaatattaggaggagacctattttgctggtaataagtctgcccctaatgataatttttgttgtagtgttatgcgtcacgcttctaacacaatccaaaaaaatttgggggacctatcccctctaccaatctttgaaatgacatgtgacaaaaatgagatcacctttttgaggaatacacttctattctgacattcatttttctaacgacggcaaacgatctcacttgttagtgtcaacagtactatactttgtacgacacattgcttttaggaattaggtgtcacctacccgatttaataactcaaaatagtgtttaaataacacagtttactttattagtgagctctactcgacaaaaaccttagtgtggcccaaatctgttcggcttattgaggatgactacctataaataagacattatcttcttcatgcaaagggttcacaatttgaaaatactatagagctataaaaattcaattgttaaaaaacttataaaattatatgttatttctttcttaatctattttctttaatttaatttttcataatagtaagattttcaaaaaattccttaaacaaggataattaatatacatcatcatataatttttttatatattgacaaaaaaaagtttctacgaatagtgacataaattttctaatattattttgtttcccatttagttttaattatttttctaatttttaaggaaaaaataaagaaaagaaaaagatttagtcctatttttcggttccgcgcatttgattgttgttggccgaaagtagattctcgaaatttaggaggaattttgtacgagaaaggagcaaaattttaagatatgtttttcttctattattaaaaaatcatgaaaagatggcaagattaatagaataagtgtatgcttattattccttacacatcaaagaccatatgggaatggaataagagcatttccattgttatggcatatttcttcttctttcccttctcaaaatgtctctttctctctttaaaaatgatttatgacatgggtgacattttaaaattttaatgggtaaatacttttttggaccctgtgttttgcaaaagttacagattggacc

SEQ ID NO: 300830 - DNA, 1603 bp, Cannabis indica
aagtagcagttttttgtagtgggttctttgtgttgattgaagagtgcacaattgtagctatctttattggagaaaggtataatcacaaaaattttaaaattatttatttattggagtttgaatatgttacatattcatccgtagtgaagtaagttctgcgattaattgtcctggttcgcacgaaatctttcacagcagtcgcacaccacgtgatggagaagttcctatcaaccaaatttcagatggtcatattgtagtactagcccttgcagcgtgttgagtacgaaagactaggaggataaacgttatgcccttacccacatgtttgcctataaataccctcattttttatgaacaaagggtgaacaatttgatactagctgaacctctgctaaaattcctactagctttcttcttcatcaagagaaacaaaaggagtgtaaagttagggtttatattgcaaacacttgtattatttaaatactcgcctacaaggcaaataaaatagactcgtggactaaggattattaacgcccgaaccacattaaaattacccgtctattaattatcattttcttcctttcttatgttctattttataagtttctgaaaatctcggtaaacaccttaactaaagagggatacaaatattttattaccatagttaatggttgttctggaaagacttggattaatcttatcaaataaaagtttgatgcgcaagttgttattccacagttcataaaatatgtccaaaactagttcaatagcaccattaaagattctaggttagataataataaggaattacaatttaatgaccatttcagtgagcttagaattatgcattatcactcttaagtcgaatggccttaacagaattatattgttgatagaaaacaccatcacttgcttaatttaactagagcacttctattttaatcctatgttcctttgatttattagggagaatgtgtagctagtgctgcctatttgatcaataggatacctatacctaatctaaagaacaaatctcatttttatattcttcactataaatcgcctgcatatgagcatttaaaggcctttgagtgtctagcttttgcatctagtttaagtcaaaatagatcaagattctctcctaggtctacaccttgactttttcttgaataccctactagaatgaaagcctacaatctccttggcctgaacgctaataaagttttcaattctagggatgtatattttcatgaacacatattcccttttgttaatactagttgtattcctacaacctatgagactgttttctctgatattcctcatgctacaacacctcaaatgttgagttttgtgccctaaataaaactcatttcaatataatcagatttattaattaataaaagataaaaaatctttttatgtggcatggtttacatgatttatttcatgattatgtttgatgtataaattctatttagtccagaacataaataaagatatatattgtaaagcccgcttagtttaatttggaaattagcagttaatcgtgattatttatgaaaattatctatagctattaaataatttattatgctgttat

SEQ ID NO: 300831 - DNA, 1380 bp, Cannabis indica
aaagaaaaaaaaaacaaaaattataagaaaaagaaaactataacataccaatatgtaaaataaaaattgtgatatataaaatcactcaaaataaatatacctatctaatgaaatgatataccaatataaatataattaaagacaaaaatagattattttggttctttgaatcaaatagtatattaacaacaacctctaaaatattactttcattttctctaaggttcatatctacaaacatcctaatgcagtggctattacaatccaacttttggggcaactctttatataatagctctaaatattaaaaaatattgtatcatcatctagtaacatagttatcaacttgtagcccagaaattttgttgtcactccaatattcatcatacaatattgttacaggtagctgcaaaatgttaaaagaaacaacgaacaatataaaaatccaaatacaaacataactatctaatcaaacaatataccaataaatatataattaaagacaaaaatatagaacttcataatattataatccattcaaccaaatggtatatcaaatttactttttgatataccctattttgtggtacattttagacctttcaactaaatgtaaaatttgagatgggtgcatagtgtgtatatcaagagagaatcctggtggagttacacagcttctatccactcgagttggtattggaggaagcttgtaactcttaaggaccatttgaaaaccatctagaacccgattgaattccaagagaaaaagtatgagattgctgcagggtatgacctactcaaaccaaaccaagataaagtatcttggagccgtaaggtttgggcaagaataaacatccccaagcatagtgtgatactttggttggccatgttgaatagaataaagacaaaggaaaggcttgtcaagtttggaattcaaattgaaagtagatgtcgattatgcagtactcatacagaaaacacacaacacctattttttaaatgttcctttgctgaaaagtgcttacaagcagccaaaagctggttggtgtggggctcgactgccaatgatcttcctctattcttgaggtggattaggaaagctaaaataagcaagtttagaaagaatgtactggcagttgtgattgcaggtctagtgtatagcatttgggaggctaaaaacaagctagaatggcaaaatgaacagccagattgtggcagagtgatggaggctgttcggtggagaatcaaaactcgaattactatgtttttgcctaagaaattgagttgtaaagatagggattggttttatggattgtaataatgtaaatacaatatttgtatagattaaaactgtaaagtccttttttggcaagttaggtg

SEQ ID NO: 300832 - DNA, 1805 bp, Cannabis indica
gctattaccgaattgctcggggtcaaacctctttaaaaactctgtgtcctgcatttattttactatattacatctatattatatcacttgtcgcttacaattaagactcattgtcgttggctaaaagtgaggtcaacattagtatgcacagtcatctacaaattggtctcgaaagccattgttagttggttcaaaaaggttcttcaagttgccatttcccaaaatcaaagtgaattccttccaggtagattaattacagacaatgtgcttcttacttttgaattggttcattgcttaaaaaataaaaaataaaaagaggacgtttaggttatgcaactttaaagttggacatgagcaaagcttttaatagtgtgaaatggcactttttagaagcggttatgctaaagatgggatttgctactaaatgggttgagcttatcatgagatgtgtttcttcttcaaccctctgcttcaatattaacggagctcttaaaggatcagttgttccataaagaggtcttcgtcaaggtgatccactatcaccttatcttttcttgatatgttcagagcgactctcagccttactacattcagaagaaagtagtggacatcttaaagggttgtagatctcacggggagccccttcagtgtctcaccttttatttttagacgatagtctcttttttatcatgctactaaagatttttgacaattagtagagccttatcgatatatcatcatgcctctggtcaattgcttaatacgtggaaaattgttctgtccttctctcccaataccacttacgctttaaaggccagatttcaccaagtactaggtatgcctatctacgatcttcatgaaaaaaatcttggttgccatcttatgcagggcgagataaaaaagaactatttagtaacataaaggatcaaatttggaagcttacgaactcatggcacgctaaacttttctctataggaggccgagaagtcctcttgaaagcagttgtccaattaatccctacctacgctatgagctgctttagcttgccaaaaaaatctgcaattaattagaagctatgatggaaaattcttaatggggttcaacaccaacaaatcaaagattcattggaagaaatggaaatttttatgccaatccaaagcgaaagtaggtctgggttttcgatcttttattaattttaaccaagcacttctcgcaaagcaaccttggcatattcttgcggatcccaattctttattggctagagttctcaaagcatgataattcaaaaatggtaaattcattgatgcgaccaagggtgtcttaccatctcttacttggcaaagtatttctgacgggaaagagctattaactaaaggccttcgttgaaaaattagttacgggaataaagtcaggtgtgctattgatccttggctactaggtaatacgacttttaaaccattctctttttgtggcgattgtgactttactgttgaacactacattacacatgaaagacaatgggacatcagtttgctgaggagtcattttggtcagatcgatatagatagaattatatgtctattcccctcagttcttatccaagagaagattatcagcttttttggcaccattccgattttgggatatataatgttaaatcaggttaccacttagccgaatgcttggaaaggaaagatacttcttatacttttaactctccatgcaaatggtgggacagattctggtctctaaatgtgcctaaaaaattaaaatctttgcttggagagtcattaatgatgcaatac

SEQ ID NO: 300833 - DNA, 3946 bp, Cannabis indica
ttaccaaacggcaccttagctttaactaaagaactctaaaaaaaaaaaaaagctttaacgattttcaaataggagaaaataataatgaaatagaataaatataatacttcttggttaccaatttttcctagtcttatattaatgagaatatgagatgaccaagcaaaaattaattgtagtatttttgttaaaaaaaaaaaacaaaagaaactctgatttatttttgtttcaactagtttaaaacatgcttacaaaagtaaagtgttatctagtatctacagttgggcagaggaatgggtattagctactccttttgatgctggcgttgtttgaattttgttctcatttactcttaagtagcgtttggttaaacaattggtagttgatttcattcaagtaaaaaaaaacgtaaactaagcactcgttcattttcaaataaaactgcttccaattaaataaagaaatgatcaaaatagctactaaaaaagttcagagcctcggatacaaagattatgttgaaaaaacaagacatctaagatcattgtttttgagcatcttcttacttgttgtacaaatactaccttacctttactaagtacagttcaaaaccatctaataattgtagacaacaaaacaagcaaaagccctatgctaccatcacaatagaaacgtttcagagacttggaaaattttcctatcatcttctttatgaggagaaagctaattaacaaacttctcacttcaaatctttccttctttcagctttctcatgtatgtctagagaactcggtcttcacgtaatgcacttttcaatcaatcttcacagaggagtagatcttccgaacaaaccagaagcaagcgtagaagccgatagttccggtgaggacaaagaaggcgtatgaaacaatgatcatgtacccaaagtacaaaacacctgaaacaaactttgttatttccaacttggtaaagaagtagaataccgagtagaggaaaaggtacagagcagaggaaccagcagttaagtatgctctccaccaccaatggtaatcttcactgcacaactggaagtagcagagaacgattgttatctctgcacaagtgatcaagaggataacaaacacgataaacaggaaaccgaagatgtaatagaactgattcaaccatattgatgtcaagataaagaacagctcaataaaaacagctccaaatggaagaatgcctccaataagtatagagaaaactggctgcatgtaccatgcctgctctggtatctgtctaggaattttgttcgtcttcacggggtcttcaatagctggcttcttgaaacccagataactacccacaaataccaggggaactgatattccaaaccataagcagacaagtgcaaacattgtgccgaagggcactgcaccagatgattgttccccccaaatcagtgcgttaagcacaaagaatacggcaaaaagtataccaggaaacataaatgcagtttttaaagtattcctcttccattctgtgcctttgaacatcttgtacaatcttgcagaagaataaccagcaaataagcccatgaaaacccacaagagaaccatggcagtcatcagaccacctcggttggaaggagacaagaagcccagcaaagcaaatatatttgttacaagtgtcatcgcaaagatctgaacccctgtgccaacataaacacagagtaagctagaattgactggtgccctaaaagcgtctccatgaacaagtttccatccagtttcttcctgagcctcatcttgggtttctaactgattgtagttggaaatatctttgtacaaagttctcatcatgatcatagccaccataccagaaaggaagaggacaatcattagggagtttataatagaaaaccagtggatctgatcatcattcatgaggaggtatgtgtcccaacgagatgcccacttgatatcactttcctttcagagagggaaagagaatgtgagtatatagaagcatatagcttggacataaacaggtaaactaatagccaaaaaatctattcagcagagaagaaagaaactaataaaaacacttaattaggacgtaccataaaggaaacatcatatgtgaatataacttccttatcagcgtcaacctcttgcggaacagtgctaccaggcagtaaaatttttgtgtctttattgcacgtaaccaactgaggattcttctcattccactccttatattcatgattgatactgtatacagaagttggatgagactaccctcccaaaaaaaaacagtacgtataacaaagtagtcattcaacgacaaaaagaaatcaggctagctctacaatacctgtttggagtaacctcgaacccaacaattctggcattgtctgtctcgggatctttgtgatacatgactcggaagctcaagtggttattaatgaaatatttctcttctttactctgtaaaacaaataaaatgtcatcctattgaccactcaacactcctagggtacaaattataatgtgaagcataccccagcataatttcctttgaaccccacacggaaaccgtgttcataagtttttgactgacttccatccatccttttcctaagaacagcaaccgggagattatccaaaatcctgtaagttgaaaccagtgcagtcagtttaattggataaagattatacgagaaaagacttcttttcttcctttttaattaaaaaaaaggacggaaggacattttttttcagtagaatctcaggactacaaatcaataactttttgcttagtattgaattgcaataattacttacatgtttgctcgatattcatcatcaattttttccttgaaatttttggcagcttcggcatcaagctttgttttacaagccactgtacatgatttttcctccctcattttaaactggcagagcattgatcaaagataattaacaaaaataaaagcatacaagaatagaaaatctgtgagacaaggaaaaaaatgacggacactatgaaactcacaatgtaaacagaattctcaatgcggtcacctcgaagcacctccccaagattttctgcactgttcaaaatcttcttgggcttacaatattttaagtagtagaagtcataagggagttgtgtctttgtagacgacaatttgttcactttgacaggtaactcgtcaccctatccaggaagaaaacaataacagccaaagataagtaaatcatcaaaaagactatgaagttggtattacttaatttgaacagcaaaataagaacacaaagaaacatctccaatatattagacataaaaatgacaaatttcattgtagaaattgcttcattttaaacaccatgtccagtaatctaaacttacacaatgtgaacaccattgtgaacctttataaattgcgagaaatcgaacaaaaaacataatgactgacaaaataaactctacaagaagatcttcaaaaaaaaaaaagaaacctttctttgctcaaccttatctttcaaaattcttatgcacattgtcaaatacatagaattatctgcaattttaacataatttctaaacttcaataacagtgacacatctataaacttttccttgtatctcaaataatgaattctctcttgctttcaaaactcactcgtgttgcctcgtactcacatttctaaacagattatcgtctctatccattatattacagaaattaaaaagaaaatgttagactggcacaaaagaagtaaattaggccatagaaacaataagccacctaaggatccacaaatcacaaacatagaacaaagaaaaatgattagtaactcaaattcttcacaatcataaaaatcatgaaaaaataatatttaaaaacccgaagacgccccctaactgcagagaaaaacccgcatccctttaaaccctaaaacct

SEQ ID NO: 300834 - DNA, 2718 bp, Cannabis indica
aaactttcaagcaatgacacatgacagcttttctgtatatctttacatttattcctcctgttgaatcaatcaatgcagacaagtgtgattagatagtgctgttgatgagctaagtaagtagttcgggaattggtactttgcacagggtacaatcgcaagtttttggtggacttttaggaaaaaaaaatatatatcaagaaactgcagaacatacattacttctcaaagttcagctatttcagataatttattactcttgaatttaaaggtaaggataatttatcgccaacatcagtcctattgtatcattcatgtttttgctattttctttaaacttacaaatcaatttgtattatatataaacaggagaaagaaagctacactggttgtgtctcaagaaaatgaaaaatcttaaacactgaattttttttgcatttaactaaacattgaaaataatacttgtttatgattttatcttttaggaacatttctgttattcggcctttgaagattttatctatacctcagtgccaaagtcaattaattcaagagtgattgaatgaaatttctttacttttaaaagtaggtgttcctaaatcaccttttaaatcactcgtatattatttatcaacttatttttccattttattctattgtaaatagagaagctgcctttgttattctcatagtttctacaagcagtgttatgtccattttcatctctcaaattgcatctcgaagcagtaaacatagttctacttggttaaacagtctgattcttatgtattcagacttacttgaaatctatatcaactgtatttgtaacactataatttgagcgcacgcacgtgccctccttactagtatgctgatatattggcaaactcgtgtttaattgttaattctctttattccattgaacaaaaactagtgagtacaatttagtggctggtatatgtgtacagacataaattgtggccaaatatataaaattactatcaaattctaaattgctgtacactttcttgaaacacagattttcaactgcaaacaaatcaattaaggttttcttttgtttttttgtccaaatcacaagaaattcaaggatgaatttgaattttgaagagcggattccaattctaggaacagaagagtttcagtctgaaagatcttgggtgcctgcaacaccagagaagtcacctgttttgggaagatctatcgcattctcagatatccaacaaggtagacaacaggtgccattgaattcactagaattggcatcaaatacaggaagatgtgcatcaaataaagactgtttaactcaaattttcaatcccaattcacaagtgagccaaactatggggtattttagatattcagatgaacattcaacagaggataacctgatggcaaatggcagagctggttctcttcaactttctttacccgacgcttttgtagactttaataatgtatcgttcatgcaactgttgcaacatggggaagctgaagtcccctcatcaaacaccacgcttctaagattcgcagaaatggcagcagaaacaccttcaatgccacaaccaccacatgaaatgatcaacatccaacaagattgtggctcaggtggtttcaatcctggtgccaggttcatcgacggcatggaggtaaaccaaattggtcattcacactggcaatttggtaagagttctaacccactgaattatggaagcagcttaccccagacactcggctgtatgtattttttccgcaaagtgacggcagtaagtatttttgttattgttttgagtgcctaattttttactttcttctaaaaactatcaaggcacccttttcaaaatgtttcatttccatgctttgattatgaaggcaaatctcttttagttcgaatgaaaaacatgcttcctgttcagttgtcaccagtaattatgggtttccttgtgtaattaaaccatcaaaatagtaaattaataaacccatgtgaaatgaccataaaagtaactacaaaacttaataagatgagcatctgcgcagtcctatcttagatcatcataaggcttttagtaaagatgctaaacattgatataataagctatagatgaatatgcaaaatacataaaggataaagaatctagataaagtataagacagcataaaaactagataaagtagcatttctataagacagcataaagaatctcacccagaaaaatctctggatacgagttctaaatacataacactgtaaatatgcattccttgatgcatcaccacattgatgaacaacattatctctgcagatgatctctccacaacggccaggccaagctatgatttgaattactcaccaagtaactccaatgctcttacaaatgctgtgaactcacatcacttcacaccagtaacaccaaatcatgttacaatcgagtaccagcggtctgcattactaaagtccacagctgatgaaaccccaagccaggaaagagacacaacacaaaatctagttgaatacagagaagatgaagcaatacaactacattgtgacgaacttttgcaaaagattgttgactcttcgtctgctgccatttctacaccatacaaggaaaacaaagattctgagataattaatctgggctttgatctgaatgagacaccgcaacagaaaccaccaaaacgtaggaaacacaggcccaaggtaat

SEQ ID NO: 300835 - DNA, 3032 bp, Cannabis indica
aaaagtaaaaaaattataaatttgagaatacaatgtaaaaagtcttataatatatttataatttgtaactagtcaaactatttagactttgccattaaatctttgatatatatatatatatatatgatatataaaaataagtcctactagtaggtggaacagcataacagcttgtaggtctcatacaatatatatgaggtagaggtacttataaacattatataaatatttatatatatgtattatatatatatatatatcgtgttcctatgggtttggacaattttaactgactttcatgcttgatatcaaatatttcccaggtggccgaaccaaacaaatatataaatgaaaggccaaatcatgcatttgatgtttcgatattggtggcctaccacatgttctttaagtaattatctcatataccctcaaaagcaaataagcaatacaacaaaacctaatttcactgattagatttgtcttcttcttttggagctcaagtgggaattattagatcatactcgcacacagtcttcccaaacacaaaccatcactctatagtaccaccctattttgcttcaattaatatccttttcacgtgcttccaaagggaacagccccaacaaagaatcttttacaaatttttgtatgtaaatatatctaactataatatataatttcatatacgttagtgggaccatccacatcatatctcattttccttttctattttttcatgcatttgtagcttgcccttaaaactgattataccatcatattatatatcatgtatattttgatgtcttaataatttcttgacatacatatattaaacgggtcattccaaaggcatgcatgctgttacgtttttatgtacaatccataactaattaattccattttttggggggacttaatttaattttatatatatggattgatcagctagtaaataattaaataattaatgaaaattattgtgagaaaaaattgaataatttattttcatatattgttttttttattattattactattattaattattttgatatattgtttaacggtctagtgggagaatggcttggaaacagccttgcttcttggtttggtaattcaacaacatttcgatgcaaagcttcacatcatgtgacaaacacctttaactacctctagtccattcagatcttttggccctatatttcctgcaagttgtttttgtacgtcaagtgcccactttaatgtgtattattcattttaattattaatatcaattttggactctaacgaatgatcaccaacattttctcaattatatgcatgtgaaagaggaataaagttaccatgtatatgatcgatcatttatttaattttaattaatttacaaaaaacaaaaaaaaaagtacattaattcatctttctttctttctttgtttttttttttttaaaaaacccctaattcaaccttaatatatagtctttattatattttaaaaacctgaattcagtgtacaaaatatataatttaaaaaataaataaataaatgattcacataaaaagcataataacctcacgcttagtttaccattataaataccctttatattatatcataatgcatttctgcatatataaatcatatgcactcttttgcagtaatttttgagtgtccgactaaataacatattagagttagtctatattgttaatgtgtggaaataaattgtcatatatataatatgaataggttactccttctattgttaattagtttggagatggaacctcattcatcttctaacaggatgagaccaacaatcattgtagtaaattatgacttaataataactgtgtaaaaacctaatgcatgcaaaatgaacataattgttagcggaaagtaccaatattagtgtaaatttttgagtatatacaaacataaaaatgcatgttagcttttttctacctcttggaaaaatttcattggctttgttagaattagttttatttttggatgataataatctaaatgacatatatgattcaggaggagtatgacagtgagttgtcttccaaattgtgtgtgtatgttttgggtttgtaatcagtcataaatcttacaaagacaaaacactacgggaacaagtatagacagcaaagagggatccgatgttttgatctcaaacagtttgtaccaataattctgctaaaaattttcaagcccctaagagacagtagtctcacacgtgcaagcattgccatgtacacgtgggaagtaagacagaaagataggctcaagcggaaaatacaaaagaaatcactgactttagctttagttttggccaaagatgatccagccaaatctgcataatgatgagaccaatatatattgtctagaaattttcctcttgcaccctccaattatcagtatattgcatttacgtccctcaggtaacaatggtccctaatattctgaattctagtttgtcttgaaatttggaaacaagagtcatttatttattgtacgtgttgttgctacgaatttatattttcgtccttactatattttttctagttttcaaattgggcgtgtctgcacactctaataagtcataacgaattaataacaatttcatttaaagcactcgtctatatctatagattaattaagtgaaaagaagtattattactgacgtggcttgaattttattattattataatcataaattacgttaaaattctcaaaatttttactttactagtaattaattttcaaaactcattttttagcggtaaaatttctaaaactcaaattttagcggtaaaatcccaaaatttaagttacgttagcactttactatttccatttatattttggtgttaagtgccatattagatcactcacgtatatacagtatacacgtagtacaattgtattggcccagataattaaatatttaaaattaaaaaaaaaattaatcaaaaaacaatttttacttttttctgtttcatttttcgtttatcttttttttt

SEQ ID NO: 300836 - DNA, 7745 bp, Cannabis indica
aaaaaaattgaaaagacactaattttattacatatggaatttatttttgctaatgattagtattttttattaattttttatttttgctaatgattagtatttttgctaatgattagtatttttattacatattgaaaaaaaatattgattagtatttttgctaatgatgtattacatatggaattttattaattttttattttctttaagaaagaaaatatttaaaattttaaaaatttgaagaaaataaatacaaaatttaagaatattaaaatagaacaatctccaaattttaaaaataaaattaaaacataataatatatttacatttatatatttttaaattaatttaaaataaataatattaatatttatatatatttccagttataaataaatatttaaatttaatttttgacgataataatacatattcattagtgctaaattaatattcatatgctacttttttattagtaaatttacttaattttttaaataaaaaataaaaatttaataatatgcaccaataaagcgggaatcatactaggaatccctcctaaacaacaaaggtgggattcacacaaggaatccctccccaataacaaaatcagattcttgactagagactctagcgtttcgagctaacccattcgcaacaaaatcgagactacgctgaaaaaaaataactagctcttaaattgaaagagatatatgaatcggtctccaattagcaggacaattaacggtcaaaaatttaacttaagtatttatctgtaatcaagaattaaatttaaatatttaagattattaaagtattattatttgttatcttaaggcaaataataacaacttttgaattgaaaatacacaaatatttgcttgcatagatgatcgaaaacagtggagttttcttttacgaaaaaaagtatatgttgcttgagaagtatagaattggtttaaaataatctatcaacattattttcatgtcactctcaaataacttgtgtaacttgtattgtgtagcttaattcgattatagttatgtttgtttctatttctcatttatatttcaaaagaaaatgactataactagcttgagaaagctaaagccagacgcttcattctaaataagacttagtccaacgattagtttgacgaaaaatgttcggtcgaaaaatgcactatttccggtgactggtgagacctcagatggagtcacatggattcaaatgttgtattgtatgtaatgttcttacctcaattagcctaatctttaaaaacatagtgagaaaagaaagaaagaaagaagatattgatggatatagaaagagaaggaaataatatatgaccttataactggtggtgtattttccagcttaaaccaaaaacaaaatatgtcaaaagcacctattttcagcactacagaaaaaccatcgttgaaatataactaactttttaaccattttttaaatgaccaataaatcagtagtagcacagctgttgttgtagtgaaatttttgtaaaacttttgctccaatgtcataggagataagcaattgaatctgtgattaccttaaaaaccaaaaggcaacatatgatctttctgtgagacggcgctgaagtgagcaatttaagtaatggagcacttgcaaactgggcatgatgcttttcgggtgagccatggatcgatacactgttttaaatgcaaggagagagttattttttgtgtagtggaaaacgttaataagagtcgagtgtgagtccttacatctttgtgaaatttgtggaagcaagggagatgacgaatagtgtccccgacactggggctttctaagcaaattgcacaagcttcatcgaggttttcagtctgtcgaaaacgggagtcaatagctaaaacaatgacagttgtaagcaagataaaatacaccagaacatgaaagaccaacctgtactacggattgaggcaaagtattaatttgaatagctgaagcaccagcatgctgatgattttgctcgtcgagggctaataacatctcataatcatttctgaaccaaaataaagaatcaatgagataaatttatgttgatgaggattgctaaaaactagaaatcagaaatttgagccattaaaatgctgtttaatagaaagtaaaactcttactcattgaaatcacgttgaacttgataaatgtgattacccatgtccccctcattaagatccccgacagctgcttctaaagcttccaatatatctagtctctggaacagaaaaggaagcaaataaacaaagattgaaagtacattaaacaataacagaagatggtgctccaactaccaatagtacctactacctactactcaacttatttcaaatataaaagatggtgcaatcataagaacattacagcggtggggctatctaatctatatcaaagtttgatttcacttatattctggggttgtataaattcgacactgcataaagaccaagaaaggaacatgacaaagggcactgatataatagaaattaccatgtccaaatccatatctaaaggaaatggaatagttctccctctatttgatacattaaaatgctgtctgtacatgcgactcctcagctgtgccattctactggaggttggagcacgagccccgactaatctcctatttggaggattctgagtcctattcgatcggttctgagaagaccttgaccttggctgtctttgtagctgtgacacctctgagcctctctacagatagataacaagctaaattgtgtcagcaaatcacggcaagcaaaataaatagtcattactccaggcaagataatctgaaggctattctataaaagatcctgtctattatgaacattacacaaactacttcaccggaaaggagaagcctacattggcctcttcaaacctttagtaaaatctcaactgaaattagtttaattttacacacacaaatgaatataatcattgaacacctaacatctccaacattgcttaaatttccgatgatatttcaaggacaatagtccaactaaatatacactaatgactcgaccatggattgcaaattaaataccctaattgtctcaaataacccaaatttaaatcactcacgagatatggttcattttgacctgcaccagaagtactaatctcctgtcgctgcaatgcccgtgcaaaatgttcatcaatctgttaatgggacaactattaaatcttcacgtaatcataagatctgaggaaactgatagaaaattgtttactggaaaacgtacctcactgcctccaattataggcacctcatggtataattgttcttgaagttcacgagccaacatctcatctgcttcaacttgtcttgccctgtcatctgaatcatcattatttgtacaatctaaaatttgtggtgaagagtttctgactggagatgacaacacattaactccagtatcttgtcctgaaatgacacgagatcgagaacgatggagcctggatgttcttgtgtttgttgattccatggaagagccaagacacaaaacatctgagtcttcagaaatagatgtagagcattcaccatgattcctagaaggagatccctgtttctttagccttttggttaaaatcgtttctgcacgaggtggtcctcttgatagttccatttgacacacagaaggaggtgctaacacctgatttaggccttctgcaaaaccacattcagtctgagagttttgtctactcccaattcttctgtcgtggtgaaatgaatttctatgaccatccatttgcctcgaatttctattatccagtttccttaaattactatgtgtatttctccaaccacctaaaccttgagagcacccagattcatctctactaccgttgcggactcctttcacctctccagtactagttgcaaaactgctacagatacataaatatgagtaacatctcatgatacagaaaggcagtaggcagtaattgtaaagcagcaatagcataatatgttatgtaaggaaatatattgagaggcttatagtatgtatcactgccaacttttcactaaatatttaaaggtgccaccttcttgtgagataggtgccaaagtgggcagtatctgcataagggttggtcctaacaacaacttaatgccaatgatgcactttaaccatatatacgagaaactaaatataaatagaaactcaatggtgtacctgctagctgcacgaaatgattttcccttctgctcatttggcgtgtcaggaatagtgaatacagcttttcctttcactctttcactactactattctcttctgcaattatatcacgtatatctactacaggttgtggacaattatagacgccattcccagcatcactttgttcaacgtttttggaactgtttgaaagttgctgcatttttgctacattttgtggagagatacacccaccaattaccaaaccttttgtcctgcctccaagaggggtaacagcatcactttgttcaacgtttttggaactgcttaaaacttgctgcatttttgctacattttgtggagagatacacccacctcttaccaaactttttgtcctgcctctaaaaggggtaacagaatgagaaggcttattatgctctctggttttatgttcagaatcaggggacagattgatcacttctctacgaatcatatctaagtcagaacattttgagggatgctcatcaatcttttctttcccctttgaggcatttcttgtcttagaagcgtccggtaccaaagctccagaagaattctcactcaatgctgtttggccttttctcttatcttcagcgaaaatattattaggtggaccatatagacaaacagtacggccacgctcagtgttaccactttgtttcggaaaatcacaatgcctactgctatcttggaaatttgatgacatatcagtgcatatagtttttcctttgtccatgtttctaactccactagcctgtcttgctctgtggccagagccaacatttttgtccaccctcctaaacatgtgagcattctgtgaaccagatgaattttctattgaagaaataacattatggataccgaaatctgcagttctaaaaccttttggtggtttgataactttttttctaccacgtccattttcggggacaaacttatctatggatctcaatccattcatatggttttcataaaaagtatccctagtcttacttccaacagattcagagtctgtaacaagtcgttgtgcagataccctatcaggtgtatcaggtacaactactacactatcaatatccatttcctcccggttgaacatcgattcagctacatccactacattatcaatgtccattttctcctggctcaacatcgattcactaaacctacaactcacattcagttccaatcagtatggaacctcccaaacaagtaacacaagtatcaaatttagccgaaaactataataaaaaaccaggttgaaatcacattggtgcagaaattgcaacaataaatgatctaatacgtaagaacataaataaactttaaataatctcaccatttagacatctactgattattgaaagtaaattttgaaagtaaagtacagatgaacatggaaggtatcatgattttttttacatgcacacacacacaagtcaatctaaatattctgaacatcagaagaaacttaagcaaaattataataaatgccagaaaaaaatcgcataattttacagtaaaatgaagaaactttaacaaagatgaaatcattaccaaatgaaacgtcaggtatagatttttatgtgtgaaaatattctaaaattcaaaaaataaaatcatataaattattttctgaaatgcaaatcaacagatgaaaaataacctacataaacgaaagcatcacaaaaattaactccatagaaggtaaaatttgaactttaaatattcaaaaataaatcagaaaaatcccaaaatcaaaaataataacaaaaaaacaatcagatgagacaaaaatcataacgaaactcaataggaaaataaaataaaactcgattaatagatttaaacaagaaaaaatattattttttcaaaaaattcaaaatcaaagaaaaggaaatacctgaagaaacgtcgttaatgttgattgaaatatgaaatcgaaaagagaaagagattatggaaatctgtgtctctggatcgattatggaaaagctttaatcctatctatgagtgttgctgaaaatccattactcaaattctgaatgaatgaatgaacgaacgaagctctccgcccttctgccctgcgccttcaaacagaatcgggtcgttttattcggattcggatctctaagtccgtagcccaataggcccattaggtccggcccaatttgtatatgatccagttccaaagaagtggagatatttgcatgggataattagataaagaaccatttttaaagaaaaatgaatattgtttttaaagaaataaccaaaaaaaaaacacttgtttcagtttaagaaagcagaataaaaaagaatttgtataacttaatacatatagatgaacgttaatatttactaattatttgtataaagttatttttgtaaatagattattatttttttttaataaaattgtaaatagattgttaattgtgtatattattgaaaaaattccttttattttattatgtaaggtaataagaaaataataaataatccaatcatttctatcactaaatattttaataaaataaataattattaaaaaatactattggtgcttagtacttttttcggtgtcaaattgcttatagtgtaattagttatcgagtttcatataacttaagaagataacttttaaaaaatatcgtaaactaattgtgaagtatcacctataagtgttggatactactggtacttaatagtaatgtataaaataatataaatgatataaagtaaataaagaaataatacatttatggtgatataaattttgtattataatctagtacaatatttgctacataacaaatttgcattactttttaacacaatattactaatttgcttgattaaaaatgctcttaacacactaatgttgagcaatgttaaatataattgtaaaaggatagattaatagaataataagttgacaaaggatgaacatgatagcttctatcaacactttcctaccacctatttagtaaaaagctataaataatttggtagagtttgaatcaagcatgattagcctaagtacgaattatgcttgttttagtatcatgtctcgagtgttttaaattaatgttatatggttagttgtgtcatgagaagtagttgtgttttattttatgtttttgttgaggagaaaaaataagtttattttaatctgttaaaatagttgttgtaaaaaataaaacgaacaaatttattaaattaaaagcacaacatgagaacacgaaaatataaacttacaagtcctacaaaatttgcctttaaaatattaacccgattcgactcgatttgactcaatccatattattacgggtttttcaaaatacgagtgagacctcacaaggtacatttacatctatactaatacaaaacacaaatattgaccagttgaggctagctcaagtggccgtaggaggtatgtgtattggaggtgctgggttcgaaatcccaagttatgctgatgtaatatat

SEQ ID NO: 300837 - DNA, 4884 bp, Cannabis indica
gtaaatggatttgtaaatttaagggttttactttttaagaactaatttatggtattgttttacatagttactttagtaaagtaaataaaaataaataaaagtaaaattttatgtaattttgaatttaattcaatggtcaaaaatatatatataatataatatttttattttaactatttaaaatataaatatactttattttgttttataagtacatccagagaaaaaaaaacttaaattaatttaaaagttattctatatatttttttttcttttttttttttaaaaaatcatattattctgtattaattttaatatttttttcatattttttttttctaattaatgtattttctttttatcttttttaagaagattgtatataattttttaattttatgttttgttttaatatttaaaatatattttattataatttgaaaatgtaaaaaggatgaacaaattagaagaatagatatatattatattttttttttgttaaaaaatatgtatattttatatataaaaaaaataataaaatgagtaaatctataaattatggtgcaaataaaactcaatgtataattttatttttaagagaatcatctagctcatgacttttcctctcgtaagatcatttagcttaaaaatcctatcagaccttgaaataaaaaaccctaaacttcaattttttaatttctctctcagaaacaacgacacaatctctcaaatcattctctcgccctaatccaaccaaataaatctctgttcttctgaatctcatttttgttctttctaactcggcctattattggtttattctgtcaccaactgatcgaagaagacgaggaattccgtttagatgtagggtttgtgagaataggtcattggcagtggaactgggttcactattaccttcgcttcactcattggtcggattaaccattacttcactaacaggtaattggatttgggattggttccggaatattgggtctctcagtcgttgagttgtatttttcctagtttcttattgttcttttttttttttttgatctttcatacctttcttactttaaaacataatcgacagaattatgttaatcagttttctaacatttaagtttacatcttatacctggtcatcccttaactctgttatctttcaggttttgcagaagaagtgctgcagtcaatggttcagattgtaattacatttggttcaaggcttcttaggcactgagtaaggctttttttttgtaattggtatttaatttcaatatggatactaatgtttaatctgtaaaaacttgattattgatcaccatgcttattggttcaaggcttcttagacaaagatgtctgataaacgtgatctataaaacttaattatttgtggtagtcaattccttgaggtttgttcaagagtttcatttaattttgtagtgttttcaaaagttctttgtctttgtatttattttatctaccatgttgtgcatttgtctaatttacttcaatcagcaaatgaaaattggattctttgattacaaatatcattagaaaattatcatttattattaaatgtattttagcacactactagacatgtattactatttttcttggtagctagaatgttaaatttgcttcactatttgatttgtattggctgtagttatttattgatgtaaaggtactcttgaatagcgcggtatcgctcacctcaagtgctaagtgccctagaatgcctaaatagtaaactactcggtagacttgtgttctttattatgtgagtgatagattgtttgatattttatttatttattcacatatatttattttaaaacttaatgttataaaattaaagtctaagcatttgacttttgggaataaactcagttaacatatagacaatggtatatatatgctatgatgcctaggttatattcaatcaaattcaagtaaatttctgtgacataacatatctaagctatgtcgtatactctactaaattattttgacttaggaactcatttctaggtaagatcttatcgtgctgtggcaatataaagaagaaaacttgtatgctatttgaattgatcttgatagatgattaggtcactaatgtaagggtagtccgttaactatttaaaattaaaccatgataattttgtgtgtgttatattatttttgtttgtttcatttccatgaaggtggttcatattctaatttggttatgtcatcatattaaaaaagggaacgtaactttgtcaatttttatatattttcttctagattatgtaattgaacttctgaaaatagcttttacttgtttgtttttcttttctacttttttagtcataatgacaatttatatagattagatgtcaacggatagattattcctgaaatataaggagggagttgagcatttcttacaattttgttcaagaaatgctcaagatcctaataacattccttatccttgtattaattttgataatattcagagggcaaaaaatatgaggtttggggtcatttacttaagtatggaatgcatataagttgcataatgtggttattgtggctgatacatttttcttatgtgtatatggatgcgtgtaggtgtatttgtgattgtttgtctctttatgcgcgtgttttaagggagtttaagtttatccttatttatgtataagctcagtgttttcattcgatgtgttttaacacattactaaacatactttactgagaaagataaccaaaatgttgtgattgtcgctcctaaaatttccttttttccccatcagttatttgatctgatttagtgtgtctaagtaggacattttgatgacataatagggtacagtgccatttattgtatttaaaatgctgaaaggttatttcagattaaattggttaaagttttattgttgatgggatatttatgaagctcactcttattttccttttatgtatttgtgattgcagaattaaatgaaggggaaaggattgtttagagagcattctcctcggagatcttcttttgggaagaaagttagaggggatactagtaatgttgttttcattgatctcgatgatgataatgttgttataggggatgctacaaagtcttcacaagagaaatttaattgttccagtcagcagagtaaacatgggaaagttttgttccaagacatcattaaccttgatgatgatgatgatgaggacaatggtgtgggtcctaggattagtgttgatgttgatggggatttggttagtgatgccagctcaacacaaagtcgatacactgcatttaagactatgagtaactctacacagtcagatgctgatgaatgccaagttatcccggagaagacctctacctttcagttctcgaagtgcaagcaaacctaccgtactagatcctctgcgcctaaaattgtgcagaagaatacacagtctgatactgacgaatgtgaagttatgcctaaaatgaactctgcgttccagtcctcaaagtgcaaacaaacctatcatacccgagtttctggcagaaaccgttatggtctggaccctgactttgagaatgtttcaactgatggtgatttttctgattgtgtgttaatggaagattccttgggaaaggttcgtgaacagtgggaaagagcttcccttaagagaaaacatgttccaaatcgaaattccggtttacagggccaaggtagtgcttctagctcaaacggtgaggttcctacaacatttgggagagaacatgtagatgtacctgtttgttctagttcaaacgataaaaattttcgaaaagaaatccggtcggaatatgttacaagtaatgctagatatgtggagaggactttcaaacggcaagcagaaagtgtacccatggaggaggatgagagagttgagcaagaaaatgtttttcaccagaaacctatgtttggacaggaaacaaaatgcttccatcaaaatgctgattttcagcctggaggagatagttttgattgtcaaagtaataatgtatttggtaatgacggaccaagtccccaagggtcatttcagcccgggggaggcacagttgcagaagatccccaaagtgatgaagatatttgtatgccttatttttgggatgaaggacctagcccacaaaatacatttcaacctgcggaaggcacagctgtggaagaaccccaaagtgatgaaaatgtttatatccctggttattggaatgtagagccaagcccccaaaatacatcccaatcagtggaaggcactgttgtggaagatccccatagtgatgaaaatgattatgtctctagttttcagtatgaagaaccatgtccccaaaaatcttcctctgggaggtctgagcaagatgtgggtgataaacaatctgattgtccaggagctctttctgagaaggacaagtcagattctagacaatctttatttaaagatgcaagtagtcatgcgcaaattagccaagttgattcctcaatggaagccaaggaaccaaatggcagaagtcaactttgtagtgttgctattccatctgctgacagagatataatcaatgaacgggaaaagctcaaggaaactgatgagtacaagcgagcaatagaggaggagtgggcatctaggcagcgagcgataaaaattcaggttttgttttcttgagctgtttattgactccttatagttgtgtttcaatttcttttaattctgttccaagccttcatagtaaattgtagattgtggatttattgaatttaacacagcatcaaacactttctaaaggaacagtttcttctcccctctcttaaataacatggttctgtattaaaatcatatcagttattgtcatac

SEQ ID NO: 300838 - DNA, 1419 bp, Cannabis indica
tttttttttaatttaaaaatattcccatgagaacaaaattcttactttgcacctaaattataataaagtgaaagaccccaaatcacttaatgcctaaataaaattccaactatggaatttaagcatattaatgctgaaattttacaatataaaattaaaacaaaagaatcttaatataaaacctcaaataataaaatgccccccaagaccttaaaaaaaaaaccccagatccacaaaaatgaaaatttcacaaaattaaaaaaagcccaaaatccacaatccaaaattaacaaattccaatacatgaaatcaacaaaaagttatcatttttcaaacaaaaaaaaaaacaagtagccgatcatccacaaaattaaaaagttacaaaatacctacaaaatcccaaaccccaaaaataaaaatctcaactttaacagaagaagaagatgatgatgattattatacaaactagagttggggaaaattaccagctcatgcaagttgggaaaagttgggaaaagggtgaagaaatggtgggatttggaatctgtggcttcgatttggtggaagaaaaacaccttcagcaagtcaaagaaagcagatgcaaaagctgagaagagaagaagtgagaaagaaagagaaaggagagatctttgagagagaaaagaatatatgagatgagagagagaaagtagagagagaaagagaaaatgggaatggagcccaatgagcagtggtcaaacctaaccaaaaaaaattatatatttatatctaaaaaaacaaaccctaaaaattagaaattaaaaattaatttttttatttaattgttaattaaaaattaaaattaattaaaattattcattcattcatccaaaattttatcttcttaaacaatacaaactgattttttctttcttttttacaattttacccttttaagttgtggattgttatattttttagtctatatttatataattatttaaatgactttgaattgaatttctcaaactaggttgttttttttggttgaagattatgtaataaaaaaaataatttgttggaattttatttataagatattgacacatgggataggagtagagttttgaaatcctagatttaattaggtggcattgaattgagaccaagatttgaaatcatgggatataacattgtttttcaataatatattttgagttttttttttgaaaaaaaataccaaaaaaaaaaaaattatttgagtgtctattattgaaattgtgttggggatattgatttattcatataaatagaagatactttcatttattgttaactagtgaacaaagccgcacttcgtgcggcatgtataataatttcaaaatttttattcatagtaaaaatatttttttgttaggacaacaaaatacaacttttttt

SEQ ID NO: 300839 - DNA, 3945 bp, Cannabis indica
tttcttactcagactaaatattttaacgtttgagcctttaatctcctaaatcaaaatcagtttaaactgaaattgataattctcaaccccaaacaaatgaattttcctaataaaaatggctaattagtaatttttctccctaaattttgacatgtaccaaatcatgctccctgaacttttttggccgttaaaaattccctttgaacaattgagattgttaaatttaggacttttgtctaatttttagaaaaaaaattctaacatgattgaaaattcaagggacatgatttagtaaatattaaaaatttgagggacatgatttggtagatataatagtctggggaatatggtttagtatataagcaatcactgaaacagtaacattgaatgaaattaaagaaaagtccttaagtttaacaatctcaatagttcggggggaatttttgacggccaaaaaaattcagagacacgatttggtacatgtcaaagtttaggggcaaaattactaattagcctaaaaaaaaagtaaaattaaggggcagacagattccgtacacattagatttattgcaatctgaaatgggtgataaacagagtatatcttttctaacacgtataaatttatgttccaatcaattatgtatataaaattagaaaagatattattgtgatgaagaattataccaaacaagtgtctaatttgaacagttgggaaattttcacttcctaaattgactaactataacactttcactctcactcgtaattgtaaattcgcaatccagcctagtttgggccggcttttatttttggctatcaatataagtgaaacctaataatatttattctacaacggtcattttcaaagtaaatgagaaaaaaaaatctcagaaataaattgaatgaaactgtgaaaacagttgtaagagaaaataaaagtaaaaagaaaaaaataaaaaaccatctgtgatgatcatgatctggttagctgcacaaggttgatgaaactagaccaggcaaaacagctagtggggcccatattttaaataaccccaaccgcgtgggcaacagagatagagagaaggacttgacgaggactttctcactcttcctcctcctaaccagtcggacttagaatggaaactctctttccctcaaattccactcgtattactctagtggttttctcaggtaaaactctgaccagtcacatgggcaaatttgtcatttcacaatttcttaattttcgataccaataccctcttccacccacagctataggctatagctgcctcataacccagtttgagttaaactagcttcctcataaccattccgaaagtaagaaaagaagagagagaagaaaaaaaaaggggcagtttttagggagaaaaagagaagaatgtgaaaggcattgtctaaacgtactctcgtattagaatacagtcagcacaaagtttaaggcgccggtcttcctattatcatctcactgtcactgtttctacttaacttggttatatattggtgagtctactttgagctgttcctgtacacaacaaatacaactacgaagctatataaaatggaaattatgtgcatattcgtaaattaaatatctatatttggtaacttagttcattttatggatatgtctttgttcattttgtttcgctgtaggttgaaaccacgtcgtacacagttgaggctagctcgtgctgcgggaaatatatatatatttatagaaagaaattaaaataggatgttagactatgaatggggaagagtgtctgcgatgatgctcacgggcgaagagcaggaacaccctcctggatccgaccctaaccgacaccacattctcgacaactacgctaacgccgccgctgctcagacagctttcagcgacaacctcttggctcctcagctcggaacaaacggctccaccttcgctaaccaccacttcaacactacagctacgcataatcagaatcaccaccatcatcacgattcccaacaccaagtccactctacccaccacgtccacccatcgttgtacgacccacgctcctaccctagcgcgtcttcctacgcgccgcaacacccgtcgatgctttccctcgacaccgtactcggtgggggaggaggaggaggaggcggcgggcacggtggatcgggtgggttcatgttggtgcccaagagcgaggacatgtgccgtccgccggtggatttctcatcaagaattggactgaatttgggtggacgaacttatttctcttcggaggacgacttcatgagcaggctgtaccggaggcccaggccgcttgatccaggctccgcccactcacctaggtgccaggccgagggatgcaatgctgatctttcccacgccaagcactaccaccgccgccacaaggtctgcgagttccactccaaagcttctaccgtcattgcagctgggttgactcagcgattttgccagcagtgcagcaggttgttgttttgaaatcactgaaacagaaatacccatctcccacactttcccaaaaccctgagaatgacgattataaaattactaaaatgtcctctagccgttgccaatgattgcttttaggaggttataatcccgatgggccttccgtaaaattgtcctacgttttccgtttttacggtactctgtgttcttctgcttctttctcgtagtcggaagccttttcagtacttatatttaattatttttgttaagcatattaattttaataaaacgtctgatttgctttctaagctactcagtcagtttttatgaaatgacaaaaacacccacgtgtttgctcgtaattcattctcataagcttagaactcctaaatgttattgttatgttacgaaaaaagccagcggctgtcgctgtttgttttccggagatagttgaactgttagaatgacgagaatgtccccgcagatgaatcatcgtcctaatgattggtttcccccgtacatgtggaaatcccgagggcatttgtgtccgtaaaccttttataattacaactttccgtttacgtactgtttataatcttattttacttcatatggtaatgttagaacagtcgataaggaattaatattactaattaattaaatacattatcttttaactataatttaacttaatttctgttaattactcttgcagattccatatcctttctgagtttgataatgggaaacgcagttgccggaagagattggcagatcacaatcgtcgccggcgaaaaactcagcagccaattaatcaagaaaatcccaaccagtcttcacaacccgattcaaatacccgacatccatctttagataacgtttcaagtaagcttatatttttgcacatgaacataggcactctttaaagtttttaattatcaaaattacaactacatattttataataacattgcatactgacaatgatacataatcacatgggatttggttactgagctaagtttgaattttgtaggatccccgccggattctggagctcaatctacgtcgtcagttactgtgacactgtcgcctcctcgaatttctcttgattgttttcggcaaagatcataccagacgactacagcttcttcaggatcatcaagctcactctttttctcaagtgggtagaaaaaaagaataaataaaaacaagggaccggatcaagtatatctacgtacgtacgtatgggcttaaagtaggttccaacttttatggaggattttagccaaataacatctgttttaagtcatatctagtcttagttttcggtgaatttaagtttgagtctaatggagcttaattatgaagtctttctctttttttccttttgtgtttttttttccttgagatggaatgaaattccgaattgcctttccgctcacctatgatcaatgtaatagttggaaaaaaaa

SEQ ID NO: 300840 - DNA, 5202 bp, Cannabis indica
aaaaatatattaattaaagctgaaaaaaaaatttaggaaacccctatggagtgggttcatataaaccctttagcgtcgccctgatcagcgtcggtagcgaatttcgcgaaaaccgacgctgaaagggcataaaaaccgcctctaaagggggtttttgtagtagtgtatattttttcaactgaataaaggtctgatactcgattttcatatgtaactattgtcaacgcgattgcaccacaaaaagacaaatatggcgccgacaattgttaaaatgatgaccctaagttaaaatgatgcttttcattgagtaattcacattttcggcacatttaaatgcaccagtaaaagttttccgccctaatatatttactcacgcacgcgagaattttctacaaaaaaatttcggatcactgccgtcgcaaaaatgatttgccaaaggtcctataaaactatgctatttaccaccaatttttattaagttttgctggcgcaaaaaatgggccaggaaaatatatttttaccaaatttttccagacaatatttcccaccaatttttttttgactgttatcggtgcaaaaaaatgccagttaaaggtctctcacccgtcaagatttacctacctcttttcaatttacacccaaacttgtactgacgcatttctattatttttccagcgcaaatttccactgacaaaatttgggctttcacgtaccccttcttttgctggctattttttgcggttactttgactaaatgcgctgataaaagtcacatttttagtagagaaataataaatttcccatctctttttggttaaaatataacttaaatacgttcaaatcttgactctttaggcctatgggaaacactttctggccaatgacgttggaggaaaaaaatttcactctcaagaaatcaacttccgaacccacttgattagccattgaggccgcagtggaattaaccgagccaatggtcgagctctcaccccacatgcatgagattttgattttgctaattcgacatcatttaataaaacgcccatagctttctcacttgaacttcaaatgagataattcataaagtttagaaagatatctataaattatttttgaagttttgtctaaaagggaaggaatattcatggtccaaattaagtttgaaattttatactttgggtaagtaaaatccaggtcatcagacttgtgtaagatttattaaatccatctcaattttgtagtcattgtatcattttgtattctctttcataattatttattggattttcattttcactctcacttgctatttctcttcactttttctctcctcaaataaaataataattaaatataaggtagtaacttcttttttttaaaaaaaataaaaatatatttcaatttctataagtttataaattccaaaatcaatattttttacaaattgtcccattcacaattgattaatgtatctggtagggaagagtaacacaaatcaccaaagttattttactcattacaaatgtctattaattagcaactaacagaaatccatagcaactaacaaaataatttaaatcggaacgaaaatccacatatagcaacctacatggaaaaccagagtaatccaaagcctaaatttaaaaaaataaaattaaaatatagtataatactcaaaaaaaaaaaaaaaaaatactacacatattccgtctaaacgaaaatgatcacaacataagtatatgtcacctgtatatatttatatacatacataatcaaatagaagtttactttaatgcgaatggtccatcaagtatttacatatatacataatcaaatagaagtttactttaatgcgaatggtccatcaagttgatatttgaatgagtcaaattttatttattgttgactgaaaaagaaaaggaagaagtttatttctatataactaaatgtagttactttttcgcagttgtaagatgttgagctatatacatattactgattgtgcttaaaaactaagataagagaataatccaaaagaaaagatggcccacaaaaattggtgattcagagtaatagagtgctagaatccattcgagatttatttcgataaattaatatgtttggatttattcttgttttatattttaatatctggaactttggagggttgtgtaataggagaattcagaggatacttgccaaatttgtcgtggtgtttgttcttaaatgcaacaacattcttctgatgatattataaacattaaaaaagataaaggaaaatgtaagggtctcagggtctctgcagctcgtccttactatatttttcttattattacctcatcacacacgtaccattttcatcgttttctaacaaattaattgtttgtcacattaaaattattataatacatatatagtttaaaatatagatcaatatcgaacattaatgctttctattatgtcaatcttaccaaattactgttcattctttaattatcttgatcttgtgacactaataagtcaataatatgtacatatactattgatgtatttgaaaaaatgctgtagttacctagtacaaatttgttatgaaaagaagcatgagtttggctcgaaattatttggttatatatgtggagcactagacaataattgtacgttatttattatgtagagaagggaagagacatgcattactacatatataattgggttgacctaagcatatctagcgctctggagctaacaaacgatcattgtaaacaatgtctttgaatatcataaaagtacttagtttgaatgatttttaattttttcttattttgttattatgtatatatatatacatttatatatatatatgaaactctcgaatcgaagagacagactatgatgacgtatatatgagtaataagatgtgaagttttgaaatcgtggcatcccattccaacctcaccactaattttatttcatcctaggaaaaatatctctaacaagtcttgtaaaatgtactgtcaacatcatcatgtagatatacgttcaaataatttagtattatacagaacatgggaattcataatatataaatattattttgcttttgttggcgattcttgtcatgcatgctatgctataaataggcattacagcaggaaccgattccgaccatgtttgtttagttcaagtttatttctttggccatgtccactcttttatagccgttatttatttcttttgaaataataaactcattaattcgtctttattacttgtacttatcttttcaagaatataactagtttatttcggcaaggtagatcatgagattatgcttgcacacgtacattatatatttatttgtattgaaaataaacactttgtatacaagtgcgcagaatctgtggcttcatgattttagtttgaataaaagtttagatttaccccggaaaatctacattttttggtaaatatagccaactgtccagcttctttctctctatgttttgtttataattaaaaccaaaaatatatctcattattttaatcttctttgagcggtctaaattaagatactcatcgcctcccactcatattgacatttaatgtatattgtagttttaataagaatttagtctatatggagaaattttaaataatttatggtgtcaaaaatgatattaaagtaaaacaagttcgagtataactttatattttaaaatggttacacttaaaaaatgtttttctaggttctttgggtttcttttctttccctccctcttttacatttaatgcccttaactgccattttaattcctctgtcatgatgattacgctcctaatatttaaaattcaaatcctcctttcattaattgttctcctaaccattacttttgacagcacatgttttatcacatttaatatttatggctccaaccccttctactctctctactcggatcatccaactgtaaattttagctcttggaggccacagagagtaatcattactactcaaatgatagctactctagttcagggagaatctgagcaaacatgcactggttttttccactctgcagaaaatctcttcatctccaggtattatctcctcactctacgtttttacaatttaataaagatctgggttaatgattctgcatgcacacgttctctagctttcacctacctaagttctcaaccttctcctatggcgtcttccttgtcccaaaacccacctaccaccttctcactcactaaagaagaaaaccgcatccatgtcttcgatcatgtttcccttaactttggaacatcctctgattcccattgtcttgttatcaaaattcacacttctaaatctcctaaaccctactgaatcgagaaaaccatgactaaggcatgggctctccgtttcccaaccactatctccaagtatcactcaagattgttcctagccactttccagggtaaaggagaagtgttctggaagaccaaccttggcacttcgacaaaagcctcatgatcttcgccaacgcataagaccttgacaccctcacaccagaccaattccatttcgtccctttctggatccaagctcactacattccttttggccgaaaatcttcccaacttgcccagttaattgctgatgagcttggggaccttataaaaattcacccccttttaagtttcgttccttaggatcagaatcctccttgatatcaccaagcctctcaggcgtggtatgaacatccgcttttgtatgatcgccaagactaaatggctaagttttaaatatgagtgactacaaaacttctattatttcggcagcatgctcgaccacacttataacaaatgttgaagatacctcatgagttgtgataactttgtagtcccccctaaacttggttataaggaaaccctccgtgttcctgccaaatgcaagtttaaaaagaacccctttgatctctctgattgatccaccccaattgatgaatatctatcccatggtaatgactctgacaaaggcctttaacaagtaatggattaatttttgaaccttgcttctgacttcactgctccaaccctcaatcgggacataaccgatgctcctaatgaagtgcatacccccaactagattgaatatggctttttccactctttcaccctcccttgttatggtcacttctgtgatcactcacactg

SEQ ID NO: 300841 - DNA, 1770 bp, Cannabis indica
tcagcattccaaaggcttgagtaaagcttcatggcttggtctttagggaatggaatacccttgctctccatgttcttgtattctctaattggggtgtcatcaaccaaccacctaattacacaaacaaattaatcatcattatttaacttgaataaaaacaagtaaaggtaactagttactttagagtaatcaaatgggtaatcaattatctctttagatccggcaactagttactttatattgtttttcttatattttcttttaatatttttttaaataaaaattcccccatatataaactcaaattttaggatcattacattggatattagctagctattgtaagcccttgctataaagtgatcatgttaactattagtatagtttatagatatatatcttacatatataatatatatgagagaatattgttacaaaattatatatatacatatatagacttacacaatgtgatgaggactccaaagaatggagtatttgtgaaaatcagcagtggggtcaaaccaaaggtggaattgttgctctcttttaccttctccatcacaaaacacattagtatgaactgtgtaaggttgtccactaacatttcccaagaattcaaaatcaatctcatcatgtccttttccttgtgaagacaactgatcaataatcataattaacaaaagattattagtataatcatttaatcaaatatatataaacattcaatccaatccaatttaattaaaaaaacttacgaagaaagcagtgacagtgccagctgagttaccagcgacaagtttgatttgcatatcgatccttgcaaagagatatttgtcatttgactcgaaacccgagcctgaaactttgtcaagcatgacattaagaagctggccattgttgagtatcttagatcgaccatttccccatgtgcagtgaagatcatcaaagagattaccacccaaaacaccaatgcatgaagagctaataacacttacaacaaaaaccaacaaaaccctagtcgacatcttcatggtatgatattgatatccacttaagttgttgttgttaatgttgttgtttgatgagttttgttttgacatattgtaagcttgaaatgtttcatatttataggttataattatgacttgatcatgggctttcactatcgatcattataattattattattattatgattaattctattattgtaagaattttattagttgtgaagtagtagtctaaaatgacttaaaacaaccaactcttcaaatccagctagctatatatgcctcaccactaacttatcatttaatatataatgaattaattaataaatgaaagaatgaaatcctatttaatagtattttacttcatttttcagattaatttttgttcaatatacaatccaatagtgtcaacgacagaaatataatgtgtatatatagataaattaacaaaattctcaacgtggtaaccatacgttcacgtaggaaaacgccacctacttttcatttaaaaattaatatattaattaaagagcatgtatgacaaagaaatttactttgaaaaatgtatgtacgacagtaaaattgtttgtacgacattgtagtttttgtttcgtcaattgggcctggacttgttatagtagggaaattttcaaaaatactggaatttgagtcaatttttacaaaaatactgtcctatgaaatttttttctaaaaataactgagtttttattaaaacatcagtaaaacacaaagcaga

SEQ ID NO: 300842 - DNA, 2893 bp, Cannabis indica
atttcaaaccgcattttttttgtggtgcgggcggtttgagcggtttgaacggtttgatgtacacccctactaatggaggatgtttttggataggcttggtccagtaagtgtggtctccacagaagcctctgtgaatctcgtgtatgataaaacgtatttcgatcccggctatgcacctcaagtatagcacagacaacccctatggtaaagcttcctatctagtatcacatatcgaggagcctggtactagaccttccgagaagaagctttgtccattgaaagctctccaaaatttaagaactcataggtgggccatatccaggagttaaaatgatcagcaatgacatttacccctatgttttaatgcttgatgtttctaagtgggccacaggcacaactccatattgaatgatcttcgggtctgtggcaagttttgcaagcatattcgcgaatgagttttggtcccaggagacttgtcaaatgttgtagcctttaaacccttgcatcatctcttgggacatcatcacataggcaaccatcctttcaccctttgtatgacattccctagatatctgatttcccaccaattgggagtcactatgtactttgatacattgggctccaacttccttagccaatcgtagtcctgctagcatggcttcgtgttcagctttgttgttggaggcatggaatttaaaacggagagcactttggagctaatgtccttgcagagagatcaatatgatttccactctagctctttttttcattcaatgctccgtcaacatagtctttctaggtaggtaactctgagactggcttgtccaagaggtcacttaatttagaacattccaccacaaagtccacaagggcttggcctttgatggataccattggctgatactggatgtcaaattggctaagttccattgcccattttagcagccttccagatgcctccgctatttcaagcacttagcaaagaggatgatttgctaataccttaatggtgtggacttgaaatcaaggtttgagctttctagaggaaactagtaagcaaaaggttaatttttcaatcaagggatacctgaattctacacccagtaatcttttactgacgtagtacaccggtagttgggcccttcattcttcttgcactaaggagacactaccaaataaaggtataaatctttgccttctactagctttgaaggataagagctttggtcagatgctccttttgttttcggaaggtttcttcacattctttagtccatttgatttctcgtttcctcgcaacatgttaaagaatgggatgcacttgttcgtggacttcgagatgaacctactgagagctgcaatcctcccagcaacactcttcacatccttgtgcttttgggagatggcatgtcaacagaaggtttaatattctttgggtttgcttccattccccgggagctgatgatgaaatttaggaacttcctagaggagacaccaaatgtaaatttcttaggattgagcttcatctcgtatctttagagaaccaagagggcttcctcgaggtctgtactgtactctccagttgtcttagatttcactagcatgtcatcggcataaacctccatattgcttcccaactgagttttgaacatcttattgactagttgctgatatgttgctctagcattattcaaactaaacgatattactttgtagcaatacacacatttatctatttggaagttggtgtgttcctcatcggctatgcacattttaatcagattgcactaagaataagcatccataaacctaagcgatttgtacctggaggtggcatccaccatctaatctattcacagaagaggggaagcagtcttttggacaagccttattgaggtccatgaagttaatgcacatcctccacatgtcattgggctttgggactaaaatcagattagccaaccaaacgggatacgaagcttcctagaggaagtcattcggatggtggtcctggaaggaacctactcctatttcaaatcagattgttgaaaaggctgagcctctatgaccactcatccgctagaaattgcatggctttgagaagcctccctggaggcctttgccatctgaattgagtttacttagcccgaggagttccttgggtgctagaggatgagtgagagctaggagacctcggcttacaaaccctcttttccctgctcttggtcttacctttccctttgcctccggtagtctgggatacagtatggttgatggagtctactacctaattcaatattttggactctgacatttctgcaacataaaaaaatcttggcataattttacaacagtaattaaacaacatactcaagcaagcacaaaaaaacatcaacgaagattgagacttttgtttgggtgcaaccattaagtgagctactatacggctttccctgagaaaataaaaccatgttttcccagctcatgaagttgccatactctttgaagcctaggaaagacatggacaggaaggaatctactataaccatatccggagatggagatgatatgtgattactctgacccctaatgacttcaactatcctatcgaggctggggatacgaaacaaatagaagggccttgtacctcttcccgaggcgctggctctaggagcacctgttgaggattattttactaggatctagattaattatcatgtatgttatttaacatctcctttctgtagcagagtgtcaccaagatctgagtctgattctccttcagttgaattagattcttcacaatcttacacactatgattgagtaccgacttgctatttgtgggcatgtactctatcactatagggttcgaaaattgaagagagaaagaga

SEQ ID NO: 300843 - DNA, 1985 bp, Cannabis indica
caagaaagtaattaacaactagtgatttgaagagaggtcattacaaaatcacaataaaaagctttttaactaacattcaatgaattgaatcattataaacatgaatataacgagaacaagcaaaagccaaaccatataaaaaaaaaagctactcgaatgaaataacacaagtattaaaattgcggcgtaaaaactatatcatactgtcgtgacaaaattaagaatacacatttggcaatagttataagcgtcaatgaacataaagcataacatcatcatacaaaatacattgttataaagtctcactaatacaactaatcaatcaatcgtaatagataatactttgactgcagcattcaatctagaaaaaatcacaacatgtaaagaatcccatttggctctacatataatttaacaaggcaatcacagcacagcaaagcatcaaatacaattcaatttaagaaatcaaacatattagaccaatcaatgataattttagcttaaatgaagaaaagtattagtattaccttagaaatgggctttctcttctgctcgagcttctctgccttagacttcacacgttgagcctcagccaacaaggacatccgctttgcagtcttggcatatgggttaagcttcaacatggcgttgaggtttttcagagggttcttcttcaatggtgccctcttggactccttcttaatcggccttacaacagattgaacctcatcagagttgataattctagccaaatcagcattcaccatcttagacctaggcagcacgtatgatttcttcttcaaagaaagcttatcaaatgaaccatagatcgagtcaagcttctcaaaagcagacttggtccagattacaaaccttccaaggtgacccccagggcaagcttaagcaaattaagcctttcaacattaacgatatcgacaccaggaatgttcctgaatgccttgacaagcttcgcaccctcagttccataaacaataagaggtcccttacggttaatgtaacgacgattcctcatcttacccttaccaggacgaatcgaatggctgtccttagccttctcagcatcttcataagcgccgatctgcttcaagaccttaattgccgcagatgtcttctcgacaccctcagctgcgtcacttatgaccaaaggaagttcaggaacagactccactctgtgaccacgagccataaccaaagagggaacagcggaagcggcaatagctgaaacgacggcgtaccgcttctgattcacattgatctttctatgccatcgacgccagatcttggtaggagcgaacatgcgtccaccacgacacatgttaccgaaggctccctgtccagcacggtgagtaccaccaccagggacacgggggatacgagaaacagcacgaccggtaccccatgactcggcggaggtctggtgaccagctttcttgctcacagcgtaaggctgcctcttgttttttgagatattggagtggacgaagttaacgatatcaggacggatcgaggccttcatgacgtccggtagtgggacagttggtgcagagtcggtggccatatcgccatcaagggcctgaaccgtgactagaggtcgagcagcggctgtggcggccattgataggatcttcaggggggacaaggggaagggggaaggtttctagggttttttatctgtgaaaatggtagggtttggagaaaaaacgatcattatataggtagtggcagaaactagggctgtttgggtatggatttctcggtcctcttagtaagctgtttaaggctttgggcttgtgtgtacgttcatttttgggccatcaaaacaaggtatatcaatttgccactttaacattcaattacagtatatttacctgtagtcacttgtatttctttatcctttataaaaaaaaaaaaaaacataggaaattagactctataccttttttatattgtcttctttattttta

SEQ ID NO: 300844 - DNA, 2750 bp, Cannabis indica
atatttaaattaaattttttaaagataaattttgttaatgtataaaaaagtaggtatttttcaactttatatgaacaaatctattaaattataaaaataatataatttcctttcctatattattgataatcacattacaacttccctttaatgtatttttatattaatactataatacctaccataaatactataataaatgttacattatatagtgaaattaatatcattttcctattataatacctttctctttgtcgatctaaaaataagtttaacagagaatgtgaaccattaacagtccagtattgatacaggataattaggttaaatatcattttgttaattatttaatttttttaataattttcttttttatgtgcaattttattaaaaggtaatatttcaccattcttttattcttaaactctatttgtttttctatatagaaatgattatgatctcatcgttatttatgggttattatttctaataaatgttttatcgttatttatgggttattatatctaataaatgttttactagagctgaacattggtcaggtttaccgaatttcgggttcgcgggtttcaggttcaaaaaaatgaaaccgaacccaaactcggataaggcacgggttggcaggttggcgggttttggttggccgggttgacccaatcaactcagtcaactatttaaaaaaattaattttttattcaaataattattattttttatttatttaatttattaaattaaacatatataatataaaaatttgtttatcaaatcaactattgaagaaaagaagcattaatcaatccaaccaacaaacaacttgttcatcaaatcaaacttcatcttcatgttcatgaatcatgataaaagtgaaaactaaaatatttcaaaatacattcatatccatagtccatcaaaacctaaagtccataaagtctataaaatccaaagtccatattaatatctcaaaattaaaaattacttataattaatgtccatataagcatttataaaataaatattatataatgacttgaaagttgttgggtgacttaaaaatttaagtatttatgagtaataataattctaattattttttttaaaatagaacataaattcaaactcatataaaaaaatagacctcaatccattgttaagttgggttcaaaagtttgaaaatagattttcttttggattgttgggtagagggagtatagaaaaatgttcccttttccatttaaaaaaaaaattcaaaaatgccagggtcgaccaagcagacaactcaccccaaacatgcgcctgaataataatccctgacacacacaccccatatcattcccaaacccgtttcttttaccctttccttttctaatatatttaataagcaagttggcaggcgggttcgtgttcaacctgaaacccggtggtgcttaaaacttaatctgtgaacccgcccaaagggtaacgagttaaacccgacgcgcccgaacatttttttttaaaaaattgtgagttgacaggatcgggttcgggcgggttgctcgggttcaggtcgaacccgctcgaaatgttcagtcctatattttacttatgctttttttatgaattaagattcattgtattgctcaaccaatatatttacatctgtctacatctttacaaatttcttctatcattttttttttttcaaaaaacaactcaaatgtacatcatatgtatccattttacatcttcaaaagccattgtttatcttcttctttaattttgcttggtagccctagaattctcagttttctttcttgttgtattctctgcactaacacctatacttcatttcttgccctccaaatgtggcatactagaccttcccatactatctcagcatcctctttcgagcagttgaaaaggtcttgttcttgctgatgttctgcagtaattactgcactttgtctgtcttcgatccccattgcagcctagctttaatctccttcaaacatattctgctatattcacactcaaagaacaaatgttctgctgtttctttttcttttccacacagcaaacatgccatgtccatgttatgatcatattttcctatcctttctttggtatttaatctttctcaatacactagccatagtataaacttgtgcttaggaatgattatcctatcccaaacacttttagaccatggaattctctcattattggaaaataacaactgatatccttgctgaactttgtattgctgttgcacaaaaccagcaagatcagttacctgtttcaatttgttcttcgtcccaactattttcttccaagactagcaatagtctacaggagcttcatactcccaccattgtgctcctttcaagtacacattatgtatccactcactctgtgttcatagggtccttgttcaatctcatatgagcatctgcaagagcagacttagccattatttctactttatgtatctcagaaaacccttccttattgatcttcttcagcacatctttcaaccttcttaacttgatgactactttaaacattttagagcgaataacttcttctctccaggattctacaacgtgtttctcaaattgaggagccagcttccacatattaaaatacttgaaaggtttcttgccaaagctcctatccttgtaaatagataccaagatggggctgtggtcaaatttcattcagggaggaagatgttggaaattatttta

SEQ ID NO: 300845 - DNA, 591 bp, Cannabis indica
ataatattaatattaatatttaattataagaatagtaatatttgttttaaaagtacaataaataatttctagcaaatggcaatcaattcaatatcaataatagtaatatttgttttaaatgtacaataaataattcctagcaagacaagcaatcaattcaatatcaataattttaatattaatattaatattgtctatttttgtcaaactctcgttataatttgacaaatgtgagtagtcacttcatgttatctctctcaatttcaatgagaaaaatagtatttatttaacttgttggttttgtaatttttagccaagttcaatttaattaatttcccacgattttatatcatgagtactaaattacatctcttatttttcacattttttttaaaaaataaaattaagttaggagatcgatggagagttgtgacatgttaataacaataaactacaaaagaatgttaagtctcattataatttgtcattaattaagggaacaaaaaatcttaattaggcaacaatgaattatcattatccaaaattaatgtaattatttatataatcaaaattattttcataaaaatttgt

SEQ ID NO: 300846 - DNA, 4752 bp, Cannabis indica
tgtaatataacaaactactatttttatatatcaattattttatagaattttggtaggcacattggttttgtttctataccatagcactgattttattttgtcaaaaaagcttggtgccacaaaaaaagatcttaaaagtcagaaccttaattcttttggattctgtgacaacaagttgcgaaagttaaaagaggagctgaccctcattcaaaattcccctgccactaacgacaatctggaactggaagcaagtgtgcagttagagatcttgaatttggagaataaaattgaaaatatttggaagcaaaatcctgggaaaattggctctggctcgaggatggcaatactaaattttttcatgcttctacagttatcagaagacgaagaaatttaattgttagtgttgcatatgatggaagatggctggataatcgatacaacattggaagttttttcaggaaaaagtttatgaatgtttttgaatctcaatgtcctactattagtgatctagagacgctttatgaggaggttatcacggacgctgagaatgatatgctttgtcagattccaagctgtgaagaaattcatggagcggtttttgagctccatcctcttaagtcccctggacctgacggtttctcaggaattttgatgcagaaagtattggcgaattttggggccgcaagtttgcgagatggtgaaggattttttttgccttaaagaatttcaacaaaaggcttaaccataccttcctgtgcttaatctctaaaactgtgaatgctactagattatttctgcaacaagtttgtgtaacttctactataagattatttctagaatcttgatggatcgactcaaaggaatcattgatagattggtctctctgtttcagtcggcttttatccccgggcgctggatagctgaattttcttttttagctcaagaagttatacactcttttaaaagcaagaaggggaaattggggttatggcgtttaagacgaatatgagcaaagcgtacgatcgactggaatggaatttcttgttgcgagttcttattaaagcaaatgggttcaaggagcattcatgctctctcattacaaattgtgtcacctctttctcctacttaattttgcttaatggtgcgcctttggctcctttcaatcctaatcgtggtctgaggcaaggagatccgttatctccgtatcgattcattttctatcgtgaagttctttccaagctcatctttcgtaatgaagctaagggagatttaaaggggggtgcgggtctcttggtatgcctctccaataatacatttgttttatgcagatgatgctatattcttttgccaagctacatgcaaaaatgctatggtgctgatggagtgcttaagaatttatgaaaaatggttagaacagcaagttaataaaggcaaaagtggtgtggttttctctccaaattcttctatgaataataaggaaggcataaaagtgatgcttggtatgaatagtcttagtgctaaagaaaaagacctcgagaactctatcttttttactgcaagaaaatgtgaggatttcaattttctcaagaaaacaattgtatctagattggagggctggaaagctaaatgcgtatcccaggcaggtagaactactttggttggaaccattttgcaaagcattcttaattatgatatgtctactgccaaagtaccaaaaataatctgtgaagaccttgataaaatggtagcttgtttttggtgggttgggaatgcagagaagagtcgatattgtgcccttaagagttggagtgacatctgccaaatgaagagatgcggtaggcctatggcttaggaagttttatgacatgaatttaacattgcttgctaaattttattggatggttctaaagggtgagaagaaggtttgggtgagtattatgaccttgaagtactgccagtcacttgatgtgtgggatgttaaaaggcatgctggcgattctcgtggttggcagggtcttttggaagcccgttctatttgtaaagaaggtacggggtacttaattggtaatggaaacaaggagctttgggataggccttagagtctgggaaatcaatggaagaaattaagaagagcttcaggtataatagaacacatgctttttggaaggtctcagatttattttcggaaggaacgaaggtttttaatgcagaaattatcagggcttattttgatgaggatatggcttcgattcttaacatcagacctttggaggaagacaaagatgttctgttctggaagcttctagtttgagaaactttttagtgaaaagtgcttattgggtgagtcagaagtacagattccaggagtctaatgtgatgtggggcaaactttggagattcaatttgcacccccgttcaaagcttatactgttgaaaatctggtctgatgtgctccctgttaaagctagactgggattttttggtcaggatgagaatctctgtattttctacaattcggaagtggaattggttgctcatattttcttccaatgcaattttacgagaggtctgtggtttcaaagtcggtggggcattcgggttgactgtatgcattggaataatgccagggagtttggctcttggtggtcaaagctcaatgatagggagcttaaaatgcttgtggcctgtctgtgcgaggtgctctagaagtggagaaaatgagttttgctcgatggcttttactgcaatatggaaagaacttttaaggaaatcagtgctagatagatatgtcgagatggagtcagtgtggttagagaaggagtcgtgcgagtcgattccaaagttaattcccttgcctgatgcttcggtgtccctttctaccgcaggtttggctgtagtggagatttcgggagaggttttggatttgggttgccacagattttgtctctgtctcaggagttttggaaggggaactacacgtattggctctccgtttagctaaggataggaacattccaaaactccacatccaaactgattcgaaggtggcagttctggcccttacgaaaggttctcttccttttgcttggggttcttaccccattttttatgctcatttaaatctttgtaagtgttttgttattgtgatcttttctcatatttctcgagatttgaatcgtgttgtggatgctctagtgagttggactagatgtgcaaaggtgcgatctatcggttgtttaagggatgtagccccctttgtggctactactttgatgtagtttgtttcttgttttcaataaaatttgctaattatcaaacaaacaaaaaactttcaacaattttcttaccttatcatataaaatacatcacaaaaattgtactttctctattttagagcacacgtttacattatattaattatgcatcaattttattattaaaatacattagagaaactctacttttataaaattttattcattctaaatatataatattaatatatacacatattctcgtataaaaataatcattaaaatttaaaataattaataaaatatatttatagtaatgaataatattctataaatgtagattaagaataataaatttaaagaaactttaaaatgaagaaaagatttagattagcgtgttttagtacggctttaaaatttttaaatattctataacagcactctcattaactcatctactctattcttcaccatactccaccaaaaccttactttctatattttaactcatactacatcactctctatatatcatttaaatattatatatataatatattttatttatttaaacaaaaaaattaaaaatattaaatgaaaaaaaaaaaagaaaagagagagaaaaattattaaaatattagataaataataaatagtacttttccacatgtacataaaattttaaattattttaggtcacttgatggagcacaattttaacacacgctttattttgtagacattggtgtgagtgctctaacaataataaagactaatgaattatatattaaaaatttaaacatgaaaaaatacttctaaaaaatccactattttattttatagacgtactaaaaaataatagaactacgtacttgcatacgccaaagtagatcactactagccttgatctgatagcggtgattgaagaagttaaggcgggccttttcaacggccgctctctcttcgggtgttccggcttgagggtcaaattcccatatctgcctaccaacaaagttatttgtgctaaatatgtaagggtcatttcctccatctcctatcttcagcctccacattttttttcctttcaaatgtttagtttatacttattttgaaaaatcctaaaccatatgaaagatatatatctatttattatgtatgatatatatatatatatatatagggtaatactatggtaggacctagcaaaagtttcctaccggtagggaactttttttttaaccgttgattttagattttgtggttattatgatgtaaggtatatactcttactataggactgcttgtatacaattaaaattttatacatattataataatatatttattttaaaaataaaataatattaatatttaaaaaaattattaatttttattttttaattattatttttaaaaattaatttaaattatttttatatagatatttattttcaaaaattcttctaatgtaggatcgcttgaatgattttagatgatc

SEQ ID NO: 300847 - DNA, 5476 bp, Cannabis indica
ataagtgaggctccctaatatatgtgggaggaggtttattttgacctctgtctcttttccaaaaaaaattacttgtatatatagatatttaaattacataaacaaaataaataactattgcctatattctaaaaaccaaatgctctatgaaagccgactcttcaattcatttggataattcaacatattgaattatgttgatggggtaattagcagctagaactacttgttcccactcgtaactaattagaaatgttctcattgaacatgatagattggcaatctccagaagatttttcttttgttttctaatgtccataatcttacaatttcaacaataatttttgttagttaatacgtgtactgatattcagatttcttatttctctaaactcctggaaaatgtataaacgtctatatgatttcttctttgcagcatttatatatttttattcaacctttttgaagtttatctgcatcaacactatatacatatttatatatatttgttttgctcaaactgcagttccttgattcttgtaggtgaaaaagttcatgttctctaatgcttcatctgaaaaggtaagttcttttaattgtgcctgcaaatgcatgtatgtacttttttgttttatggatctgcatgtacatgttgaacttataatgaagtcagctttttccacttttgtttaggatggtagagtaacaccaatccttcgagatgtatttcttgctaatgttcgggtacttttctggttttctgctccttcaaagtattttcaactggattgatatttgacacttgctgttttccattaggtgcatgataataactttcgcccaaaatgcatatatgttgctgtaatgttgaggcggataatggatgcaattttaaacaaggatgcaatggatgacaaggtagatcttttataaaatactgaggtcgttttccgtgtatgttgatatgtcttttatcttcgcggaacaacctcctgttggtgagctgtacactcatctatgcatttaagatttagctctgatttcttaggtattacgaggctccttttgaggtatgatttatatgtaaaaagtgttttcttaatatttctaaatcaattattaaatcaatagtcaaatggtgtttatgagcttcaccattaggactatatattaaaatgtaataagaaacaatacttagacaaactttcttgggaatgaacaaaatatgtcgttgatgagagattgaaaagtagatggagggatttttgaggacttctcgtttctggacttaagcagagagtggaaatctcttgagtaaaaaactattcactgatggtgtaattttctttttcttaagtcttatcttgtaaaagggtagacagtttgtgttgttttatcttgtttaccacggttttcctccgccataagtgagggcaattacactatatcggggggaggtcggtctaagactagcgactctttctcttttcaaaaaaaaaagtagatggagggatcgtgaggacgaatggcatcactagaaagttgtactgcccatcatgtgttcgaaatatatttttgtgaacgtcttcaggtttctttcaaatctggtgatatcctgcctagaggtacaactttgtaaagatggaaacgccatgtggctcgtcaagtagttcgtttattactataatgggatagttgttttaaatagtggctccatatagagcatggaattccgccattggtggcattccagtgatcacctggtgtggttctgagagattggtgctagtttgttgctctgaggttgtcgctcgcccttggatttcgtccctttcccttgctttcttggatcgttcttgatttttcttgaatttccaagagattcttgaatttctaagagattcttgaattgttgttgcaaagtttcttgttgtgatttttgcaactgtacttgaagctgccgagccatctgcattgaatcctgaagggcatccttgatgctcgaaactaagaaaccatagaggaatcaccttttgttggctatttccaaggttccatttccgcagctcaccgtaccaaattgttagaaattccttagattagaaactttctatcttcaaattagacaccagatcaaatccttcaaagaattcctttattgataattgtggtaaaagttacagctagctttcgagaggctagtctctccaattacaaccttttgagagtgttgtactctccgctaagattcaaactcttctattcccaagctaaccctaaatgaaatcctcaccccaaatatttataggctttggatacaatgtgaaaagccaacccgccccctctaattaaaacagccactaaaatataacagaagcaaacagcattaataggccctaaaaacaattagtctctatcccaggttactttcgtggtttcctactgtaaacaaaatgctgggaagcttgtaacaagacacctcatagcctcctgagccttccttagaaggagctgctatagatccatcccatttttgctaggtgtaggaaaatttgtgttttcctaatgttaaaatagttccttgcaagctttgttgtttctcataatattaatgagtattatcctttttctcaaaagattaattagctgtgtgatttttgttgtttcttagttccaacggctctatgaaaagtgtctttttaatgtattaataccagtaaaatgagttgaatcatttatgtcttcggacaactataagaccaaaggcttgatgaactttttaaaatttttgttttgctcatatcaggctgccagtaatctgtattgcattaatttttagctgttgattgaaacctttgatttgagaaattattactattggacctactcttgttgcgtgtatagaagcaaacaaattatactgtgatgatttcaggattatgttgggaacaagcgactggagttatctggtcaacttatttccctactttttgaggtacacatattttcctatcttatgctgtacaatgtattataactaaatctttaacttgggttggaattcttttaatgttttaggatttgttcaagacaatgattagtgaggctaagaagtctgttgatactattttatcaaagaccagcaggtgtagtcgatttgacttttctcaggtaagttttgtaaattatgactcgaaaaatttggatagaaatgtgatgggaaatcttttttgaaaaaagagaaaagagccacttgccttagactgaccccatcccgttatatattgaaaacctcacttgtggtgggggaaaaccgtggttacaagaattttagcatgaagcacactaaaacaagcacaaatctttttatcactaatttttacttggcttttccaatgtttttaggaggtttgcggatattggaactaaaatgatttaacttataatttatttctttgtggatacagatgaaaaaacactaacaagagttccattagttagatggtctcaagtgaatggttgttatctaattcttttctagggtgcatgttcagtggacaactgcaaatgtaattgacctggctaaattttctttactagtggaagaagaaataatgattacactgggaaaactatattgtttggttctatcctttggcatttttaggctaggtttcatttcattctagtgtagcttttgtctaatttttcttttatcagattcatttttactatatgtgctcaatttttctgcaacctatgattaatttcaatacagaaaacagattgaaatatgaagttttgatggaatgtagatctgcaattttctttttcctttgttttatttgcaaattgtgtatcatttcttttttttcttatgctcttgcagtggatagtgagagatagtataacatttggacttgagaggagcctttctactgggaattgggatgttaagcgatttaagatgagccggaaaggcatgacacaggtgttatatgcgctttcaactaatttgtttttcagcatatatgcgctttcatccaattttttggtttatactatattctctttagtatttagtactttggttggtccctaaataatgagaaagatctcataattgtccctgaattagttaaatttgaagtttttccgtaaactttctggcacattttatctcgattagttgatagaattttgttgttgaggtaattggggtcttgcaaatctgaattctctgttttgaggcaggtcacatgtgtctgctaaagcatagttaatagttaagtggaattagtgtggaacttatcagcaagttattattgttgaccaccaaccatgtgtataaaactaataattcttttacaggtacttgctaggctatccttcataggtactctaggccacatgaccagaatcctcccccaatttgagaaatcaaggaaagtgagtggaccaagagctttgcaacctagccaggtaaagtccaatgtcctaagtttattaaagggaatcatattgtgatttgcatttagggtttgcatggcttatgtttgtccttttattctaattaatttgtcatgtttcttatcacacaccgaaaggaaaaaaataaaagatttggttaaaaaggaaaaacagagaaaccgaaaaatggtgaatgatgttgatgtttgttattttaaaatggatagtggatttttaatcaaaaaaaatatatataataaaatggatagtggagttttacatgttcatcaaccgaaattcaatatgttttctgatctttctttgtttatgtgataagtggggcatgctttgcccatgtgatactccagaaggtgaagcttgtggacttgtgaaaaacttggcgctgatgacacatgtaacgactgatgaagaagaaggtccacttatatctctggtatgttttttatttatataatataaaatgttgatgaagttttatttcttttgtaaattagtgtattgagtttgatgggccaaaaccattcttccttattattatttatttttatatttcaattttcaaaagcgctaaagagtccttttaataattttgtcggtggatgaatgttatacacatcttaaagaatatttggaataaaattattcttttttattgatacattctgaaataatggtgcgtttactaaactgtaattggaatcagaataattaataggagaaatgcatcggtttaaaatagaaaataatcagaaacaatattttattatgctgtttactaaactgtccggaaagaaaactagaataatattattttgtttacataagtaggaaaggtagtcggaatgctttaatttgacaaaattgtcattattagaacatgtaattattttctgtttatagatttttaaagggtatgcttgtctttttcatttttaattaataaaattaaaattaaaataaattaagttaggaaagggaaaggtat

SEQ ID NO: 300848 - DNA, 6439 bp, Cannabis indica
cagtaattttctttgttttttttctgtagagagtggtcaatacaactgatctatctcgaagaagtatggctatcaaggtaagtcttttttgaatgagctaaataaaaaagcgagtcgaaagtgatgcctggtactgtttaattttcattttacatgagtaggtgtaagtggaacttttcgccatttctttttagagagaaaagtggtgtgtatggaatatggtataatacatgttgcatttttctaatcacaaattaaagaaaaatatatgatgacaaggttgtcactgaatgtctgcttttctattccaatctgatttatctattttttctaatttatcattcgtggtgtgcttgaaaatccaaaatgaattttgcttaattatgtatgtagcgtattgtggaaaagtttggaaaaatttcttccatttatcttttgacttcattgttcttagttcttgttagaatcccattcaagtttactaaaagagttcagcactacccatttgtcgtttaaagtatatcaatggttggttggaatgagatataacatttatcatacattttactgattcaggcttgggaattcttaaatcggtttttccttttcttactattgtgttgtgagtaggaaatttatacctgttttcattatattgcatgtgcaggtatttttgtgtgttgaattgtagtttagctatgattgcttgatgaagtagaagtatgattttcagcaagaagtattgattaaagctattctctttgggtaccattttatatagaaagcttatggtttttctataggcaacttctggttccacatctagcgctgagataagtggcaatgccagcggggccgatgtagaggaggtgaaatctgatacatatagtcacaacatgacagaggcaatgggtgctggtaagctcacttattctatgttgtagtttcaatatgagaaagcttaatagaaaatttggtggttagatactgtctttatgtgttggaagctgcatttagtgatgcttcttgatatgtttggctaaaaccatacttgttaatttgacgcttttcttgaatgacctaaatgttttatcagcatttgtatcatctgctacctgtggtggctcaaaagctgttaaatgatccctctctccatgctgtatttaatttagtatgttaatgttattttgcatcaagattaaaagttgttgctgattattactgtttttaaaatgatttgatgcagtactgacttatagacacgaattgggaatgaactacaatttcattcgtccagatttgattgtggggtcgtgcctacaggtgatctttttcaaatatgaactacaatttataacattattcctaaaatgatgatctaacccttttcctgaattacagacccctcatgatgttgacaagcttcgtgcaattggagtcaaaactatattttgcttgcaacaaaatccagatttagagtatcctaaaagcatttgttattattttattgaagtattgaatgtaatattgtgttgtgatcttttggacaacatcgaacaagctttttattagccatgttaaaagttgattagaacagtaacggaataggttccgtaccttctactggaattccaattatttttatttcagccactaaaatattgctatggatcctttactgctatcttcagatattttggggtagatattggagctatacaagagtatgccagtacatttgatgatattgagcacttgcgagctgaaataaggttagttagtcaaagaactgtcttttttgtttctaaagcatgactaatttgttacttatcattgaaattataaattagttcttagttcttagttgtatattgggtcatctctttttttgactgatcaccacgtacatccaaagtagttatttctgaactatgtttgctgtttgacttagttgtatcagtgcatcttatagtttgttgtatagaaaaatattaccttttttttattcaaaatatcagcattttgctgcaaaaatattaaaaaaaaaattatcagcgtttgtgtgtgcgtgcaaaactgcaaaaaatgcatttctgtacagctaagaggattttctaagattacataagttcacaaatgattggcactattttcgactatctgtctgttgtttgatggctttcagcctcattataacaatagtattcacagattttgcactgtttttagttttaccttcaagtggcttctgagtaaaggaaaaaaacaaaagggaactctccttctgctataaatgatttcctatttgtattcttttgtttctttggtttatctcacaggctaatgttttatttatcagagactttgatgcacatgatttacggttacggctgccagctgttgtcagcgaattataccatgccgtaaaccgaaatggaggtgtgacttatatacattgtactgcgggaatggggcgagctcctgcgactgcggtatgcgtttcagctcttttaacatgatactatgtagtccttacaggctgttatgttgagtttactaataggctctttcttatcacagttagcatatatgttctgggttcaggggtataaactagacgaagctgtgaagttgctgctggtaacattcatttcatttcatcattataacgcatcctattttttctctacttggaaatttggaaacactggaattacatatgttatcttgaagtgtctgcaatgctgaatttcactatccacatagaatttcgtaattgctaatttgtttataactgatgcaatatattgtattggaagaatccacataactgcaatggatgcatgtagtatatgaaaagtaaccatacatatttttggtaatggcttaggagtaataattatgattaatagactttgaatactatgtctatcttcattaccttctaatgaacttataataataacttaatttaaattatggattgagtaactccaaatgtcaactaagtatctgaggcagatagttgattctcttgcagagcaaacgcccatgcttccctaaagtggatgctataaaaagcgcaactgctgatattgtgagtttccctcattttcttaactaaattttcaggacctcttatattatacaggtttccctgtgtttgcattttgtattgctattctccttgtacaaattcgttatgaagatttagtgaaagaattgatctgtattacgctaattcttatgattactaaaagacagtgtacgcagttttcttagtggttgctgcagtttcacattactggtaactaaaagtacgtgaactgctaaaaatgcagacctaaatcacgtgcaactaacaggaacagaaaatagacttttgtccaagaaaacttgtcctgtattggtagttgttcaaggcaatagatacgatttaagtaatgagttttgacaatttcaatgatgatattaatatcttgatttgaaaattgtataagaccaaacttttaggaacatcacgtgtggataccaaatttaggactgaaatactaactcctcatgtgcaatgataggaaacttttgaaaagtgttatggagttctcttgcagtttataatatctgacaaagatagtggtttatttatctttctgtgtgtgtgtgtgcacaaaaagaagttgctacgagcttacacgtgttattgctaaaagcttacaggcctgaaaaagaagcctgttaccttgacatggaaagataacaattgctctacggtggaagtatctggacttgatattggatggggtcaggtaattattttgttctagagacaccctttttgacctttgtgcttattgtggaagtttgatttaatgttgtgcctggggattggggaaattagatatagctgccataaatctgcatgcctaaattgcacacagtaatgaaaatggaatggaaccatggttggaatattatgtctttaaatattattcttccacttgtcttctgataattttcagagaatacctctaaactttgatgaggaacaaggtctgtggactctaaagaaggaactgttcgtaagtaaccttcccactatctatgtctaaattatatcaatttgcataatgacccctccctagtaaggcaaaagtaccttattttaccctttattcaacaggaaggtcgatacgagtataagtacattatcgatggcgaatggacaaccaaccaacatgaacaaatcactactcccaacaaggatggccatgttaacaattatgttcaagtaagctctacacagtggttctgtgcatgaaaagcattgatctcttaaaagggttttcttgatgtcatgtagtaactggttcttaaaaattggttcgcaggtttttgacgatgattcaaatagtgctagtgcatccctacgaacgaggctgtttgaggattctgatcttacaacagaggaaagagagaatataaagaagttcttggaaacttttcctgctgatgaatagaataaatacgaatctgatcaaccctgcatcatgtagagtactaataatttcagatcttcccattcacaacatcatcatatttgcagtttttttctttttatttataacttttggtgggaagtaattaagaatgtagattttgtatgtagcataattggaataagcatgttcaactccaaaaggaaaggaatgatctcgtagaataatatataataaagaccagtgttactaatttttgtagtgcttgcaacttttgtaatgcaagaaatatctgagtaataagctacttgtttaagaaaagtgaagttggcatacaaagtgaagttcaaattgatgcctagcttattattatacacctgttgtaaatgatttgcttagtgatgtttctcattttctaaccctttttcttttcccaatttacaaagcatcacttaaccaaatttacttttgggtttgaaggaagaatgtgtgaggttagaggatactggtagtctggtagtccaatgctcaatttctaattgtgatggattttcattatacagactagttttctatttttgaaaaaaaaaaacaattaaatcacttgaaattgaaacaaaattgccattaatcaaaacattatcaattccaaaatgaaactttcgacaatcatatttggcagctaaaagtttgtgaaataaagataggaagagcactcctgttctacccctcatcttactagcacctcttggggctaaattttcagccttaactcaaagtgaacaaggaagaaaacttcgattgtgcacacttagtagacaaaaaggcaaattcgacaaagttgccaatgcacatatggttgtacatagtttctcttaactctcctcatcaacaagtatggttgattcattgccaacaccaacatcaatcagagatgccatttcatcgtccagcaaaattggaaaaggagaaccctgaaaataatagcaaaatttactttttttttaattgcataatttagtgttcttctatgaatcacaagttaaaaatactcttaagtaccagaatttttaaaatattttaaacaccgataatagattatcttgtttcttatccacacataccaaacgacaagttaaaaaaaaaataaacaccaaattcagaagcaaatgaatatgtatttattaacattcggaaaaagcagttatggtttggagaaagtgtgagcaaaaatatacctcctcttgaagatacaatttcagctttacagacttcaacttgaaaaagctctcacaaaggatcttcagcttgccaacctaatttaatcaaataatttagtttagccatttagaaagactgagaagacttttctgtccagacaagcgacttccccttatagcccctcaaaaaactcaatagaacagaaaagcaaccaaaattcaaaacaagaggattgggattagaccgttgtggtgcctggtagcttctttgtaagtaggggcttctctccaatagatgctccaacacattttagaatgatggctgcacaaatgttagactgaatttagtattcattttttaactgaacaaaattgattttaaaatctaaaaaactcgtacatagaagcccggatgccattttctgagggcctgtgcccccactcgagggtttttcatcttcaattccatgagaacttttaagctcaagaaacctgtaatgaagatcgaccaacagtaaggacaacatcacacattaattcaaaactaagaatcctcatcacttttttagtgaagcctagtaaaatttaatcctcaaaccaagatactaaaggagcttgaatatcatagtttaggaggtattgttctctcttagggaaacaagtgaaaagacaatggatcccttatttcactatgaatttttcttttttacaggtctatggttt

SEQ ID NO: 300849 - DNA, 1602 bp, Cannabis indica
tgctattaaagggtcatagttcagaatatcacagctcatcccttattcagagcaaattgttactgtgtgcattcagtatctataccatttcaacctttaaacaattatactagtgtacatatatgtttacatgaaaaacatatcagaaatataatatataaagttacttaatttatcaccaattaattttagaatgaaaacccaatcctaacatttcattaaattggagcagagtcatgtccgttgttctgtttttcaagaacaaaatttgatggtaattacaagcctcaacgaaaagattcgacccttttttgagataaactaggataacacaacaggaaggaatattacatattgttacaaaaatatggaagcaaaaccaccataaacaacaaagatggaaccagaaaacatactcagacctgagaattttgtggtgagttgcaagttgttgaagcagagttttgagcaccatgttttgatattcatctatctaatcctgtcgccagtgagtttgacaactgtttttctagctgagagaaaagttgtgatatttgggagagcaacttacaccgtttgtcaggtgaggccaatagctgagatgtcattaaccagtctgggtcctcccccagaagttgctgtaactgagaacataggtttgaagcttcagcgtcctctgtacaagtgctggaaataagatgaagaagtctacattggtgttggggcaaatgtggtttaggtggaattggaggaacaagaaaaggatgctgcagcaactggggaattctccacctttcattgcgatcccatgcaagacaatttttcatgagatcaagaagccaaggatttgaaactggttcatacacaatttcatggtatggatctgttataactttgaacttggcccagaatgttttgtaatctgcgaacggagtccgcccatacaccatctgataaaggatgcaaccaagggaccatatgtctgatggcctaccacacttaattgggtttccattagcatcactctcattgcacataaatgcttcaggagacatgtagctcaatgtaccaacctgtgaatccctttgaatatttgtggtatcactcattatggctttggcaatgccaaagtcaatcaactttagggagccttttaccagaaggaaattagctggctttaaatctgagtgaacaatacgctcctcgtgtatagtgtttactgcaaaaagaatttgctgccagtagaatcgaagccagttctcatctatggtggtctggttggtgaagccatcgagttctttccatttctgggaaagcatgtgagccaaatcaatctccccatattcaagtaccatgtatatataaccatcgtccttgactcttccatctttgttattcattgatccattcatgacttcctgaagcaaagctttgtctgtgacctcaaaatctatgagctgtataatattgtgctttcctttcaacctatttaaactactcaatttcctgacaaaatccaaaagcagtggcataatcacgtcctttgagctttgatttttttgagtgcgtatattgtacagtctgatgagatgactttgtgaa

SEQ ID NO: 300850 - DNA, 2373 bp, Cannabis indica
gagtgaacaatacgctcctcgtgaatagtgtttactgcaaaaagaatttgctgccagtagaatcgaagccagttctcatctatggtggtctggttggtgaagccatcgagttctttccacttctgggaaagcatgtgagccaaatcaatctccccatattcaagtaccatgtatatataaccatcgtccttgactcttccatctttgttattcattgatccattcatgacttcctgaagcaaagctttgtctgtgacctcaaaatctatgagctgtataatattgtgctttcctttcaacctatttaaatactcaatttcctgacaaaatccaaaagcagtggcataatcacgtcctttgagcttgatttttttgagtgcgtatattgtacagtctgatgagatgactttgtgaacctcactacttcctccgctacctatcttgccaagcctttgatagagcttcccattaactttaaaaaacaagtccggatcataatttcttttacgatgatgagctgatgatgcacctttagcactctctgcaactgcaaccctttcttgtttatctgatttagaagacaagtttttggatgatggaatatgagactgaagatcaatagcaccagcagctaattgtttcccttcagctgctccaacaggatctccagcaaagccactttccttaaaaatctcatattccttactactctccatttgagtatcaattgcggaggtggaagattgtgctgcattaacaatctggttatttacttctccacttttgtcctttaaacatggatttgattgctgcatttttttcccttgagttacaggaagagaatttaaattcaaatcccccatggccatgggttgcgaatcaaaatgcacacgggagcaaaaggttgtctgattagccatcggcgctgaagctgaatggacagatgtggttgtggcaccacaagattgccctgcaactgaagattgagagttaggttggctaaagaagtttctgaaatggtgcaactgatcctgaacagctgttgttctctttgacaaaagggaagaaatcccaccatcagatctcgcggtgatatcacattctgtgttctgatgcttcatctcatgattaatgaccgttgacgcctcgccttgattgcctgcaacacattccacttccggcaaagtggtcttgcttgcttctgaaaattggacctttttctggccaccatcaatgtactgcgaagatttcacatgcgacagtgattgtgggttgtccttacaaccagtcacgaacttgatttgatcttgtccgtcatatggatttaagttttcatcaaaagctctggtaatagtctctgaattagaaggtggggtagttaattcatcttcctgaccatctttgccaatggtggcggttcccttcatctgcattactgaatctttatgatcctcactaacagaaactgcttctctagatttcatcgatgctgattttgcggacactgctcgttgaggaaccaacattcgcctaggcccaatgctattcgactgcattacaccgatagggcgatgtcgcttgaaggcggcttgaaaatgtcggagtaagccaggggaagaagatgaagaggaagcggaggtagaatcaggattgatcggacggttgagatccctcgcgggtgcgaatgtgggtgtaaggtcaacctcaacctccctgtccatggccggatctcagcagcatcttagagccaaatggatgacgaaatcaggagaaaaataatagcttgaagaaagggtattagggtttggttccatgaatgaaaatggagagcctgaaatggagcatgacatggcagttttaggtgcaagcataggttgagaaatgaaatcaatgttaatatcattatatatatggaatcgattatctctgtgaaggtacccagatcaccaaactgaaatcttagtgcaaatcaacttagtatcgctatcggccacaatatgagataatcgggttgtaggatgtgatatttaaaatagcatacaatacaaaacataatcagatctaaagatgtaaagatttggatttcatacagagagattcgcagttagcattgaagaacttacgaagatgcagctaaccccattgaattgaattcccaatctcttttctacttgttgaatgctgggtatggtaagaaatacaaaccacaataaaccaatccaaatttctcttcaaaccaattcattaacctaaaccacttcttaagctctacatagtatatacaatacaacgtctgtgctgtgggagccaatttttaaatttttgaattctgtttcaaaaaaagggtttttttgttttcattttttttttttt

SEQ ID NO: 300851 - DNA, 3948 bp, Cannabis indica
tttgtgtattgtttttttttttttttttaagtaactagtttttatctagttattctgtatatttaatttttgtgttttagcttttattttaattgttttatgtaattcatttctctataatagatttttaattaactaacaaagataattggtttttatgatacaagatatatatgtgtcatttttttaagtaactcgtttttgtattttaattatcgatattttattttacctatattattatacctttatttcagttttttagttgattgtatttgataattggtctctatatttaattattaattgtgttgttttacgttgaatcctagtgtcgcggcccgcccctcttatgcttccagctcttcctctttgcccaaaaaggctattttaatgcatcaacactaatttttagtgtcagggcactccataaatttgtattgttgactagttttcacgatttccatgatttttttcttaaaataacaaaaaaactaaacaaaaatctaaaaactaagcataagtttctcaacaaaaataaaatactaaaataaaaactaaaacttgggttacctctcaagagtgttgtcgttaacgtcatttagccagacttagaattcttcttttatagcagttccaagagaatgacagatttggcttgatcgtactgaccacccaaatagagctttaatcgctaaccattgactttaaaagtatccaatttctcacctttaatctccactgctccatacggaaacacctttactactataaaaggaattgaccaccttgattttaacttgctcgggaagagtttcaaccttgaatttaagagtagcacttgttttctaggttaaaattccttcctgagaaggttcttgtcatgccacttcttagtcctttctttataaattttggcgttctcataaactttgtttcagaattattccatctcgttgagttgtaacagccttttctctctagcagccattaaatttatgttcagagttttcattgtccaataagcaagatgctctaattccactagtaaatggcatgccttcctaaaaaataaccgatatggcgacatgccaataggagtcttaaaggctgttctataagcctataatgcatcatccaacttcttggaccaatccttccttgaacgttgaactgtcttctctacaatcaactttacttcccggtttgaaatttctgcttcccattactttatggatgataaggcaaagcagttttatgtctcacctcatacagagcacgtaaagcttcaaactatttattgcagaagtgacttccctcatcacgaataatagctcgtggagtcacgaaccgagtaaagatattcttttacaaaaagttgagaaccattttgccatcattcaccagagttgtggctgcttccacccatttcgatacatagtccacaacaagcaatatgtaaagattgttgaaagaaagaggaaacggtcccatgaaatctattccaaatacatcgaatagttttacctcaagaattccattcattgacatctcatttcttcttaaaatatttttcattctttgacatcgatcacatgctttgacaaatgaacagacatccttaaacaaagttggccaaaagaagccacattgaagaaccttagccgttgttcttgtcccactaaaatgacatccacattaaagactatgacaatgatttaggatagagtacatctcctcttcaggcacacatcttctaattatctgatcgtcacaatgctataaaggataggctcttcccaataatagtgattcacatccgaaaagaatttcttcaattgttgtcttgacatgtcaggaggtgtgacattagcagcgagaaaaattacataatcagcaaaccatggagtcatcacagtttcttttgacaaaaatagtttctcatccagaaactcattattgatatgcaattcattcatatttgagctctcttgcaattctagtcttgacaattgatcaaccactaggttttcagtccccttcttgtctttaatctctaagtcgaattcttagaggaggatgaggacccaacggattagtcttggcttagcatccttcttcgtcataagatatttatgactggaggacctgtggacataatcaccttattcccaatcaagtatggcctaaacttgtcacaagcaaaaactatggcgaacatctccttctcgatattggaataatttagttgagcataattcaaggtcctactagcataatagatggttcgaaacaccgtgtcaactctttgttctaatacagctccaactgcatagtcacttgcatcacacattaacttaagcggtaagtcccaatttagtgtaatgactatggtgcaaaaatcagcttctccctaagagttttaaaggcttccataaactcttttccaaacttaagagatactccattaacaagtaaattcgacaaaggcttggaaatctttgagaagtctttaatgacttcaatagaaaccagcatgacccaaaaaactctgaatccccttaactgacacatgatggggtaggttctcaatagttgacaccttggctttctccacctcaattcccatctttaaaattttaggtcccaatgcaatcccttctttaaccatgaaatggcacttctccaaattaagcatcaaattggattcctcacatctagttaaaactaattccaaattagtcaaataatggtcaaacgatgaaccgaacacgaaaaagtcatccaaaaaaacctcaattgatttttcattcaaatctaaaaagatagccatcatacattgttggaaagttattggtgcaatacataatccagattgcattattcgaaatgtaaaagtaccatgagggcatgcaaacatcgttttctcctagtcttctagtgcaatagctatttgatgatatcccaaatatctagaaagcaatagtactcctaaactgctaatacatctaatatttgatcaatgaacgaaagtgggaagtgatcttttctagtggccttgttgagcttacggtaatcgatacaattttccaaccagtaacagttcttgtcggaatcaattcattcttctcatcattaccaccatcatcccccctttcttgggcacaacttgaactaggcttacccatttactactagaaattggataagccactcccgccatctaaccatattaatacgcctttcctcactacttccttcgttaacggattgagtcttcgttgttcaacaatagtcgatttgaccccatcttccattaagattctatgcataactattgaagggctgatccgcttgatgtcggctaaagtccacccaatgaccttcatatgcttttttaagactctcaacaatttctccctctccacatcagacagtgaagctgaaataataactggaaatgtcttgtcttctcccaagaattcacaccgcatttgatcaggaagcatttctaactcttactctggtggcttctcgctagagggcaatgacttcgttggaattatcccaagctcttcaaagtattttctattcaaatgcccataagaatcaagccactttacatactccatgacctccttcccatcctggtttaccactatctattgcaccaaactcaaggtaagaggatctttaatgggttccctcgatcccactaaaatctccaccacatcaacgaaaaatgttatcatttgctttaggattgttcatagcctttagcacattaaatacaacttcttctccttgtactcatagctttaactcactcttttgtacatcaattagggcttggcctatcgccaagaatggtcttctaagaatgaggggtgttagaaaaattaataataaacccaaaatctatttgtatataacatagaacacaatagt

SEQ ID NO: 300852 - DNA, 973 bp, Cannabis indica
gataactaattagattgtaaagagttttatttagggcataaaacacaacaattccaactgccattattagacagaagctcgtcaactttgttcatcccaatagtggaggaatcattagaacgagggaaaaaatctttcctatgagcgattcaaggagcctcccaagtggtagctagttaccaatatatttatacaaaattaatttgctgctgttaagatgttattgaaaagcaataacaatattgcaaaaagttcgaaataaaaaaggtcttttaaaaatgtaaaaagctagaaaactaatgctatataaaatgaacaaatttaaaaatgctatttttatatcacctttgaaattttactacatgttgtgtaattttctcaatttacataagcactccgaaatattggttatgtgtaataaagacaactcaaacgatgagcactcttatttttcaatatcaaaaaatgcattcaatccacacaaattataagaactctaaatttcagtcttatccaattgacacaagtagtgcatattacactcttaattattattattattattaataatcaattaatttttgttttttcaaacgagggaggaaggttcgcatattagtgtaggaagcttcgtattttattttcaattatcataatcacataaatgattgagaagaaattttcgaattgtagtagtgggcctagttgaagttttgtagtttgtactgagaagtgtttgtgatatggattctttaatgggttgttatcttaaatatttggaatatttgggtattgttattgtgcgtttataatatactcttatattatatttcattcaaatttattaatttttgtgatgagttgtctaaatatttttactttttatttaagaatagtacatgatttacattaacataaaaaaatataataaaaacacgatcatctataaaaatagatatatcttaaaaaatat

SEQ ID NO: 300853 - DNA, 3147 bp, Cannabis indica
tttcttcttctttcttcatcttcttcttcttcataatatgtctcatattgaagccaaagataataataatctcttctactactactcatcatcatcatcatcttatgctcatgatcaaatcctagccgttgatcgagatcatcatttcacctcttctcccaatattcctacaaaccctagcggttttttagggtttgatagtagtttgatgattaaccctaattatactatggatgatttcttctactacaacaacaactactcatcagcaacatcgtcgattagtaacaataacacgacatcttttgggttttcgtcgtcgtcttattctgatcaaaagttagggttaatgacatcatcatcaccacctctatcaccgccacaagtggtagcaccagtaagtaataataataacaatataaattcattgtcttcttcttctgctaccactggtggaggtgataatcatgatcatgatctggatcatcaggatcacgatcatgattcttctgttcataatcatagtaataatcgagatcagaagcgaaaagggtcagaagatcaagatcatgatgacgaagaagttgatgatagtaactctaataagaaagtgtaagtgaattttattgtattttcttatggatttttctagtttttttttgtatatatattttggattaaactttatattatatatatgcaggagcaaagggaataataataataataagaatggtaatagtaataagaagggagagaagaagcaaaaggagccaagatttgcttttatgacaaaaagtgaggttgatcatcttgaagatggttatcgatggagaaaatatggtcaaaaagctgtcaaaaatagcccttatccaaggtacatataatataactatacatatatataattaaactagtttgatagattttcatttggtaattcttagttataaacttataattatgatcaacaatattgaaataaatagaattttgttataatactaaaaaaccccaaaaatttctagttatatatatagtgcaagtactctcattcttataatgaataataataaattcatatggaatttcaacaactatgttgaatatatgtgtatatatatatacatataaacacttaaacgtgatcaaaaatatatttaaagacgtacgaaactttttatgtactcttactgtacttttgaatattattccaacttttcgtctcaacgttttttggtttcatttcccattaaccaaaatcttacttaatttaatttcttcctataaattattaattaaacatacaagaaatactaaaaagtatcattattagtgtctagtatttttctcagtgtcatatcactattagtgtaattaattaagtatcaagctctacataagttaagaaaataatttttaaggtatatcactaatcaatcgtaaaacgcaacttatagaaagtactcgatattactgatatatccaataacattaatgctctaaacatatatatatgagcattattattggacaatagtagtgcccaacactttataagtagcgttccacgataagttagctagcgatcgatattcccttaattattttcttaagtatatatataaaactcgatacttaattataccaatagtgatatataacactcaaagaaaataattaatatgaataataccttttagaatatatatttcatattaatataattatatttgttattattattgcagaagctattacagatgcacaactcaaaaatgtggtgtgaaaaaaacgtgtagagaggtcataccaagacccatcaaccgttataacaacctatgaaggcactcacaaccacccactaccctcctccttacgtggcacagccgcggccgcagccgccatgttcccgccttccatgtcatcgctaataggcggcgctgccaccgccaccggaatattccctcatcaagatcagtacaatactaataataataataatagtctgtttggacaaatgcctaattatataattaataataataatgtatcatcatcaacaacaacaacatcaacggctgggattttatctcatcatcatgatgattttggacttcttcaagatatggtttctggctccatgttccttaaacaagagccatgatataatgagtttttatattattattattattattagttatattatatgatcagaatagctattgtaaatatatattatgtataataattaattagagagagatattatggatattaattgtgacacagtaaagtacgtacgtacgtactttacttaattatattagacatatttttatagagataatacatttttctttctttatatatttagattctatctctggtttcttatatattattataagtttattattatatagtttcattaattaattaggttgtttatatacataaatatatatgtaatgtatgtaaagattattagtacttgtagtacatattaattataagttatatatatttgcagtattaatattgtagctaggcctttttatattgtggattgaaaaatatgaaagattatcactactacaaaattgggctttagaggcggtttttaaggggttttggcgtcggttttggcgaaattcgctaccgacgctgttccaggtgacgctataaggtttaaaacaaccgacgccatagggaccctatggcgtcggttttttcataacaaccgacgccatagggtcttggtatttactagctttacaatttcgtcctttagcataatttatatatattattttattattaatataattaaattaagtataaattatatacaataagcataaataaaaattaaattgaaaagttaaataaatacacatttacattaatctaagtgtttgtatattagctatctttttattaatattttatatttgacattatgtgtttgtatttttgtagtatattagtatatttttttataattttttcaagttatattttgtataataattagtatattaaataataaataatgtgtaatattatttaatttttatgtaatgtcatatttttatatatttaaatttttctaagtaccaataaaataaaacaataatttaa

SEQ ID NO: 300854 - DNA, 2043 bp, Cannabis indica
acagtggactaaggagaccgtgatctgactgaaccactttatttccttgtgttttttatatttcctgtaggtctgtctattcataccttgaatacccgccattctaggttgagtactaccatattttctgtttatatctttattatattatttattttggtgttgtctaaattcctccaacaacaatgggctctataggcctttgttgcttggagcgccagtcattgacagctaggatatcgcttttgggctcgtgatggagtttccgagcatagagcttcctagccttgctggtctcgccttcaatgtgggttctggcaatgatgacccctaggtgtcctgccacaggtggtggcattggatctccattctaggcatcttgcgcctaagtttggtcatcttgcacataacgacacatgtggcgattgttacgccttatttggtattcaatctccctcttcagattttgacactcattggtgtcatggccgaagtcattgtgatatgagcagaactttgacatgtccctcttgcccatctcctttttgataggaaagggctttcagtatggaaatgttccatgagtggccatgaagatggccttaggcttctccattaggagggtgaagcaggtgtacttctcctccttatttttttggggtgtgggagaagtgtggaacttcttcttttttcccctgttcctcccagagtttttggtgttgcacttgtttctagattttttgacactagaagtctaggaaaaattaacggtatctacctatgcgtcgagtgggtcatgaggctgctggatgccttgtggctggctattcttgacatgccccaccagtgcttctcgtgtggcttcttcaagtttgaaaaattcgttagctctatcaaggaactccttcatgttgttggtagagattcttcggatatctttccagaagtcactcaatgggagtgtgcccccccagtatggccatatattggcctcttctatatggcctttgattttgatagcgttagccataaacactaaatgtaatcctttaaagattccccttgtcgttgtttgacttcgacaaggtcttctagctgtgatagtacaagtgtcaaggacgagaattgtgtatagactttttgtgaaaactcatcccaagagttgaattttcctggggtgagtttaaagtaccattattgtgctatcttcgacaatgtgtcagggaatatgcaccatcgcacatcactattaaccttctgttgatcgtgttgcatctcgaagtatttgatgtgagccagtgagtcttctcacctagtatacatattccatacccgcatttctaatttaggcaagggcatgccatttatgtatgccgagaatggtggtcgccttgatcgattaagttcaatgtgtgaaggcttcagactagctatgccttggatcatgtccctgagttggtgcaattgtgtttgcccagaaggatctattgatgtggggacttgacagactgaatctccttggggaggctgtagattctacagagataggggttggttggccataccttgggagagtgtatggtgaaggtcagccagacccgtgttgaacagtaggccctagctggccattctcatgtatgggagctagccttggtcgaccaggcctacaccatgctgatatgcttggctggtcagacctgcagtaggtagggtcgggttgcctagtgctcctccatggctggtcggacctgcaaagtgtagggtctaaccgcttgtgatgcttccatggccggccagacctgcaaagggcagggtttgccacttgtgactccactgtagactgatgctggatgtgtgttgactgggggtaaatcacacaattcctggagtttggtggatcaaatgtctgaagtaatcgatttcactccttgaatcaccatatttggtgtgtccacctgctatgtgtccttgtctattgaagatcaacgtctcggcaccacactccccttggagaggaagtgttgtactgttgggttttatgcc

SEQ ID NO: 300855 - DNA, 4174 bp, Cannabis indica
ctgaaataaattagtagaatcattatcccacttattattagattaaccaatgatataaatataaactctaattatttatcattaagcttataaggatattaccaaaagagaaagactcatttcatggagctcgtcatggaacttattagtagcaaaaaaatgagctatagcaacatggatatcctttcccacctcaggccatactaattaaaaaaaccccgaaccaaacccatcaggacctggggatttagttttagggatgctaaacatcgcaaatcttacttctttaaacgagaaaggttttaaaagactaacatgttggtcaagattaagcttggaccccatgtctatgcaatcctaatcaatctccatcgaagtatgtttagcattacccatgatagccttgaagtggtctaagaaatgttgaaccacatctggaaaataatcattcaagattccctggtcagtattaaatgaaacaatcttattgtcttctttccgtttcttcaagatggcatggaagtaagtcgtatagctatctcctttttgaatccacttaactttacttctttgatgaagaaaattaagatacattttctcctggataagaaagtgattggcaacctgatgttccttgtgaataaagagtttgtccttaggattagcttggctgataagttgagtgtctttataatcctccttagctttctcataagcttcaccaatgtttccaatagagtgtctattgaaaactttaagcttatgtttgagtctcattgtcttgacataaatcccattcaacctacaactttttagaggtttattccagctatccaaaacaatctttttgtactccgaatggtcagcccaaaagttgtaatatcgaaaaggtttgcttccaatttttttgtcacaaccgagtgaataacacacaaacagcagttagaacaagtttcccatgagaaatgggctgaggtattcaggaaatcatcaacccattcctcattgtgaaaaacatggtcaatgcattaaaaaattttggcttcctgcttgttggactaggtgaatgaagaactagagcgcttcataggacgaacagaagagtgggctatccagttagtagaatcaaccagttcagaagcactaatcgcatcccccccgagcctatcatcatgatgaaaaacaacattaaaatcaccaaggataatatccaagccttagttacattgatcattgataaggcagtccaaagatcacttctaccctctatggtgttggctccataaatgaaggtagcataatcatcttttttctgtcctatcattttgatatgacaatgaacttactgtttggattcctcaataactctaacttgaacaaaattgttcctccaaagcactaataaacatccttcaatctcattactagtataataatcccaacaaaagaagctattcatcaacattttttgtaagttttctcctataatcttcgtctccactagagccccaataccgactttattaatcctccaaatatcagtaacactctcttgtttctcctttttattcaaacccctaacgttccaacaacttatattacaacaattcattaacaacaagtgaaaatcagcctctcttcccctgcttcttcctcctgttttccaataagaatatcaaacgaattcctgagcactttctccaaattatcactaacttttttagttgatcctgatcccctcaagttttgggtcttaggtgcctgccattctcccaaaacaggttgagaagactggtgcattcctgaagtcttcactggttctacaatagtgtcaatagtatccccaatcgtatcaccagtaattaactccagacctacttctccattttatcctactggagacacaccagcagaaacatcttcaccatcaacatttatcttcttctctttcacaacttcttttggcttctccaacttcctacattgagccattatgtgcccaaaacctccacaatgtttgcacttaactggtagccactcataatctatttcctgctctaccaactgtccaaactcattaacataccagaatgtacgttcagggctgtccatactttccatttcaacaagaactcgagcaaattgcacccttgttcgatccttggtgtgtttgtcaaccataatcggcttccctattatactaataagagcaccttatattttttcccccaatattggagaccaagattgtggagcctaatccaaagtgcaactgatttcaccaatctaaccatattcaaatctgaggactgaggtcttacaattacaggcttcctatcaaattgtatcattccattttcaagaacgtcatcttgcattgcttcatcattgaatttaaccatggtaagcccctttgtcattctagctatcttcactatacccaaatgaccccaaattcgtctaaggaagccttcgaacaccactgcaggaacattagcaccaagcaccatacaaatgacagctgacttccaactctcctataatttcacctcctccaagtcaacctgagccattttcctacactccttaactataggtgcagtgaacgacaatttagcattagagttgagtattttacgttcaaaaaatttctgtcgatggttctaggtcgatgattgatgatttcaacctcctctgcccaacttcttcttcaaacagaaatctggaatgagtctcttcgtgaacctcatcctcatctgtcaaaccagtctcggtaagcaccagctgcttctcgctaccctcaatcgaatcaattttactcacaggccccagatcaacctctgatctctctgcttctgccctagcaaccagccgtcgacccaccctcttcttcttcgccatggaagggagagagaacatggaacgaagagcgtgttctgttcctctacttttattatattattttttaatttttttctttatattcttaaaaatatacatatcagacaaacataaattatatttcaaatattataacaaaaaaattaaaataaaaattacgtaaaattttattagaagaaaaaaaatatacattatttaaaaaagaattatgaaaatataattaaagtattgaaatttacacagaataatatgagggaaaaaaatttaaaaatagtaagagtgatttctaaaaaatattctaaatttattgtttttaaaaaaaaaaatatttggtgtacttatcattttgtggattgtaaattgaatttccttatattaaatctatattatattaaatgtggctatataataaaagtgtagatttttttaaatattacgattcaaatttaaattcactacacatatcactattattttttgtcttatattaaatgtgtctatataatataaagtttttttacattgcaattcgaatttaaacaaaaatatctttctattatcattttttaccaaaaaaatatatttttattattattatttataaaaaaaaaataagattaagtgtatgatatttcaaaaacaataaaaagtattataaaattaaaagtattaccgtaattaaactaaaattataattaataataaattatgaattatttttatattttctttctataaataacacgtaaattaaattattttttttataaaatataattttatttattgaataacatccacacataaaaaaagaataataattatacaactaaaaatttataaaaattaaaataaaaactaaatatatgtacactacttgtaatattaacattgttatattaaatgtgcatatataactaaaattattattcttttttaaaacattacaattcaaattacatatgtctcttatcttttgtctctatgttatattaattgtagctataaacaatatgtttttttttcacaaaaaaaaaaaaattatatttcaattgaaatttaactcactatacatatctctcttattttacaatttaaatttgaactcattacacatatctctcttatttttatcttatattaaatgtagttatataacacaaaatactttttttttaatattacaattcaaatttaaactcattacatacatctaaaaaagtattttttctattattaattttttgggtaaatagtgacataagtacccaaa

SEQ ID NO: 300856 - DNA, 3502 bp, Cannabis indica
taattgaatagcatatgttattttgcaccactaaaatatagttacaattataggcttgtttatttttttatttgacaaataaatatttaaagtgcatcttaaaagatataaaatggaggataattaaacagtatttacctccacttcactgcaagctacttcattttatagaaagataactggcacaacacgcttgcgtgcagctaaataaaataaagcagtaaaacacacgtgaaattaagcacaacacagctgagataaaatgctccaatgcaatggacaatctctggttacttttcaaaattcaggctgcactatatcgaaataaaaatgctaactcaatcagatgatgaatgaaaagtaaatcggaatagatagtatcagatatgatttgattgttgaaccacatacggtttaaattcatgctacaaacacatacatatgcttacaatttcattatacttacaaactctctttcttctaatgtaaacttgaaacaacagatgtccttatcaaggaagaactaacacaaaaaatgattttttttgttcatattagcacaaaattaggagaaattagttaacatgaatttcaactaccaaactatgagtttagctacagatgtaaaattcctaacaaaatgactaccagcatactgaacgcaccgtttgtatcaagaaatctatgacactggatgcaaaaacctaaagaaagtgaatgatcactagaactatgcaacccttttcttgacaatccatccagcaattcagcccttttaaacaattcctagtttgtggagagactaatgggtccatagattttactgctctgctcatctttgcatgaagtagtctagggtcctgtgagaattaaaaagtggattggcaagaccgttaacatcagcgtgtacacaaggtatattgtacaattatcgttttattcatcatttgataagaagcaatagtattaaatgaggaaagtcagcccacaagataagcaatcacaaactacaacaaagaaacaattccctcaacaaatcataaaacatgaaagcttataattctttttcattatttaccaactaaagccaaaccttaatactgtcctaaaaactccaaacactactatggtaacacctaaattaaattcagaaaatggacaatgtaaataaagatatcaaggatcacattactatccttgcatatacaaccaacttcgtaaaaacaaaatatatgctctatgtatcatcaagtcacgaatattattgttaagctttcatgaatgaagatccaactacacacctagaggctagacattaggagaaaatggattttcccaataaaatacgaagactgcaaacatgaaaatgagcactaaaacatggcaaaaaggatttactttcaggtaccccaaaactatgtaaattcataaacttactatcaaaaatcccttcacaaactaatactttgcaagtccaaaaatcccatcacaaactgatacatcataatggattgcaagtctaaaagacttataaaaattctgtcatatggatcctttaatatggaaagctcatcaaaatccccagcaatacacctatgggccattcaaaagagaaagtttggttgatcatatcatagttataccaaatactgaaccaaagaaaccaaaaattgaaaagggtaatccccaacagaacagatttcccaaaaattgagaagggtaatccccaacagaacagatttcccaccgtctgggcaaacaccactgtggttacttttaatctagtttacagtacatgtttttggtacactattagttgaacaaacatttaaaatctacatctcttctctttggccattttctttgtttttatgacacaaagagctgcattttgtccacaaacaactttgatcccctatgaatgtactaatgacttgttcctagagttattaaaagttctaaaatgattttcatcttttgtgaacaactttgcacttaacttttaccataaaagcaatgttcaattcaaggatggttctttgcacacactaatattagtaccatcagggttccaattctagttaaacaacaatgttaagccttccacgaagatactcaagcagagatatataattgaaatcaatattttgaaatcaatctgctcaatatgttttccactgaacataatcttttgctaaaacaaaagaagaaaacaggcagaaatgaaaatagaataaacacaaaaacatgtgattaaaagattaacaagacatctttaattccattacccaattccaagaataacaagaaccttagcaaaaaggaaaagagaaagcatacccaagcaacctaacgctgtatattgagcatctgtttggcctcggtctgctcctccaaaagtccctcactagcatacttgctcaatagctccaacttcttcttctccaccaccattctctcaatctctctgtcatcaggcaaaggcacatgtactataaactccttttccttctcactgctctccctcaattccctctctctctcacttctcctctcttcctccaccacatcctcctcctcctcaaacaacacctccttcgccaccatagccacttcgccgctctttactgacctctttgcctctttccttatctcctccatcctccgccagtccgccaccgcccccgccctcattttatcctccgcaggcgcctccactctccccagaaccccatcctcatcgtccctgtatccataatagctcgcatcgattctcttgtaaatgtcgtacctcgtccgccgcttcctaagctccggcggcttctcgaaaagctcccgaaccccggtaacttctttgccgcgccaaaataccggtatccagggccacggccgctagggtttggaacgtcaacaatattgccgtctaagtcagtcatcttggccgagttcttagcgtaattggggccaccgagctccacgatacggcgttcccagtgagatttctcccgtataagcttgttaatctcgtcattgaggtcccggaggcgatgctcgccgaggccctcgttctgaatctcggcaacctttcgaccgatctcgcgcatgatctgctggcgccacttgtcggcgtcggctaagtctcggcattctgatgccaagaacggacgacgctccttgggcttcttgttttcttcggctttcaaggtgacgaaacgattgagcatagactgagccttctcttcatttcgagccattgttgtcttcctgcctccgagttcttcgtcgaaacctaatcagggaacgactgtcagattacaaagtgctgtaactgatttcggatttggagagggttttaggactgttacaaatacacccaaagaaacctaactctgcttctccttcaaattcaaattgcaaggggactggttgggctgctattaagcttgatatggaaaaggcttttgacagagtggaatgggcttttctaactcatttgttcaat

SEQ ID NO: 300857 - DNA, 1616 bp, Cannabis indica
ttgaaaattgtttctcagcaactctagtacttagtaccattcttcaaaatttattatgcaatttctgctgttctaagtagtaacagcttgaatctggaagaccttttgttctttctagaaaaattaagtaggtctcataacaaacaaggctttccaaaggaattcaacgacttcttgtgctgtgttcattacacacaatccgacctttggtacaaattccaataaagaaaatgtcaaaaatggatgctgatgtgctttaatgttttgaaccattaacttcttttgttggtgataactttatgagaataaattgagcggttttcttggatctttttgatgcagatcggagaagttgctaaacctctgattcttgattgggtgattgctcagcattcacgtatactggaatggactgggagagcatttgatcttgaggtgggttccatgtgtaattggatggtgttaaaaggttgcttttgaaaattgtcttgtcaaatataatgctctaaaaaaagtcgacttgtagaataaaacaatgacattaagagttaagactaaattttctattatgatggccaatctttacaaagtaatgtgcaattttggttgggatgttgggaaaaaagagtttaacctacatgatgtgttgtgtgcgtagtttgagagtcaaactagttttgatttgtgaatgtgcaggattgggaacctctttcttcgcagcaaagacaagcaccttccatagttgaagttttcagaatcatagaggaggtatatatattatgttaaatttgatccactacagagtacgtggtgcttcccatgatatggacctcctaatgcttgatgacttgcgtgcgaatgacttgaatagatattacaaaattaggtggtctctttgcagtcatgttgtttcttccaccttaaaaaatgcctctttaattttcataatcccccctagtaacagatattaacattaaaatgccagcatatagacaatgaatttggataattctgtgtatgtgtgtgtgttttcaaatatgttgattattttatgctaactcgtattgattttcaaataacaagcctaggaccagttttctttccttgtttgttatcattgcttttaaattcaatttgcagactgtggatcaactctttggtttgaaccttgcaatggacatcacacatatacaagctctactatccatcatcttccacacgttgcgtgcatatttggagaaaatgtttaaccagttaggtgcgtcatgatttctattagtaatgtaatatagaaagggggtagtatatggtcaacaatttgtgttttgttttatggaaattattgtgaagttgcattactaattgttgttagtagggacgttcatcaaactgctcaaaccgctcgcatcgcaaaataaatgcggtttgaaattctttgtagtgcggtcgcggtttgaatttttcctaaaccgtgcggtgcggtgcggtttgtggttttgaattattaatattcggttcaaactgcaccgcactgcacattataaaaataccaatttttatatttatttaagtgcaatatgtgaatgttcaacctaaaacccactaattattgtatt

SEQ ID NO: 300858 - DNA, 2085 bp, Cannabis indica
taggttgttaatccaacatacttgttagtaaatctagatccttgtaaaataatttccaacaacaaccgtgaacagaggtaaatgaagctgattctcattcctcttctactaatagtcactctccttgtagttatactaggtcaggttctgttaaggaggtagataccacgtgcataaaggtgatctttgggatcatctcaatgagatttttatagcgcgatctcaaacacaaggaaactgcgactataaccaagagccccgttatccctgtgtgggggatcaaggcactcagaatgtaaataatgcgactaatctagtcaacctaccgatcgcaccaactacgaccacagaagtagtgatccttgtaaatataggagcagttgccgctataccagtagtgactcagactaaccccacattaccaggaggtattgaccaagagagccttttatgagcattaaggctgatcgagtagtagagaaagcccatttcaaacttcatgcgatgttgccctttacagaagaagtgcgacaagcaaggctcccaaaaggctttagactatccaaattgctcaaatataaaggtactactaacccaatcgattatttagataaatttaatctaattatggaagtagatcaggtgccacaactggcgaaatgttgaatactcgtcgcaactctggaggataatgctcatgattggtttggccaatttcctgaggcatcgatatcaacttgggagacttttgtagacttgttcctaacgcatttctaggccacgatgacatacaaaccaccatatatgacattagccaatattaaatatgaagttggtgagtctttataggattatgttaagtgttttaatgttgaaataacaaaggtggagaaggcctccgagtctttattgatctatatgttgatcacaggtatcctaccacgaaccaattttagaaggaattgtaggcgcaatgacccgagtcatttgtggaatttttcactatggcagaaccgcataaaagaattgagaattccctggtagagttgaaaagaggaaagggaaaatgcgagtttccagtacgaaggtcgcttcccaaagtctcagaagaatgaaatctagggatcgaagcccttgaaggcgtagtctaaagctcgcgaagtcccccagtaagaaagaaacatccccgaagaggaaagggagcttgccttttgtcaactacaccgaattgtctgtcccccacgaccatctttatgccatcaaggagctaaccacgtttcagaaaactgcctccaatctatggtaatcttgacaaaagggccccaagaagttttgcaaataccacagagatatcagccatacaattttggaatgttggttccttcaggacatgattgaggaattgatcaaacgagggaagtttggctaatataagaagaatggagagaatccccgaggggatgataccaacaatacaagtgacacaagtggtgctagagctcctcgcaatattttaactatcataggagtaccacatattggtggagattttagaaaagcgcaagagcgctataaaggaagctaaagaaaaacccctaacaaaatgtaaataacttgagtgaacaacctaagaagtgttgaagaaagaatgcaacaacattactttcatggaaagtgatacaaggtgggtccaccacccacatgtcaatgccttagtggtagtcgctaacattggaggggataatatacaccgagttctcactattacaaaaatggctttttgcttcagtttttaagtgacatataaagtatttgcttcagttgatgtaaccgacgttataaccgtagacgcaaatacaaatttttttgcttcagttatgaaccgacgctaattgattttttgcttcagttatgaaccgaagcgaaaaaaagttttcccttcagttcataaccgaagcaaaaaaccaatgcattaatgctaattggtttttgtttcggttatgaatggaagtaaaaatatttttaaaaaaataaaaaaaatctaaaaccaaaaaattttgaccaaaaataaatacaatatcagat

SEQ ID NO: 300859 - DNA, 2771 bp, Cannabis indica
tatgttttcacaataagagcaaaagtgataccgtagccaaccttttcctatacattttcttgaaggaatttttttcctatatataaatatacttacaaatataaagttcacatacataaagagtaaataactaatatgttgtacatagattttgagtgaataggctgtaaaacaatgttgttgaatggtgaaaataaaaggttatttaatgaggtagagtaaagaaaaagggaaataatgagagtcaaaagatgagatttcaaaatgaatgatggctgctgcaccctatggtaaaaacaagcgtgtgaccatgctttttctaaagataatttctgttggtatcatatcacaccccttaatttctccatcccaaaattgtttgactattggtttctctatttttttaggcctaaagttaaagtgttaatcatctatctttaacagattccatgcaatgataaagtcaatagataagagtaaaaagtaattccaaagctaaccacgttatatgatgagatactgggaggcaatcctagaactagaataagtcgaacatttaaaaggcctttggacatgctaaaagagatgcttccttcacttattattttttttttggtgtggaatgaacgtaagcaaaactttgtgctgggaaaacattggctaattaggacttcaaatataaatgggtatttggttccctaataaaaaaactgctttttttttggtttttaaaatctaaaagctatttttgaacacaaattgagtttaacattgttttcagaatacaatttcttcttacataaagctgaaaattttgagttttcaaaatctttttgtttatattattattttttttttgaatttctttcttgggattttctcaaattacattatttttattctaaaaaaaaaatcaccttatttgtaatatttttctcctctcttctccttatttttcatcaatttttctttcacgttactttttcatcttttagtacaaatttttgaaatatttttagttctataaatatatttattaacattttaatgaaaaaagttttaattttttgtggaaaaacattaaccaaacatctattatttaattttttttttttttgaaaattacaaaactaagatgctgtgtctccgaatgagtttagtgcttgatctagctttcagtacaaaatgattaacagagtcaattaagagtagtactgccagcttaattatcatgatttttcaagttaatcagacaaaactgcatgcattatttcattttgttataccaatcaatagatttactatgagttagttaccaaccgctttcaatcttattacaacttctttttgtaataataatagatcttctttaatgataatgttatatttgtttaatgatgtaagtagatatataaaggtacatgtgaagattgaagcatccgttaactaaacatcccttaaatataggcattgatttgaatactaatttcatttctaaacaaagaattaattctcttttgcaaccacctaatctaaattctaatcaccttaacagattcaccaacaaagtgaaagggtccaattacaaacacggtcggtctttaccctttattatagttgatcacattttaataattgaatcttttgttcatgtaagctttccctttcccttccatcacctttatccaaattaatttctaccattgactaaataaagtttatcccatatctaaaaatatttcccaaataatttgataataatatctatcattagtttattttagcataccaattctaccattttcaattaaaaaaatttctctctctatctctctttctttctctttagatctaaagagaaaccctcagaagccttaaattcccttcccgtattgtcgccactatcgaaagccccccatgaaagtcctaagttcttccagcgccacctcttcttctcccacctctctcacatcgaaaccccagaagcctcaaaccttcaaatgcacaaaggcccatggttcttttgtgtctgcaccgtcgatgacccaccaaatgggagccaagaaagccaagaactaccgatccttgttctttgtttgcactactgagaagacgaactagtagacgagtatttgtaacaatttattattattatttttacaattattagtttctcgataataattacataaactattgagaaattatcaaaaaatcattgtaaacatgaaatcctatcgataacttgaattatttcaaagcaaactttgaagtcatcttgtaacggaaacctatcaaaatcctattgaaaaaccatcaaaaaaatgtcgagagaccatcgagaaactgtctataaattatcatgaaactatcgaaatatgccaaccctgagctttggaaagcacgttgaggaataccatcaagaatcaatcgaaaaggcattaataaactatcaaaaaattggctaaacggtagaaagatgcagaatatcaaatctatttcgttcatacataaaaaatatacaaaaactaccaaaagcatataaatatgataccaacaaaccatataattaaaaaatacaatatcattcatgattttttttacaaaaaaacttacccatcaattatggagctccagtcccaacttagataatggagtggaggtacgatgctccttatgcaatttcagatgtgcgacaacgagagtgatagagcagttagctaaggggatggtgctcttttagtttggttgaggagagagagagagagaga

SEQ ID NO: 300860 - DNA, 3726 bp, Cannabis indica
aaatcacgtaatacgcctaaggtagttagggtgttacattctttgaatggatgaatctaagaactttcaaaatatcttgatggttataacaagattattctggacctaaataatctaggtgtgaaaatcgaagaggaggaccaatatatctttctcctaagttctctactcaaaatgtatgaacattttttggatactatcttgtatggtaaagatactttgactatgacagaactcaaggcgacgctgtgttccaaggagattcaaagaaaagattatcgttcagaaaacaatggtgatgatctattgatagtaaaaggaaaattcgcaaagaatgaatacaaaggccacaatcattcttacagcaataacaaagataactctgacagattcaaattgaaaaatctaacaaaatattattattgtaataaagaatgtcactttagagatgattattttgcacttaaggcaaaattaaaaagagataaaaacaagggcaagaatggtgaggctgatatagcagatggctatgaatcagttgatgtgttagttgcatctagctgtgtttcaggtggagcctggatcttagatttaggatgttctttccacatgacacccaataaagaactgtttagttctttctcatatgaacgtgatggattgtgttatttgggaacaacaaagcttgtgaagttaagaaaatttgatcagttgttatgcagatgcatgatggtgttacaagaattgtgcaacaagtgagatatatgctagatttaaagaaaaatatattatccattggaatgataaaaatttatgtataatcaagattgaagaagatatgcttagaatttcttgaggttcaaaggttgtcatagagggacaattaaacaattaactctactgcctagatggtaaaactgtgactggtgatgcatcacctactgtgagtcaaaattctgagatcagtacaagactatgtcaatcgaggttaggacatgtcagtcaaagatatctagaggacctaaacaagaagggtatatccaagggtcatttgaagagaaaacttgatagaggtattgagaacatgtattagttggatgcttttctgaatgtagagatgaattacttcttgaagggttgtatgagcactgcctcaatgttctagacatatatcttcacaaaattattggtcacaaactattttacttcttcaagttctagaaagatctagaaggtttaaataaagtggtggctgaaaattgaaacaacatggtttatggctccaaaatgtattagctggttagtaaggtgaagagaataaaatcagcactaaaggagtttagaaaatcttccattggagatattgttgtagtagataaagagacagctgattctcttgttattgatctgagcttcagtaggatcttaaaaatttgaatttaatggtagaagaaatggaggcaagagggaactaaaacaaacagataaaatgtacaccacaatcttgagccaaaaagccaaggttgcttggatatatgggaatagtgagaacacttcagtctcccataaaagtctcagagaaaggagaagtcaaaatacgatttactcaatcatagacaaagatggtgacaaaggtaagcacttcttttgatgtatctcaagcctttgagtactatactgatcttttagggaaaaccatctcaaataggacatcagtgaataaacttattgtgcaaagtggtcctcttaatacaaatcaaagccaactttttggttcaacctttcactaatgaaaaggtctgcaaggctatcttttttattcttggaagtaaagtttttgggccgaatggttttagcagtttttcattcaaaatcagtggggttggtgagcatgtggagagtcgttttgaatttcttagagagtggcatgatcttaagaaaacaaatactataactatcactctaatttctaaagtggcttgcccaaacaatataactaagttcaaactaatctcttgttataatgtcatttacaaggtaggaatcaaaatatatataaacgattgaacacaattttactattttatttcaaaaaactaaggagatttaattaaaggttagaaattgtccgcaatattttcatttgccaagacatggtgaagcactataaatggaaacatgtgaacctacaatgcttgatcaaaataaatttgagaaaggcttataatactattgaataattttttttgaaagagatgttaatagctttgaaatttcccattctatttattcatctcactatgacctgtgtctaaatccctaaagtcttttttatgattaatggtagtgtacaaggattctttaattttaaaagaagtttgaggctagggatccctctccccttttctttgtctttggcatggagtatttttaactcaaattcttaatagaatagttgagcatgatgagtttaaataccatgaaaagtataatgagttcaagcttactcatttattctttgtggataatgtcatagacttttctcacggataacataagtttacacgtttaataagatatttttaatgtttttgttttacaattttataatcattctaaatttcataaacttatactatgtttaatttaatttttttttttttaaaaaaaaaatctcattattaataaggagaaaataaaatcgtttcgaattgatctttatcctaacaaaaattcaaagtccaaaataaggagtcgtataattttacttacaagaggaaactttcttttaatatccgtctcagttttttatctgtaaattacagtacattatagtcattttctcgtgcaatgtaaaaatcattaattaataggtactacatcaatttgagtttttaggggcgacatattgtcgtccctaaagaaggtattagaggcgacataaagttgttgcccttacagaaactgagttttttttaactttataaacttttaggggcgacttttgtatattgaaggggacatttattgcccctaaaaatattgaaatctatacgttagaaaaagatagagtttttcccgccctataaaagtcttaccaattttatgattaatggtagtgtacaaggattctttaattctaaaaggagtttgaggctagggatcccatctctccccttttctttatctttggcatggagtatttttaactcaaattcttaataggatagttgagcatgatgagtttaaataccatgaaaagaataatgagtttaagcttactcgtttattctttgttgacaatgtcatagacttttctcatggagaatataagtccacgtttaaaaagatatttttttatatttttgtttacaattttataatcgttctaaatttcataaacttatactatatttaatctaatttatttttttaaaaaaaatcataattaatgagaaaataaaatcgtttcaaattgatttttatcctaacaaaaatccaaagtccaaaataaggagtggtataattttgcttgcaagaggaaagtttcttttaatattcatttcattttttatcagtaaattacaatacactatagtcatttttctgtgcattaattaataggcactagaacaatttgagtttttaggggcgacatattgtcgtcactaaagagggtatttgtaatgaccgctctagtaatgtggattagtaaaggcaattagc

SEQ ID NO: 300861 - DNA, 2831 bp, Cannabis indica
aaataaagttttatatgcattttttttttattgaaacacttatgcaatatttttgttttgatatatagtaaaatttagatattaaacattatgaacgcattggacatataaaactaaattttaaatatagttgattgtacaattaattaatcaaataatactaattttttttaccacagttcgtgtgactctattagtatggctttcaataaatattagcaactttccttgttaggggttactaaattattcaaaaaaaaaaaaaaataaaaagaataaaaagaattaattaattattagtataaaataatagtttcacacatattaaaaaaaaatatctgtatatacagacgctttttatgaccctacttaaacattatcttatattattatggtccacacaataatgtatcaattttgtaatgaataaaataggctttttatggctgaatttgtgatacctatagaattttgcttttgaaatattcttttcatttttctaaaaaaaaaaaatccctcgaattatgaaaataattgttaatttccccttcgattgcattttcttttgtaaagatttttttttttcatataaaactgatccagttgatctatactgtaattcaagttttagtgaaaataattacataaactctactacatataacaatataatttaggattgcgtatcaataaattttgaattgtgtatggtccagctactttaacatagttattttgtgttgtaattatgtgtggcttgcggtcggatcaataaattatctaaaaaaaaaaaaaacacaatcaaaattgaggaaatttgttattgtttccaaaataaatttgactagaaatttttacaaaaataaataaatagataataattcaagggtgacactaagctcaatgagtgtcaaaattcggaggtaaaaagtctatttattctttcataattatttatatatatatatatgatatatgctaccattaataatacttactactacaagaaatgtaacttttacccgcacatttttgtgttggcaaaagttggtattgggctggtaaaatagaatttacttgtaatgtgttggcgaaaggaagttggcaaattaatgttggtattagaacttttgccagcattaaatgaaaagcgttgccaaaaatgacttttccccgcgcgtaaatgtgctggtaaaagttcgctggtaaaattttgacttttttgctagtacagtttgcgaaatatgctagtaaaaatgacatttatgtgactgttacacaatgactatgtagtagctattactatgtccgtatttcttaattgctttttacaaaactgaggccacaaaaagcatcacattctcacccataatatataaatacatatatataatgtcattacgatgtatatgtatattatattgatgaattaaacgcatcatgatcgaaatactatatactcattagtgtgtggcaaatattatatatatatatatatataattgatttattaatatacacacactaataggcatgttactaataaagcgcgcgagagaacataataaataaagattccagctaattaatttgatgggttatgtaaagcaaatctgagtggggttaaagaaagcaaagatggataataataaaatgtagatatttgataaaaagatccaagagtccaaactatattataattaatataatgatggaatcgtgatcttcgatcgagtaccactactaaccccattattttttttccaagctcgttgtatcactttcattgtagttagctgagtatatataatatcgatcctagcctctagatcatatacatttaaatcgtttttcacattatcgtttacatatggccaagtggaagatactgttaattagctagaatcttcatttatttttggaggagtcgatggatcttaataattataacatattagctaaaggcatataaatatatatttcctgcatgtgaagaaacgtacgaaagataagcttgcagtaagcaccttcaccacaatggcatatacaaattattaatatatgtatatacattattgtacgtgcataaatagagaaaagggaaaggatcgataattatatagatgaaggttgataaacaaaccggcctagttctacctatatatcttcaaagattcctaaaagatagatcagcatccaacatccatggagatcatcatatacaaaatgctttgatcagtccttgtcacttaaggactgtatacataaaatgctgtatcacttacacaaagtgggaaggcatacgtacaacatgcatgttacatgttaatatataaatattatttatgtggtccaatatatatatatatatatatattctatatcttaagtacttattataacactattcaagttgtacaaacctctaggttgggatgataaatacatacagcccaaaaagatccaccaagagaaaatgttttcaataaaaataagaataaattacttctgaatcttttcttatatcttttaatttaacttagttcataatgatcgattatttgtaccaccaaataattaatatcctattgaataaaacaaggttcttttcaaccagcaatagctatagatagatgtcctaccatttagggcatcatgtaacaatagactacctagccatgccaacacacaaatattatatatatatatatgaaaaatattaaataaagtatattctatccttatcatttcctaaatagtttacttaaacgacgacgtctgagtaaacataatacgttaatataggttttagtattttggtgtatcatcga

SEQ ID NO: 300862 - DNA, 1270 bp, Cannabis indica
acttctcaaaatcctctctctctatctaatgatgcacctccctcactaaaacaagatgagacaacacaatcatccaattaatagtatccatcctcaaaaaatgagaaaaaagagtcttcatgaataaggtcttttgagaatcgttaagattttcattcaacacgttaattatccaaggataattccaggtatgcaacttacttgcaaacctatgttggggtttcatcttcaagaaagctttctacaaaaataatcagttataaaaaaaatttatacaaaaaaaaaataagaattacaacaaaataattgattttttaacaaaaataatacacaaagaaaacaaacaaatataaaatataaaatctttaaatacataccacgtttgtaaaactagtggtcttcttgtgagaatcatcagaaagagaatggctactaccttcgaagcaacacatttaatattagaacgtgttacacgacgagctggttcatttagaacatccataacattgtgcccaacctacataaaaaataaaaataaattatagacataaagtaacaaaaatatataataaaaagtaatactaatccataaaacaaaacaaaaaaataaaaacaaatatcaggttcggttttagattgaacacggtcaatatcaacattgtcattaaaatccgttgtagtctttaaacagaaaaaaaaaatgaaccagttataaaaagattattaaaaataaactataaaataaaaatatttagaaattgattctaataaatacaaaaaaaaattattctaattttaaatcattatatataaaataacaaacatatactgaaaaaattaagactaattgattaagcaaaaaaaaaattactactcaccttctttttcttgcttcgaatttttttagcatctcgctttttaaactcttcaagtagaacctcagaatcggctccaatttcaccaagaacagtatcaacattgctagtaacatctcctatagtcttttaacaataaaaaaaattaaccggttataaaaagtttataaaaaaaagggatattggcggctaaaccacttaaattttatgttttgtaacacttaaccacaaaaatcaattttttaggggcaaaactacataaactcccattctgttttgcactgtatcccttcgtccaaaaagcacaggtaaatgccacagtggactgtccatgtgtacacacttgtacacgtggtaaatttttaatggtacacataatattaattttaaaaaaa

SEQ ID NO: 300863 - DNA, 2911 bp, Cannabis indica
atcaatttagtaggatccctccccacaagtaaaggtaaagtcaagtacgccattgtcgttgttgactacttcaccaaatggttcgaggctgaacctttaaacacagttacctccaagaaggcacaagacattgttgttaaaaacatcgtgtgccgataaggataatgggacgcaattggacagtgaacacttcatcaatttctgtgcccaacacagaatcgtgaaaagcttctttgttctagcccggcgacaagctaatggacaagtagaagccgtcaagaaaatccttaagaccacattgaagaagaagttgcaggcttgtaaacccacttgccagaagaacttcctcaatttctctaggtctacagaatgacagaaagaacttcaacggggcatacgccatatgcaatggcctatggatgtgaagctgtaatcctagtggagaccatgatcccatcccatcggtgggatacttacgaccctacccgcaacaactctctgctccaggaggcactagacttaatagaagagctacgggaacagtagcaagtcaagcacaaaatgtaccaaggaaagattgcccgacacattaactcaaaagttaagtcgtacattcgatattggtgatcttgtcctctgaagagtcttcccagcttcccaagaaccgagagtgggggtgcttggcccaaattgggaaggcccctatgagatactcaagaaggtgggacatggtaccttttggttgaaacagatggatggatcaagagtcctcaatgcctagaatgcagatcatttgtgccgatattatcaataggcggtggacactagtcagtgacacaatttgaagagtttttgtgaaaatagtctgtgtaataaactttttggacaaatggcctttgggcatcatataatgagaacgaaaagtattttgtgtttacattttacactttaggttttttaggccaccagttttgttttaaacaagcgacaaggaagttggagacatccacacttctcagctcacgttgcctttaaaagaacaagtaaaagaggtgaaaaacaaaaacagaaagttggctaatggtctggggagggtaaaggtgctgccaggtcggtaggagctaagatattagacggttccccaggcttcgagttggcatcagcagcatctcaagcaagcctttcattgaccctactagaagacaccttagctcctacggattcttaagaacttgaggcctcaacactagtttcttcctcactatcattgtctactttacggggcaactctttgaggtatctactgcaactcatggaaagtaccttcctggtaaccttctcccgatccatcttatctatgtgtaaaagtatggaaggatccgccttccataagttgtgaagacgatgacataggacatctctaagggcaaaggcgatccctctttgccctggcaactgccctattattagctgccttagccacatccaaaactagttagggagaagtctccctcatctgacgcttggcagctaaagcaatgtatgtctttatgccatttaaggggccggttaacttgcttatagaattgtcgatcatatcttgacgagggttactggtgttacaggctccttggtagagaaaggtctggttgtcacatttgacttcccaagtagctaccagcttcttcacctcttttacttcgtcttcgaggtccttaatgtttgagtccttcttgcgcaagtcctcttggaggctattaatctgtcgaatttgggtagtaatggtcccaaacttgtccaccacacgggcctcggcgatgtctttctcctttgtggttttggctaactactcctagagggagcgtagcttcttctcaacctcttttgccaaccttgaagcatgctgctcaatttggaccttgtagtttgaatacttcttcaagtttttggcgtcccatttctcttcctcagtagtcaacttggcttcccactcttcccgagacatgtgggtgccggaggttatcttagctttgacctgctcagaccttgtacgaaaaagcctcattctcagtggtcagggcttggaccttggcacggagttggcttagctccatggttacattccatgcttctttagcggccctctccgcgaacaatgccatcttgagaaaagaagataagaacaagttacaaaattcatcccgagaacaaaaatcatagcacaagtaaaggaaagatcaggggttagaacttacccctgtaacctactgtttggcagttgttgacagagtaaacaaatcaacgctgctacttactgcccacttctcaaaagttagctccctcacactgtgacctatgttatctatcatttttgccgcataaggggcgatgatctacccactataggttccagatattgactcaccacaggcagatcaaacacagggccttggggtaaaggacggcgagtcccctctgcaatcttgtccatcttaatggaagacatttgagtggccctcttttggagagtaacctattctcgctcatggctattcctcaaaatggcagccttcgttatgtagtcgtggccaacgggtggcatcatgaggaaagaaaatcccaatgaaggagccttacctcttgagatgggttaagatagattagcagtggtgggcttagatttgagactaagctaaaggtggagtagattaagaagacactatctgcaaatggttaggagatagagactaatgttattggtgcgatagggccgacagaccaggcgtagagtgtggcggaggttgttgttgttgttgttactgctactcttgttgttgttggaattattttaccaggatcttagatctactcacaagtatgtttattaacaccgtaaatatgaactttctaa

SEQ ID NO: 300864 - DNA, 5466 bp, Cannabis indica
tatttatgcttttttttttttatctccctcaaaatgattatttagatatatgtgagaactatctgctttaatactatccaaattcaaaacaaacattagttgtttacaataccaataataaattagttagagagtactctcatcgatttctatttttaatcttctaaagctatagtactcaatcaaaaggttatcgagtctataacttaaaaacaaacaagttaataatcagtcgaaacgtaaaatttgacaaaaatgttgcatacaacagagagacacaagaagttgaatgaaaaacagtcattattcctctacagccaagataagaaactaatcaaaatgaagttccaactcagccaaccacaaaggaaccgacacaagtcatagaattcctgccagactcaccaataaggcgaacaagactgcttgctgagatctatgagacatgcaacctagtgcttatggagctaaagagttttgaaatggctcaaaagcaagaagtatggagaaaagtcatgaatgaagagataaagatgattgaaaagaatgagacttgagagcttgtagattgaccacaagacaaagacactataagagttaagtgtgtctacaagataaagctaaacgcagatggctctatccaaaagtacagagcaaggttagttgcaaaaggatagttgcaaaaggatactcacaacaataaggagtcgactacaacgaaacatttggtccagttgctcaccttcgacacaacaagggcattgatatagctccagccacataaaaaaaaaatagaagaatttttaactcgatgttaagtcggcatttcttaatggctacctcgaagaaaaaatatatgtggaataacctaaacgattcgtggtgcaatgacaagaatataaagttctcaagttgaaaaaggccttgtatggcttaaagcaagctccgcgagcctggtacattagaatcgacctctacttcactgaacaaggattcagtatgagcaaaaatgagccaacacactatatcagaacttaagctacgaatgatacactgattgtctctttatacgttgatgatcccatctacacatgcaataatgagaagatgataaagaagtttaaagaagacatgatgaagagttttgaaatgatcgatctgggattaatgcagtacttccttatgattgaaataactcaaaaagaagatgggatcttcatcccactaaagaagtatacaaaaacactcttgacaaaattcaaaatggaaggatgcaagactgtcttaactccactagaccacaataaatcacttaagaaaaaagatggctcaccaaaagtagattaatcaaaatttcaaagtctaatcggtaacttactctatctaactgttatgagatcaaaataatgtacgcaattagtcttctatcaagattcatgcatgatccaagtcaagttcactacggatcagccaagcgaatcctcaaatacttgcgaggaacaatactctagaaatatggtacggagttacaaatgagtcaaaactgattggctacacaaatagtgactgggcaagattcatggacgacatgaagagcacatcaagatatgccttcacacttggatctggaatatttttttgggcatcaaagaagcaagcaatatttgcacaatcatcagtagaagtagaatatattgtagcagcaatgactacaagccaagctatatagcttaaaagaatacttaaagatatgggagaatcacaagtggaagctatagagatctactgcgacagcaaattacttatggcaatggaaaaaaaaatctagtattttacaacaaaactaagtttataagcatcaagtaccccttcattagggaaagagaaacaaataatgaaattgagctcaagcattgtaggactgaagaatagttactaaagcactaccaagaggcaagttcgagctactacgagacatgattagagttaccgaaatatgtatcaagaagtactattagaaaaagtgatacacatttctacatttctctaaaaaatgcttagaaatcttaaaactcatcacatgaagaaaagaatatataaattagaaaagtctagaatatttaaaaaactagaagtaattaatcaagaagaatctagaagaatgtatactaatggaaatcaattagaaaggtctagaaaaattataaatcatatagagctagaataatctagataaaattaaatgtaaagggtaagcaactataaataccccatcaagcttcttaaattgtaactatgcttgaatagccaaatcaagtcattattactactaacttactataccttgtctcctctttttctacacacataaaaattaaaacataactcttctatcttgtcccaccaattatccaactcataactcatcaacatcatcatactacactagctacctaatatctatcctatacatcctccacacatttatactaatttaaacaattcaaatacaaataacaacattttactctattctaatttctcaaaaccatcaatttcttacaattctgcaagccataaagttgttgaagctaaggcttgtctactagcttctttttcccttttaatttcattgaaagatttgattttggtgagtttatgggagtgttagttacttttaagaagttatgagtttgacactagttttttcatgttctaagctagaaattatgtttgaattggagtttttgagcaattgtattagtctaaagaaaagtttgagttttataactcaaatcttggagcttcaatggtgatttgtgattctttagattaaaatatgttttaagctttgagttatgttatattaatattatttaattgctctcagaagtttggtaacaattagagaagtttggaacaagttttgtgagcttaaaacttaaatttattttgagttcattttacccagtaacaagtcggtcagccggtaaagggccataccaattggaagtccagttggactgtttcaagaaaagccgatttttgtattttggctataacttttcacttaagtgtctgttttggacgttctatatatcatttgaaagctcctgaaaaactctacaatatggtacataaattagagccaaaatatatgatttattttaaggtatttttaccacatagttcggtagaaaaacctctagaatttatatacgagtattagagtgttttagaataggtacttaccagtttaccgctaatgtgatgacttaggacctccgatcatcaatcagttttctactcaagttgactagcataccagaatttaaatttaaggtaagattagtagagagatgaacatatgcacatgttttatgataccatttatctggtatactaaaaatagcagtatagatgtacataaagttgaatttagatactgatatcaagtgatagtagtgggtatcgaatagtaagttttgccaattagataacatatcagtactcacggtattggtatacattgagttgcacttggataccgacagtatatatgtttggaaatatattaaagtacgattaatgctaccaacactagtacgactagagtacggagtgcagtttggtattattgttaattatacttatagtattgattaatgctaccatattagtacgactagagtgctgagtataggttggtattatggtgagtcatagttaagaacgttcgagactcgttgtacgggttgcatgctagtagtagacttatgataattgagtgtatgggagcctacttataggtcatatatattgtatgttttatacttttcttattgagtttgtcgactcacagatatgtttccatgtgtaggtaaagacagggctaagattgaacagcagtgagtgtggaggttaggtgaagattctacgtacatatctggatgattagtcctggagggcttgatcttcgggttagcatagacttaattttggctgtcgctaggcaacacttttgatattatgaactttattatgttttgaaaaatagattttgagatcccaaatttgtaaacactttgtaaatatgatacagtttagtaaagttatattattatgaaaatttattaaacaaacttttggttaaaactcttttgattagcaaagattagcacaataattaagaaatcactataaaatgtcttagctagtggggcattatagatatccataagagagattcaagtgaagaaaatcaacaccaatgacaatccaactgatgttacgataaagtatgtcactcaagcaaagttcatacattgtttgaacttgctcaatatcacaatcagttggtagcttttcaaggaagcatattcttttctcctgtcattttctttcttctcactagttgcttgaaactaaaaggtaagttttgttatgtttagttacaagtaaccggtcactacttatagaaagtgactattttgttagtcggtccaactgacaactcacctttctttgtgagtttagcatttaagtatgaccaatagctatcattacaaaaaatcttatttttaaccacaacaaaatttgtgattgaagataaaaaatttgtgactaattataaattatcattattatcttgtgactaaaaagtctgtggctaaaagtattagtcacaaaaatgacgatttgttgtgactaaatgtatttttagtcacaatatttgttgtgactaaaactaaattagtgacaacttgtactaaatactatattttagttacaagtaactttttattgtgactaaaagtcacatttagttgcaaaaaatttatattgtgactaaaagattatcactaaaagtaacagttttttgtagtgtatatataggggtgactcatttctcattcaccccaactaagaaaacatagagtgtttggagggatgttaagggattcgccaaattctcaagtgaaccaaatgtaaacgctccttaattttattttttactttctatttttggtttggtacagtagctcaattcatttgatgaccaatagaactatattcattttcatcttcttttgtgtgtggtgtctctagtgattcaattcttgtttattctcattgtgtattaatcgagttatgctttgttgattagtttaattcaactttgttcttgtgttttggagtttttgttgtgttgttcttgaatggaggtgatttgaaatcacaacagttcaatcctctagtggatgagtgtgtctttggtgatctcatttaattcctcgatatcaatatcatccttaggcatattcgaagaacagctaactaatacgtttgttcacaacttggctaagttgactttagggttaaatgaaggtgtcgtttggtaacacttttttaatcagttttttatttttaaaattagaaaagcaaaaatatttttcaaaaacatgt

SEQ ID NO: 300865 - DNA, 2612 bp, Cannabis indica
agaaaagaaagaaaaagaaaagacttgttggttgaagagaaggaatataaaggaccacttttggaataaacccgagaattatttgctttgtaaatacttaaatttagttttcgcttacagataaattcttaagtttaagcttcgacattaataatatttaagttatatttctaaaatttccgtaaatacttatgccttaagtcaatatccacatgtaatttttttaatagtatttttaaatgtattttttttaaaaaaaagttaattatctaaaccaatcaagaattaacatgtggtcgttaacttgacactgtataacttatgtattattactctgtaaccgagaattgaacttaaatatttacaccacaaattactttaaacccaataatataacatatcatctcttctctctcaccgtagctcttgctaaaaaacaacattagtccccatcaaagtcacaactttacagtgtcttgtcttgttctcatgcacacctctcattttccaaaagttcatttctagataaagttattaaaaacaagtaactccaaatccaaattcagctagcaccctaaagaaagctactttctttttcttttagttttttgtaattttccttgttccttcttttaactataagaatatataactgcatctcttggttcaaatgtcttattcatgctagtaaaagagaaattaattcgcattagctagaattttttgatcaggaaaaagaagaataagattcacttgagaagtgaatacatgggaataatgttaactaacaaacaaatattaccattcaatattcatcagaagaattcaaactccaagtatagacctgatgatgacctatctaagtaaggtgtttccttgttatttggtggcattggtgacttggatgttgtgttgttgtttaagaactctagatcaactggtttaggaatctctggaggttgagtgcctcgaatgagtgcccaattaacactttcaaagaatggatgttgcttgatttcagtagcacctctcttagatcctaatctcttttgagggtcttttactagcagaccacggatgagatccttagcagcaaaactaacattagatccgctaggaaacttcaggggttgaccaacaacattgaatagtgtctcccgatttccattgcctttgaagggtgtcttcccatgaagcaactcatacaagaaaataccaaatgtccaccaatcaacagcacttccatggccatctcctcttatgatctcaggagctaagtattcatgagtaccgacaaaggacatagagcgagcattagttggttctgcaataaggacagggagcgaatctgaattcaacatactcgttcttgttctttcgcttcttgtcttgtttgtttttgaacttaaaaatcgaggcttgaaacaagaaggttgtaagcaagaaggttgtacacaaaccggtaatttgcaggttggatcgatgatgcaggatggctcaatgcagtaagaagagattctacaagatggttctgtagtactagactgaacaagagttgggttcacattgcatcttaatgataaatcaaaatcagacagcattatatgaccatcttccctaacaagtacattttcaggtttaagatctctatacaccactcccaacatgtgaagatactccatagcaagaagaacttccgaagcataaaacctgtaaataagaaatacacagcatggttatacaatttactaatataacagcaaaacatcaaaaagggtaaataggggcttaaatatcaagttttgatattgtaagtgacataaatctgagtttttttacaacggaattagagaaaaattataattttacaaacattgagtacttgtgcctcgctgaaaaaatcattgagtttataccgcttacaaactcaaaacttttgttaattatgccgctatttaccgaattgcattatttaagattcacatcataaaaattgcatttttatttttgttatatgcaatctgaactattccaaccccagaaaaggttcttgttttagacatttcgatttcaatttaagaaactcatagataggtgaataaattataaggaacaaacctagcagcttgttctgtaaaatgcttgcccggttggcgttgacgaagtgtatgaagatcaccaccactgcaaaactccattaacaagcaagaaaacttctcagtcttgaaatgtgaataaagagtcggaagaaatggatgatccaacagacccaatatgtctttctcagtttgagctctcaccaacttcttcctcccagcaagcatgcccttatccataaccttaatcgcaaaaaggcaacccatattcctcaactcagccaaatacacactcccaatgtctccacaaccaagctttttcaaaagcctaaaatgtcccaaacccaagtcaccatctttactcttcacgaactgaatggcgtcccatcgaatatcatttcccttgtgaggcttcgatgggcaaaagctcctaaaactaatgtcattcccttcaaaactattggaaatactagcaaaactcgaactactcttctcactttcttcttcttcttcttc

SEQ ID NO: 300866 - DNA, 2801 bp, Cannabis indica
atacattatatatataatcatgaaataaatcatgtgcaccatgcaacataaaaatgttatttctgatctttattaataagtaaatatgattatattgaaatgggttttatttagggcacaaaaccaaacacacaccaattgcatgagtttgatggatctaaatgcctgaagtgatcaatttcacttcttgaatcaccattttgggtgtttctacccactctcagtgctcattggtgaaagatcaatctctgtgcacctcattcccctaggggaggaagtgtcgtaccctagccggcaaataggtactcctgttgatggttggtcggcagtggttgcactatgggggttgcttttgagccagagatccctagcctgcccctaatccgctggttgtcgagatctagctgttctcactgtttgacctttgagaaaaggtctgtcatccttatggcagggaagatccttcctagtacctaaggaagttgacggtagtcttccttgaagtgtttctctaaggagatcatggcctcttctatcggttctctaattgaactatcttattagatcactggccttccagttgttgcgatctaattctacctggtgagaccgaaggatgtactcctagtcatccgtccatcctaggaattcacatatctactgagtaaatacaccgcaattagtagcgcgtggtttttttagttaggcctgaatgacctacaacttccctgagtctggccaactcaaggtcttctcctaggtccaggtgagtttcaccaatttctggcatgcccactcccgggcatgtctttaaagtgtagaactagagttgaggttcaatcattattctagggggctatcgcccctgggtgcttctttcagtgggaggcgccattggtggatgtactcctagaggtgtgggcctgctacttggatccatccggatgctcgcatcaagttggcgagctgtggtggcagactttttgcgcttgttttggtgacgggattcaccacatctctagtattcatggggattccaattgtgactggaacttgagtgtctggatcttcaatcggtgggtcttgacggagacctaaagatgcagatggtgcaataggagttcttcttgtgctcaccatggcgtttgatcaaatcatgatatccacactctcaatgaaagcaccaaatttcggacctcaaaaagtgatcaaccgacaacaaggtcatgcagatctgatgctttccacgtgtgtgcacaaataagaataaaaaagcaaatagacaatatgatttgttatataggttcgacccctttgtgatagcggtaatgacctactccccttttagttgtattataccgagggaattactatccgatcactatagcttggatcttctatagtacccttaggattactatcttgaatctcatcagatagattttgacgttgcccaagaatttgtttaggtgccccacttgtagagtggttgtttgatctgcaaaaagcaaacaaaatatccatcaaacaagattttaacaaatcatatggtttttacaacacatcatcatggaagacgttaagaggctctaaaccattaattctaatataactgacctttccctttgtaaaaagagtaacatcttcttgacctaaattagtctcgtattggaagaagcctgggaagtaaattttactaaatgcatccactgtgacatgatggttacaagtggaatgaaatggttaggactcctgacgatacaatctactctatctatagacctactccatgaatacttatgacgatctaaaatcaagaaatatgaatcaaatccacattgactaaaggtctcaaaatcatatatactggaagccctaattaaatggaagggtttctcaccactacggaaagtactcgctcccgaagcaccctcattacgcaccacctccttgaagtggatggtaagttcttcaccctcgcttaggccttctgggaattgtctcctccaatctgcctgccatggctcattggccttcaccgcctttaaagcctcttcagcggtaataactgtgatggctttttaaccccgtccgggtccccccgtaaagcatcctagattgcatccttcatggaaagatgagccacatcctgatgtggggcgatatgacccacttctcagaggttctctatggtcgcaagtttctccacttgcaactttttgggtgagaaagacttgtaagaattcatcctctcttccaactctgtagtcagaggcaattggggaaggcagtctagcaaatacaaaaagtaggagattaaaatgtaataaacagaagaaaaatagaattttaaaatctaaaggaaagaacgagacttacttgtaagattaaaatccaaactaagggtaggaactcttttcaataggaagatgaaggtgaagaagtagtagtctttgaagtcatgcgtgtacttcgtggaactcgtgcgatagggaatgctcctgctggatcgctccaacctatagaagcccacattctccttgtggccactcatttgttgggacttctaatgttcaagaaatcttacattggttgcatcagaattaaatgactccttccactcagatctctaagccttgtatcctttctgtagcagagcatcaccaagatttgagcccgattctctttcagttgattggattcttcacaggtttacacactatgattgacgtaccaacatactatgtgtggacatgtactttatcactataagggacaaaatattgaagagagagagagag

SEQ ID NO: 300867 - DNA, 2178 bp, Cannabis indica
aaaaaaagaagaaaaaaaagtttttcttgccatgcaatggctatgtgtctaaacttagggcatgtttggtagacaagataatatgttgcaaggacggaggcaaaacactatctcatgagatcaaatacatcatttgaaaatcgaaaaattaagataaattgcgagaaatataatcaaatttattttttaagaaaaaaaaaagcgagagggcaaggggaaaggccaccctagtatgcatgtatgtaactcggtccttccgagttagggattattttatcgagttttttgtttgggtgtttacaaaagattaaaagtagttgcttgagtatgagactttgcttaaatagtataggaatcaaagacaaaacacaatgaataatttttttttatgcatattattctaatcaagatttctaattaggtatcaagaaatctccatcaaaataaataataaaaaaacataatgaattaattctttatcttttttgtcaatactattttgaattctatgtttaataaaaattaacgattgaactttctgtaaatgataaattagactttgtattttacaaaataatactaaataatactctgaactgattttttatcaaaataaaacttaataataatacgttttagagattttatgacaaaactagcgtattctgtatccattcgtgctagaaattattttaaagttggttatattaaaaaaatattaaaaattgagtttgaggtcttatttatactatttaaaaaaaaatataattaattttgccatttaacaaaataaaaattcaaattaataatttttataatatataaaatttaaaattatattaactatttatcacattttttagaagaaagtcttgaatgttcctatatttgtccaagaaaagaactttcatctttgtacattaattaaatgataattctctcaattattttaaaaattgataaaaattaaaattattttattattgaagatataattacaatgtgtgtctaatagtaaagtgaatggtttgagtcaaaagtagtcatagaaaagaaacttttgacatttgagagaccctcaaaagaagagaagagaatacaaatagactaatagtctaatagtataagtctagtatagtactttttagtacttcttacacctacttattagtacaatacaacacataaaaataaataattaaatattgggatttgattcctttgttcacgtgaccaatttaaacactttgtctttttggtgtaaaagaaagaaagaatggaagaaatggtaatatataatatatgaagaaatgttaaaaggtacaagatgagtgctactgtcaaccttttgttgtaatcttttagttaatttttatgttcgaaaatatatgttgaaatatttttttcacaagagtattcgttatgcttacaacatcattcttgtaaatttttaaaaattttcgaatagtttacaatatcgaaaatacgtttgaagttttttgaacgcgcatggtaaattggagtattacgaactctatttttgatactgtaaactattcggaatttttcaaaaatatacaggaatgatactgtaactataacgaataccgctataaaaaaaattaaaaaaaaataccactatgtaattagcactcctcaaggtactgttagtgcctaatacattgttcagtgtcataacactattgattaattaagtattgagtcacatataaaaaaataactattaaaaaatatcgctaactaattataaaacgctacttataaaaataaaaagtggtggacactacttatactcaaaaataagaatcttatttgtacatattagaaagaaggaaaagtgttatattttgtgacaacaaagatggaaacaatgggcatgcaaagacatcaagtcatgttattgtttgttattattaacaattttctactctttcacacgcaatcacacgtgccattgtcattaactcgcacgcgcggacaacacactttgacaagacctttgactttgacccacaccaaagttactccaaagttttttcacatattatttaagaaaaatgatacaaaaaagggtaaataccattttggaccctctgtttataaaagttaccaattggaccatgtgttttattaaatgacaaaatggaccttgtattt

SEQ ID NO: 300868 - DNA, 6438 bp, Cannabis indica
tttttttaaattttattttttgattgttctattgggcagcaattggaagggaagtccattgggaacaaaagtataaaggttgctgatgttattcctcgatcgttcgagaagaatattaaaccaacaactgccttcttgcaaaacggccaggaaactggaaaacctgtcatatccggggatgatggggatgtctccattaccttaaatggggctcagaatgttgatggtaatgaagacaattcaacagttaatggttcagtgactagcgtaagaagtgttagagatgccgtgactccccttgcccatatggcctacagtgatcaattggagcaaaaaaagatgtctaatatgcagatcctcaaaagacttgtcagtatctgttcttcttatttatttatgttcacattactattttttctcccattctgcactctgcttttcgttgattttttttttttgaattaaattaccatctcttaaatgttgccaaaattttcattttcagactagaaatgcacgtaaagcttgtcctaatggtgtttcacttccagaatggattctcaagtctagagaaataggtggttatcacattttcgctagatgcaagaaaaaacatcctttaattttacaagtttatcatgacattctgagacatatatgcatgtccttagagtttatcaagttttcttgattggttatttcactctggtttgctccattttctcttgtttgttccaaagaaggctgcaaattcggtactcaaccgtccattttttgtaaatgttaattctgtaggtggtctcccatgcattttagagggtatactaccatctccagttataaatggataccgtaacaagtgcgagttttctgttggatattcacttcaaggaaaaataacagtgggctttatgcttggaaatttcaggtaaataaatatacgtgattgtgaggattgtgaggattttgttttcttcctttacaagcatttgagattttagtagaataatgaagttttttccagggagggtgtgacggcagttgaagaacccataaactgccctaatgtttctacaatcgcttgcaaatatgcttcaatttttcaggagtttcttcagcattcagacttaccggtttggaaccgatttaagaatactggattttggcgtcaattaacggtagatactgtcaaatcctaggggcaagaaagcacaatgccaaaggcccatttgttgataagttattattacttatttattcattcactttgttgtatttctatcaaggttcgagaaggaaggagaccggaaacaactattgattctgaaaacccagaagccaacattgccgaggtcttacttatggttcaggttagtttctaaatttggataataagttgaatttcagtatgaggcttccttactccttttctcattataacatgtatctctaactatagcatgcccaatctatatcagaagcctgcatacatgtatatttaatgttttattttgggtaatatggtcacccttctactccttttgatcacataggtttccaccatgagctttgatgaggcattggtagctagtgaatttgagaaacttactcaagcattttctgcaggagctgcggcaagtgttccttctttgcctctaacagctttagttgttcaggtactagttcattttcattttaaggtactagcatcatatttatggttcctagcttttttaggcttgtaaaggtgaaggttctagtgatgtctgtcaaccttattaaagattttgtatctgtatcaagttttgcacaaattcaaggtttttaattgtgaaatccactaatcattgtatctgatgaatatgaagctctatcttctaacacatgaaattgatccctagcgctttcgttttgtctgcaaaatagtacttgttctattttacattgccttgtatttggaataccagaaagtgggcatgtttggtttcataataatctcttataaagttatatgcatgttggggacccttgggtgtttatagtgtgtcagaaactgttcaacggagtaaatttttttggacgaaatggatgatggcaagtacattttttcctaatttacaaaatgaaggtgggtgggtcttgggggatgagtttgtgcataggagtgcacagcagaggaggatcaggagtattgcagcaatgccatgttatacagctgtttcgagttttattttttcctctcaattctcaattaagactattgaggttttcagattgtaattcttgagcatgcggcatggaactaatactgagcatattaaaccattactgcacaggaatgaaaaactggaaagctccattttgcaatcaaaatgcaatggccaaaaaataaaaatgaatgtctagttgaaaaactgcattttgcgattagaaggcaatgcttgtctgcttctgtttacttggtttcttgcgctttagcatggcatgatatggtctcttctaaaataatatcattcctttaaaatttgatggatatttttattttttgcaggatcatcaaggaatatcaaatgttgcaccagctgatgcaccactaaggcaactcccattgggtaaagagccagatgttccagaaatggaagcagacaaaaatctagtagatccaagaattcatgattacataagcaatcttaaattctgtatctcacccacagctttctttcaggtaagaaactggtgatgtttgtttttttttcattgttcagcagaaaagtttttccttgtaaaatactctgtgccaatactattgtaggtgaattcccttgctgccgaaaagctttactcgcttgctggggattgggcaggtttgggtcctgatactttgctatttgatatctgctgtggaactggaacaattgggctcaccttagcacatcgtgtgggtatggtaatactcaccatccttattcccgtgatttttcgttttaatgcttttcaatgtaggaaagtatgcgggaactaattggcagtcaaaacagaataaattcattagggcttcttttgaactgaactgggaagaagatgatacctttcatctggaaaatgaaaatttggataaattttgaaaggctcatataaactctgctattgtttgtataatgatgaacttgttttgctctacactggtgccaggttgtgggtgttgaaatgaatgcttctgcaatttctgatgctcatagaaatgctgaaatcaatggcataaagaattgtagatttgtttgtgcgaaggtgagatatttttattttctcttcgctcggaaaatatgttagttgaactcacttctatttttgtttggttgattggtgaatgactcagttaaaaaaaaatgaacaatgtttattataatattatcaatgaacaattaatatttgttgtcatttaggtgttgtttttcctttttttttacatttgatcatttatttgtatgcccctcattcataatgacctaggcagaagatgttatggggtcattgttgaaggagtacatgaatgccactcagctacaagatgagtgccaaatatctgaaggggctgttgaagtgaactgcacaaccgaagaaaaagatgggtgccaaatatctgaaggggttgttgaagtaagctgcacaaccgaagaaaaagttgagtgcccaatatctgaaggggttgttgaagtaagttccataaccgaagaaaaagatattttggttaacaatgcagaggatcctgaaaggagctcgtgtctctcagcagcagacagtatacaagagcctggagaaagctccaaccaagagctgcagaatgtaaatattgcatctgaaggccctcgggaaccagatagccaacttcaaagcaattgccagtctgaaaatgtaaatcccccggtgctagcgtttcaaaaatgttgttgcaatagttgatcctccacgtggcgggcttcatcccactgtaagtaacactaaactaccacacatgatggttttgaaatctttcaaaatccatgagatgcctctagttatataacagggtgtgtactattttctagaattgattttatttttgattttccactgctgatatatttgcgtgttccacgacttttatattgtgttcaaagtgtagtttttttatcgatttttttgatctgactagttgtcccacgaagcaaatactcttttggattgatttttcggtttttgttttgatgatgcaggtgatcaaagttataagaaccaatccacttttacgaagactagtgttagtaccaattactgttgtttttcttttcttatgtgtgatctttatctcaaaccttttaatttgtaggatctaaattcctttctcattttcgtgtagttacatttcctgcaaccctgagagcttagtggctaatgctatcgagctctgcacaccatctgccgagaaaaccgagaaaggaaataggaacaacagaggatggagaaacatgagcgctgctggtctagcccgaaacagggccaagtcaatgccccattccgagcccttccgacccgtaaaatctatggctgttgaccttttcccacacaccgttcactgcgaaatggtgatgctacttgagaggtagttagttttacaaataattatccgtttgctgaaattttgtcatgaactgcttcaattattcttaggtttgtttatctgccaattttgtattgattattgtttttgttactactgctctcataaggacacactattgttggtttatttggtcctcaataatactagcaaaatgttaattgaataagaattattattctctttgattattaatatcaacattaatatattattggatattattctttctcattagatgtcattttgtaaaagtaatgagagtattatgtcatttgggattgtgcttattaacttttatgcctaaaataaaaagatgattgttatgaataatttgtagtattaattcttgtaaataaatactcaagtgtaattattgatagtaataatatttaagttataattttgtaacttctgtaggtacctaatagtaaatacgtgataatctttgattctttgattggttcaggtcattaagtttttttaaaaaaataaattaatttaaatataatgatttgatatttaacatttaggtaattacggagttttattattactgttaaaaattatacttaattatttatttacaattgaaaattaaatttaagtatttatgttgtaaattattgattttgactcaaattttgccatctgaaattgaagattagtgcccccatgttatgtgtaaagtgtagtgtgtgtgttgtgggtaagttaggcacaaaaacagtagtaaaaacatcctaattaggcatgaaatgtagttgtggggtagagcttactagatagactaagatatttttgtcctttcctatgataacttacacattaatggtaattatatcttaatcaggagttaggaaatgataggtcctcactcacatttatctatttttatacttgatcataataagtcattctattcaatccaactataaatattttcttcttctgcaataacaatagatatttgtcagcaacagtaattaggggtaatgattcatgttcataggtcggggtcagatcttaagtattacaattaaatatcaaattcaaactatttataaagagatgagtttgatccatttatataaagaatcatatgcttaattttgagtaatttatctactcattatgtttctaataagtaacataattacaatcttgctacaacacacttatgtttatgttctatttaattaaaaaaatataatttatatgtaataaatttaatgtatttaaagagtgtatactcttacatatgttatttttcagttaaacatgtcaaatttaaaataacttgtttaataaacgggttagccatatcaatctaaaaatgagccaaacttgtgcaccttacaatacctccactggtaatataataataataataattttgtaataaaaagaaagggaaatttgaaattccatgcttaaaatgccctataatttttcccctaaatgcatagttattaaaattggtactatatgacaactttcctaattttccaaactacccctcccatttcaaacccctccctctcatcctctctcttcctctcgcacagccgccagccgaacccagtacccactcctcacaaccaccattttttcaaccgaagctcaaccccgtccccaccgtgcttcgtcgacgctcaaccccgacccacccacgccgtcgacgctcaaccccgaccaaccagaaccggcgaccccgaaccccacgaaaatgcccctctctctcaccgtgagtgaccacccccaccattcgactgccccca

SEQ ID NO: 300869 - DNA, 1633 bp, Cannabis indica
tccttttttgtatttttttttgtttttttctctaaaatatatattaagcaataaacttaataaagcattaattagtggccttgggttccttttagtgcggaaaggacaagttttttgggggaaggtttttgaagaaattgatggatcatgaggccaagaattattttcctaattgagataaagtcaacacgaaatgacaaacacacggtaagatgttgacttttatgggtttctgtttttcttttgaaatggttatgggtttctgttataaattttgaaatccaatttccattttcacttctccttttcaattttatttttcccaaaataaggacaacttatgagtaaaaatggtgaataaaaaaacatcaattatttacttttttttataaaataaaaacatcattcggaatagagatactactaaaactaataatcaataattatttatcaatgtatatacattttatgaaagccttcaattaccatctcaaatatgaatttgctaaaggagacatgagttaatgggagtgattcattatcaaatgaataaaaatattacacatggtattgcttattgagaaactatacaaatactactttagcttgacatttttattttacctatatatagtaaaaattcattgtatttccatattatcatacatattttgtgaaaaaaaatgtgcttatcggatttttctcaaaataactgaagttttataatttaaatttggttgcatatacttacattatattacattatacatggtcatatatttaatcattttttatctctttttaactttgattaaagaaagacatgtctcgtgtttgtgggaaattgataagacaatacaaaatggagagtgcatacatataaatgctagagttttcaggtagctgaaatttgatgagatgtatcagagaatataaatgcaaataataataatggagttgaagaataactgggttgaaataatttggtcaaaaaagagtgggagtgatgtgaatgtagtaagtatgtggggttagggttagggtttggctttggctttggctttggctttggattcttttgttgtgtgacccaacacagcacaagaaattaagaaagagggcagtagtgtagtaaatagtgaccttacaattttcagattgatcagtaagttgtgtttgtgtctcgtgcgtactgagtgagtgagtgagtccactaccattgtatattctgattatttctgattacaatggtcatcacacacatcaccaacttcgaatcacttacctcactccattatatatataactcaaaatcatgccatatatatacaaacatgcaatatatgtaacgccatgatcactgttgcaattctatttttaggtttggttgtgaaaactttgtcatttttttttatatgaataaagtttataattctaccagtgtaattgctcttacatcatttatatacaagtaaaattactcttatgcccttattatgtaattttttattaccaaaataaattagaaatattagtttggactatgtgttttgcaaaagtttttaattgaactttctcttttgttaaatgacaaaatagactctatattttttttaaatggtaaaaataggac

SEQ ID NO: 300870 - DNA, 3179 bp, Cannabis indica
aacttaagtattatgccgcaaattactttttattgttaatattttgaacaaaacaagtttttgtgatgtattaccatgtgttgtgcggtagggacatcctttcttgcttgggtcaaatgtttgaattctaccatagtccttcatgggaggagggattatgcttgaccctttggaagattagtttgttgtggtggtgctatgcttaatgtgatgggaacccttgagttgcataaagataatccaattaagagaggatgaagtataaggcctacttggtctccaaaattgtctaaactaccaaagggagtagggaagggatcctcacaaaataatcccctttttttaagaaaaaaaaaaataaagttttaacgatgtataataatgcttttgtgatggtggtatgaaacttgtttcagtaaaaaaaaaaatgatgctttaacgatacctgatatttttgatatggtgacatgaaaacttatttttcactagaacaaaatggatgctttaaataatgatggtgtcgtgaaagcttttatttatttatttatttattggcctaaagccattttgaaacaattgttttatgagataaaatttgattaaaacttgggtaatgcataactattcactgggatgtcactttgagattttttttttgttcaagatcaacacgttaacatgtgtagagctttaaaatttgaagtgagtagaatacaaaattttaattatacaactctctaatagaaaaatctcaattttattgtttaatgtcccaaatttaaatttgtaaacatgtagatcttgatattaccaaaattaaaaaagcaaaacccctcaaattgacatccaaatgaataggatgcattaccaaattaagttttaatcaaattatatcgcaaggccgacgttaggcacaattttgccataattttggccaaaaaatgaagtggacaatcacaaaagtatcgttaagcatcgttctttgattaaaaaataagtttacatggcatcataccaaaaatattattatgtgtcgcataagcattgttttattcaaaattttatcgttttttgagctaacgaggaagattgtgtggatcttattggtaagttttggagaattaaagatttagactctatttgtaatgtgcaacttaatgtcatacaggtcggagacaaattgaatgattggaacaaaaaaattcacaagcgtcaccgcgttgtgattcataaaaagctcaaggaatttgagattgtggatgataatcttgataatgtcagttgtgaggaactctgtaaaattgaaaaagagttggatgttctccaagaaaaagaagaaaaatattgggcttcccgtgctaaaaatgactggcttcaatttgaagacaagaataccgcttatttccataagtgtgcttcgggcagacgggcaaagaataagattttgaagcttcagaatagtatgggtctagaggttacgggtcaagctaaaattggtgccattttcgaagataatttctccaagttgtttacttcgaattgcccttctgttgatgcttttgataaggttattaattttgtccctagaaagatcactgttgatatgaatgctcatttgattaagaatttttgcggggatgatattagagaagctttatttcagatggatccctcaaaaagttcgggagaggatgggttcacaactgggttttatcaatattgttaggcctgacattattctgcaactcttccttttctcaatggggattctagtttaaaaggtattaacaaaactcttattttcttaatccctaaaatttacaattccatcaaggccttggacttttgtcctattagtcttgtaatgtgagaggtgtttcacatcatttcagatgaacaaagtgcctttctttcgagtcgtcttattactgacaatgctcttattggatttgaatgtatcaatgctttgaagaagaaaaagagaggtgatggtttttgtactctcaaacttgatatgtccaaattttatgatcgggtcaagtggtgcttcttggagaagatgatggttaaacttgggtttcatggtgtttggatccgtaaaattcttgactgcatctcttttgtggagtattctgttttgttgaatggagaggtcattggctcaatcactcctcatcgtgggcttagacaaggtgatcctatgtccccttatctttttttactttgtgttgagagccttacgagcttggttagaagagattgtgaaaacaagttgtttaggcttccttgtggttggggttgccctattatttcacacatgttgttcgttgatgacagtttgttctttttcaaagcttcagaagtgtgttgtgtgagattcgacagttgttgagttagtatggagcgacctcgagtcaactagtcaactttgacaagtttgcaatgtgtttcagccccaacgttttgagttctgaacaagaaaggttaattgattttttgggcgtgaagagagttgagtgtcatgagacttatttaagccttcctttttttgcgggacatagtaaggctgggttgtttgattccattcagactaggatctggaagaagtttcatgggtggaaatcaaaattgttctctatggcggggtgtgagatacttatcaaagcagttatccagtctattcccatgtactttatgaatcttttcaagcttccaaagacctttatcaaaaatgtccattatatgtgtgctcgattttggtgggggtgggaatgatgtgaaaaaaaaatatacattggtgcacgtgggacaaactttgtttacataaagaagatggcggtttgggttttagagacctgcgtttatttaatcaggctctcttggctaaacaagcttctcgcatttacaatgtccctgattctttggctggccgtgtgttaaaagggttgtacttccgaaagcggtcctttgctgaaatcaagaaatctaagagtggctcctttgtgtggaaaaatatcttatgggggaaaagaactttttgactctagggttgtttggcgtgtaggaaataggaaggacactgttatttattttgacaactgttaggttgtttttagtattatttttaggttaatttttagtgtgtttttaatttacttctactcttgtttggagcaatt

SEQ ID NO: 300871 - DNA, 1400 bp, Cannabis indica
aaaaaaaattggactaaaaattttcatcatgtcgaaacagtaagggatgcatagatgcactattttttagagtccattgtagaagcatccaatatataatttacataaaaattagaagaaaaaaaagggggcgaaattatacctgtaattatcacaaaccaggaatgtaaagaatgagagctcaaacagcatttaagcctctgcatttgattcctatgtatcaattgtaaaagaagacaattcttcagcaatattcccccattatttaagcaaaaattgaacaaaaaagaccgcaattgattggttttcggatctaaagtaaaagacaaaagctgaaatccaaattagaatattacaaatttataacaaatcccagcataaacaaataatcatatctatgctttggggaacaaaaattgacttcacttacaaaagtctaagctcagtactacatttctatacatacatacatacatacatgtaatagattaatcaaaagatatggtggaaatgaaaaataaagagaagctgtaacctggtaaggatgacggagagagaagcggcgaagtgagttgggcggaggaaaacccaactggaacagctttaggttctctgtgtgattttgagatagaaacgtgattactgatttttgaagaagaagaagaagaagaccaaatcgaacagacacgagtaattgaaaaagcgtaattcacatgaaaattttatgagtgttgtgccttatttgcattttggaccctaactactaaattttgacaaatagagacttaaagtttttttttttttacatagtgattagaatcacctatgaatttacaatataaaaatatgcaattagcgcaaaactctcatcgaactagaatagctcatcgtctaatcaaaaattatgttttgttgaagttttaggactttgggaagattaaaatgttatcattaatggcctgaaaattggtggttttacagaaatcctcagagagagttgtcctcatcattcctgaatagtgaattctttaagcaaagtcacttctttttcatactaacttatttgactgtcattttgtgacaataataaacatcttcatcatgacttgtgtcaccacacttgaaacaagacagagctattacccaaaacagtaaaataaagcactgttgttagtgggaaactattaatgcctccctttcttgaaaaggtgtgatgtgagttttggtaataaggatatattggacactcatatatcttactcttttcattaagggctcgtttggaacgcggtattaggtcgtattgtattgtattgtattgtattatattgaattgtattttatgcaatatttttatgtaaaactatatgtggtattaacttttatgaacacctaaatat

SEQ ID NO: 300872 - DNA, 3602 bp, Cannabis indica
gtcttcacctaatgaacatgaattaatgttggatctgcatttaactccctctataaaaggtaatatagtaaaccactttggattccaaaaagcaaagacagcatatattaaaaccaagacaaaaatgaagtattttcgcaagtcatctcttagttcctagttcttcaaagtagctccaccgatttacagagcccagcaccagaacatagatctcatgccctaatgtaaaagaacctacatttctgtttttcttcatctgctgtggctaaaagtaagaaccagatctgatttttctctattttcccaagattaaaaagtaaccagaacacatgactgagataattaaacatagtaaaaaatataccactactggctaatggaaactagcattatgtatcccaatttacgtaaatgctcactatttgttctgctctaagatgagtaacatgtaaaaatgtttcacccataaaaccaaaaaaaggcctccttcaacttatggtccagtcaaacagaccagaaaagacaaatcctattatcagcctaaatgtggattgacatgagcataaaatccatatgcatttcttaatgtgagcaggcttcccatgatttcgagcaacacctataattctaatgtatgattagatacaaaaccaaagttcctatgtacagtaacgacactggtcactaaaggtaacgatcacatttacttcaccctataaattagaaccacatgaattgttttatagaaccaccatgaagccagaagaaaaacagtccttaaattgataccagagacttaataaagattctttctcaattcaggctgcagaaaaggattaagatacaatgtgctacaattttccaaaaatgtcatcatgggagggggaaaactggaaaagtttactaacatgatcctttagttaatgaagtgagagcacaacaagacacagaaaaacctatataaacagaatacaaaataaggttgagttgaagacatcaaaactcacctagttaataaacaagcatctgacatcttcatcaaaggctcgtgaggcatcctaacaaggtatgaatgtattgccaaaaaattggtggatttcatctcagagactcatgacggttttagcatttactataaaccttcattctacaattacacattacataaggacacaaagattggttcttaagaaaataattcacggaggttacctcattgcaaatcattcctatttcataaggacctgatccctactaactaaaaggctgcagaatatgcagctggttcttctaaaagagccacaatcgtaagagtcataataaactcaaatgaacaaatatagctcaaggtatcaagctttcttcaaattcaagaatgtaaacattaaagtataaatgcatgaatagcatacagtataaaattcagacaaagaactatacatctgcaagtattaagaccaaaaaagaaaagaaacagcaagcaactcaaactaaaatttaatcaacatatacacaaactataatctaattaacatacacacaagtaagaacaaagataaatgcagtaaataagaaacaaaatcaacaacctaaaggtcacccctttagagaaaataacggtaaggtgctaatacccatctggatttgcatcagtaaagttccacaaaccatttacttattcaaacattttgcttctcaaaagcaagttaaagacacaaatgtaaaaaaaaatactaactttctacacgcgtaacaataagaaagaaaaaaccaaaagacaatttaagcaaaggtaacaacaagagcagaaaatttattttcttctttccacatggaaaattaagcattcaattttctgaacgtaaatacagtacaacatgagagcaactgagaaattctctttgattttgcataaacacattaaacttaacagtaattgcaagttctctatttcaatttctacatacaaaagtagcaacaacaacaacaataacacattggttacggttgtaaaatatataacaaacctcaaaattcgaaaattcaagcagagtgattaaggagacaatgctgtgagccttgcctcgaaaacgaatcccctgctgagaccatccccactaccgggcacaccatctatccatctccaatcccctttgccggagcagtaatcccacaaggccaatcttccgacccttttcgccgaaaagcaaaccctatctcctccaccaaacaccttaaacttactcgattcctgaaaacacctaaacatatccaatggcatccgacccgcttcgtcccaatccaaactctccaaatccaatctcaaaatcaatatagtcgaacacgacgagttcaaagagaacgaagatttcaacccaccaaccataaggattcggttcccatttcccctaaccaaacgaggtcttttcaagatatcaaacacgtcaccccactcgtgtctctcgagccgattccatgtctgcgaattcttcatcttcgcaattgtgcacgagaaaagcttccactggcttctccacggcgaaccaacatcgcaaagagcgtaaaccgagtcagaaaccagaatagggcttctaggtttcgacggcaaattcgaagaaaagctcagccattgattcgaacccgaaaagcaataaagcgcagcgagctcagtcaaaaccatgactcgactcgccgaatcgacaagaaccgaaccatgacgagaccaggccgaacccagctgaggcaaaacccgaaactgtcgagtcaaagggttacatacaagaagcgacttgctgaggcccggagacaagtccggcgagtctccccataggtaaacgagtccgagggaagaggcaaccgggtggagagaacggaatgggaggaagtcgaggttgaatctgagccactggttctgatcggggtcaaagacgtggagaccgggatgagatgattggtggaggcggtgggcgtggtggtggtggtggtgaggtggtcggagagcgaggagatgaagcgaagaggtggcggagatgagatgaaggaagcaaggtgaggtgaggacttggttgaagagcttacagacggaacgacagatcatgatctgacggaggggaagagctgagaatatctggtgcagagtatcctgaggaagacggtagatcggcggcgcgtccatttcactcgccgtggtaccgtacaacatccgatgttagagagagaaaaagagaaagattgatagggaaactatgtggtggagttgtcgtagtaggggtagacgagtccggtattttcgtaatttcacttaatttcgatttggattacggttgcaaaggcccataatgaggcccaatataaacgaggccctaaattcggaagcccatatgagattatttcataaaataccaaaaatgataaaagaatacatttttacggattttaactttttgttttacaaaaatataagatgttatttttttggttggtttcaaaatagtattgttttcacgttgttgctgtacgaaagcgatgtaaaaacaaagtctctcatatactattttttgactgttttttttaaatttacggtttgagttgctccggtagtt

SEQ ID NO: 300873 - DNA, 1527 bp, Cannabis indica
tgccacatgtcaaatattaatgcttacgtcatcagggaaagtttctaaattaacacatgtaaacataaacatgtgaaccaagcgattaacaaagttaaaatatgatttctgaactttattgaatataaataaaattaaatcgaaattagattttattttgggcataaaaccccaacaaaagcatggttcttaggcttttggggtctcaattggttgcaaagaaaagagacgagtcgtgttgtgtggtgttggtgctagtgcgcgcgtcagaggcgagccctctgtagtcaccgttgataccaaagaaagagaaattgagaaaggggataagaaggaggaatcaagtgagaggagatcgaggttatatgtttacaggtatgggcatcataattttgaggtccatttagcccatggacgccagaatgttctctattggcctaggcaaaggcgtcacatgaagagagccaacgagaacgatagtgcaggagaagggagccctaagggttctcactcttcctcttttctttctaattatggttttaacattaattttttattatattttgtaaataaatttgattttaaaataataaataaaattaaatgatgtgaactaattgatgactcccacatatgtgtctgtgcggcaactggcaaggtgcctacgactatcaagaaagtgtatggaagccatttttgccaaaaaaaagaacgtatatgtttaagtgacacaaacactactacaaaataaggcataaccaccacttggtctttcacattggtttataatcgtcacttggtctttgtcgtcaattataaattgttgcaagccctatgtggaatcgtacaaggctgctaacgacattcttataggtaatagttataattattattatattttgcctattaggataactaattacaaacatacaaactttagttcgtgattctagctttcttttctttttttccgaaggcatgagcataacatccctaaattctgtaatggtgtaaattaggttaacgtccattccaacattataagggttcgatggtacgacattaagaatgttgttagcagtctcaattgcatgtccctaaaagtaagttggcaaaattgagtaactcataatacactttactatttctattaaattatgattgcagcgttctgttacactattttgttgtagaattcctaggaccgttaattaatataagattttcaatttagttaaataatatttaaacatcatattgtagaaaagaataattttataatagtgaaagtctaaaatttaagtattttcgttgtgaattattttttgaatttaagtttaatattcaaattagagttaagttttatttaattttttagttttggacaaagcagagtctgtcacgtaggtatttaccagccagttaacgttaagtatctacaactgtcaagaaattctaagggaaaattaccccacatacttttttttaactttttttttttttgaaatttatggtttgggtttctaa

SEQ ID NO: 300874 - DNA, 5384 bp, Cannabis indica
taacccgaccaaaccaacaaaatcattaggcgggttgaattttttctaatttttaagtgggcaggttacgagtaaataattgtaacccggtatttatattggattaataaaaatatgttataacccaaccaaactgatcgacgtacacccctactaatttcctaatcagcacaaaccatcaccctttctttctctacctcttgcacaccctttctatttacagcctacgcacaaaccaacacctcctctctcactcgttcgctcctcctttgatctctacttgtcgtcgtctcaagctaggaccacaacggaggtccctgcccccaaaacccaccccaccactcactatattctctcttttgcctgtgcacacaccagcaccgaaaggagaagaacatcgacagccgttctctcttcctcccttctatggcggacagaggtcgttactcccgtaaaccccacccttcatcttctctttctctttctctttcgtctgcttacacaccagtagcgaaaggagacagatttgttcatccgaagtcgcaaaccccaaaaaccaacccacggtgtcggagctcccacccatgatatcatttcatcatttatttttctttttctttttttatttattgattttctcattttggtattgtgtttggtcttggtaagatgtttatgataagaatcgggtggatcttgtttttttggatctgcaaattgggcaaagagaatcggttagaattgagattattttttggatctgagattgttttcggatttcacttttattttgtatttttcaggttgatttggatctacaaattcaatgattgttgtgattgtaataatttggttgcagtggtaatgggtactgggtagtggtggttttagtggtgattatggtggataaaagtagtttttggtgatgctactaagaatgatgaagaagaagaaataaaaattaggaaaaaaaaagaaaggatgaaaaataaagagaataagaaaaaaaaaacaaaaaagaaattgtttcttttaaaaaaagaaaataatttatttttaatattttttaaataaattatttatatggaccaatgatattgtgtcacatgtagactttgtccatgtgaatagtttaatatgacagttaacagctaaaaataaatggaaataactaattgctaatagaatgtgagtttagtggatttaccgctaaaaaaagaattttgagggttaattgttagcgagattaaacttttgggacttttactgcaattaactatttaactataacaaatatcgtcatgaaataaattaaacaaaattccttttcaggcacgataattaactaagagtatctctaatgggagttgcctattagagttgtcttggcacatatgcaatgtgtttcaatttttaagagtaattttatataaacttgtttttaattatactagaagatcatgaaaggaaaaatagtggtgtcttgtcttttgacatggtagtgttgttcttatgtggtcctgttaaagttctgtcttattgattcttttatcctagtattgttcttctttagtttgattcgtctgtgtggtctgtactctgattggattgttgtattatggagcctgggaatcgcttcccatccttaatagcagaacagtacgagagtttgaatatagaagatgaagaagaagcaggaattctgtacgaaggtggagatgatgaattgtcagatattgatgatagatgggtactagttggtcgttttcttacgaaaagatccatcgattttcaagcaatgcaaaataagatggcggttctatggcaaccaggtcggggtatgtacgtcaaggagttggaacataatctatacttgtttcaattttatcatgaggtggatatcgaaagagttatggagggaagcccgtggacctttgatcgtgtcccattgatatttgaacgtcttaagcaaggtgaaaacccacggtcagtcattctcaataaactggaattctggattcaaattcacaatttgactacgggattcatgtccgaccgagtgattcgcgatctaggcaactacttgggtagttttgttaatcagacccgaacaactttattggtgtttggagagattttttcagagttagagtgaagattaacattgacaaacccctcaaaaggaagaagaagcttgaaagaataggtgggattgtttgttacgctcaattcaagtatgaagacctatctaccttttgtttcatctgtggtattctgggccactccgaaaggttttgtgaaaaactctttgacacccccctggacgagatagaaaaaccttataatttggaattgaaagcggcaccaagaaggaaaagtcacacgattggagcaagatggttacggtctggttcagtcaataacaatggtggttactctgctacgggaggaacgacaacgacttctgagcagtcttctggccgtggtgatggtcgggttggcgaggctaaaattgggggatcaggatcgaagattcagggatccacatttactaagccgattattgtggagggagaggaggcggtttacaaggaagtccatgctgatttagtgggagggtcaatcgatcagtatcctaaagatataaggggtaagtcgcatggtcaacatacagctgaagtcattatggaatataatggagaggatcctttagtgatattggaaaataaaagaagaagaaaaggccaagtatctttacaaggaaacttagacaatgttgggttgggccttcctaaactcgacccagcagataattctaaactaattgtggatgatggtattatggactttgaggaggaaagtaatgacaacacaaaaaacttgtctggggcgggttctgttttgcaggcccgccgggaattatgaatgttctaagttggaattgccgggggcttgggaaccaacgggcggttcaattcctaaaagagttggtaactcaaaagaaacccgattttatttttctctgtgagacaaaaagtggtaaaaataaaattgaaagattgggccggtcacttgagtttgaaggagtttttgttgttgaagcccaaggaagtgctggtgggcttgcttttctttggaaaaatcaagattatggtagtattgttgggttttccaaaaaccacatcgattttgtggtggagtcgactgagaaagggaggtggcgactaacgggaatctatggtgaacccgtacgtgctcaacgtaaagacacttgggatctgcttcgttttttggcaagggactcgtctcttccgtggtgcattcttggggatttgaataacatagctcatcatgaggagaaaaggggcggtcgaagatatcctcaacagcttattgatgggttctgtgaagctctggaagactgcgggttggaggacatggagttggttgggcaccctttcacttgggagaagggcagaggtacagacaactggatagagagccgcctcgaccgtgcgttggtgaactcactttggacccaggtttttaatcttgccactcttttcaatcttgaattttcttcatctgatcattgtccattatggttggaaactgaagtcaagcatgtgtatcatccgaataagaaatttaagtttgagaatgcctggttaaaagaacctatgtgctatgaaattgtcaaaaactgttggaatttgggggctgctaatctcatttcagaaaaactcaaccagtgtgctattagtttgggcgaatgggggaaagaagttactgggaatttcaaactcagaattagaaaatgcaagaaagaattaagagccttaaagaacttgagggaccccgtgtctgtgcagagatatagtgaggtaaaaaaaaatctttttttggtgttggatcaaagagaggctttttggaaacaacgtgcgaagcaattgtggttgaaagagggagatcacaatagtagttattttcacaaaatggcttcgtccaggaaacagaataaccaaattcagaaattgaagaatgataatggtgagtgggtggattgggacaatgggcttcctactgttgtgaccaattattttaatggattgtttcatgcttcgggtagtgcctgccaggaagtcgttgactgtgtagatactcgggtctcatcctttgtcaacactgagttacagcaacacatttcggaagaagaggttaagaaggctgtgtttcaaatgcacccggataaaagtcctgggccggacggaatgacaccggccttttatcaaaagtgttggtcaatagttgggagtgatgttgttgaggcggtcaggagtttctttctctccggggactttgaacagaattgtggtgatgctaacatagtgcttatcccgaaactaagaatccttcggatatgactcaagttcgccctatagctttatgtaatgtgctgtacaaaatcattactaaagttatggtaaaccgtatgaagccttttatggatgaaattatcactgagaatcaaagcgcttttatcccgggtcgtcttatttcggataacattcttgtttcctttgaagtccttcattacctaaaaaggaagagaaaaggtaaagagggatttatggctctcaagttagatatgagcaaggcatacgacagaatcgagtggcattttttggaggctatgcttcggaaattgggctttgttgagtggtgggttcggttattgctgaaatgtgtctcctcagcccgctatatggtgattcatggaaaccatgagatgggtcctattcttccttcaagagggattcgtcaaggcgacccattgtctccatacttgtttattctttgcgctgagggactttcggccatccttcgtaagtttgagagcagaggtttgcttcatggttgtaaagtggctaatggtgctccaagaattactcatatgctcttcgcggacgatagttatctctattgtaaaccaactatggtggaggcaacaagaattcaggaggtgttgagtaagttcgaagcggcctcgggtcagaaagtcaactcatcgaaatcctctatcttcttcagctcaaacattggtcacacaacaaaacatcagtaatcaacttgggatgaatattgctaatgaaaacagtttgtatctcggtctccccagtacaatgagcagaaacaagtcggcagtgttgggcttcctcaaagaaagagttcgtaaacgtattcaaggatgggagtcaaagtttctttctagagcgggtaaagaggtgttaatcaagacagttgctcaatcactaccaagctacgctatgagcgttttcttactgttacgctatgagtgttaatcacaattacagtatcgtcaa

SEQ ID NO: 300875 - DNA, 1507 bp, Cannabis indica
ttttttttaattttatttttcttatccataatacatatgtaatctggtgtttgttttggtattctgcatttcacttggtcctgttctaattatatttcctcatgcaatgccagctggacgccttaacacatcccttcttcgatgagcttcgcgaccaaaatgcacgcttaccaaatggacgtttccttccaccattgttcaactttaaagcacacggtatgttttgttattttcctcgaaagtttgttttactatagaattcttgtaattatatttcattggatccactttggttggtttcgagccaatttttggccctctaatgttgcgtccggtatttaataatctcagaattgaagggagtttcaatggagattttggtgaagttgatcccggagcacgcgagaaagaacacctcctttcttgggttgtgattgattacttaatatggagtgtaacaaaatgaatgctatgccttgtccttgtgtactatttgttctctgtttatttaatgtaccatcaacttgttctatattaaaaagaagaagaagaagaagaagaagcagatctagatgtattctactacttatcttgtccaaacctctatatgggtattatgtaagaatacatagaagatgaacaagagcatttatctaagccaaaaatatcacctgtagtcctcaatttttgtttgtgataacccttaggtcccactatatatgtattatttatatctataccctctcttttttgtttgtagcatattagtttccaatatttttcatgtttgtttgctaacctttatataatatattaaatgaatgttgatattgaaatttgaaaggtgatttgggcaaagataatggttctattagactacacttttttttatgagaataaagattgtcctcttaatactcctaattcttggaagagattcttttcataatactcttacactattttatatctttcattaatggttgttaccttgtatgctactcaaagctttaattttaacctagggaggcttgtggattgtggtatctttccacaactttaggtttactcaatgtaagattaagttctcttggtgattgctatgtttaaggagttgttaatttgcataattgaccctttcacatgaaaatttaatattaataataataatgctcttaaatttgtaatctcttttctcttccaatgttatcatgcttaccataggtggcgtttggttactaagtgaaaatggaataggaatgagaataggaataagaatggaatggaatggaatttttattcttttgtttggtaaagcctatggaatcaacaacggaataagaattatcatgtttggtattgtatggaatggaatagaacttttattattttgactaaattaccctttactcttcaaaattatatttattttattaaattaccattattttattgaattgaacaaataaataatattcttagcaaaaaataatatttattcatgtga

SEQ ID NO: 300876 - DNA, 3211 bp, Cannabis indica
aaaaaaaaactgacgagtaacagttgaaactagaaagtagtggaaacattatggtcaaagtaagcgagctgaggttttaggcaaaacttttatcacacaatttattagaactctcctccttcccaattcccaaacaagaacaagttgttgcttgcttggtctggttgctagaatagatcaatagaaagataaattaacattgttccaatatttaattaattaattaataatagacgaaaaatatatatacatagtcaaaaatagtgcgttaaagtacttcatcccccattgcccaaaactagtcataatcaatctaatcggtcggggaagtgagaagaaaaaacacaatatccctctcctttcccatcccatctccactttttcaaccccaaaaacaattttaaataaatccctcccaaaatcttaggcggtgtaatgctcagctacccaataccaaatattttcatttgtactattgacagattcattctctctctcatgtgtggtgtgtgggccacactttagctccaaccagcggcgccattagtctttacttggtttccaagctcacccacctctctctttctttcactctctctctctctctcatctttaaaaactacatcctcatccccattataataatatttaaaaggaaaaatctttatttattttgatatttatcaccttctctttcattccccccatccctttttctcctgtccacctcttaagcccatcctttcatctctcattctttctcctcctccttctgctactcttctactacaacctctccaaacccaaaccaacctcaacttgttcttgtttttttttcagtctctattattaatattaataatattatttttaattattattattattgatattatttttaattattattattattattattattattattgttcgcaacacaactccctaccataacgtccctattccattcttctcaggctactaaccaaccaatcatattatatttgtattaaaaaattaagagattaaaaaaccaaaaaaaaaaaaatgaaaggagagtatgcagaacagcagcagcagcaacaccatcaccaccaccatcaaccaaaaagcaatgaagctcacaacatgttctcaaagcttcaccactctcatcatcaccaccatcaccaacaccaacaccaccaccaacaacaacttcatccttttggaaaccctttacctttccagataactccaacaagggaatgccaaacttccgaagaagatgacaccagccgcagcagcagcggcgccgccgcaactgcccagagacccaacaacaggtccctttccgatgtcaaccaccccggcgacggagcctccatagaggtcgtcaggaggccaaggggtcgtccgcctggctccaaaaataagcccaagactcctgtcgtcgtaacgcgtgataccgagccagctatgagtccgtacattctggaggtccccggcggaaacgacatcgtcgaggccattgctcgattctgtcgtcggaagaatatgggtctctgtgtactcaccggatcgggaacagtcgctaacgtcactctccgtcaaccctcgaccactcccggagccaccgttaccttccacggacgatttgacatactttccatcactgccaccttcgttgctcaaacgtcgccgtcttgccctatccccagcggctttactatctccctcgctggtccccagggtcagattgtcggcggactggtatccggtgcgcttatcgctgctggaaccgtctacgttgtcggagcttcgtttaacaacccgtcttatcaccggcttccggcggacgatgaggttcggaactcgaccccatccgctgaggcgcaatctccgccgcgttcagggggtggagagagtggaggacacgctccggccgattcttgtgggatgtctatgtatagccaattgccatccgatgtaatttgggccccaactgccaggcagcctccaccgcctccgccgccttattagtagtggcctccactgccaccaccaccaccaccatcattgtcgttatcgctatcatcttcattatcaaagattattagtctgaccagtttatcggtgtactacctttctcttactatgaaattaagaacttgttttaaatttttattttattctattggtgtttgtaattttatgttattattatattagtatttttcttttttggggtgttaacgtatttaattaattctagttttattgtaagatttagaagtaccaaatattaatgaaatattgaatgcatttaattaatgccagggacttgggaatcgcggataatatatatgatgaagtactctagttaatagtagagcacagagtgagttgtaataataacactagctagctagagttatagtacgtgaagtgaaagaccaactttgtaggttaaaacattggatgattgattgggttggtggtgggttttcaattggcaaataaaaattaaaatgtatataattaatactaaccagaattgtttttcattgctttgtttgggagtggattgtaaatttaaaaatagaaaagctagttcaacagtaaatattcaaaaggagtagtcagatcaagtcaggtgaggtcataggctgtggttggcatttttattattagattggaagactagattttaaacattagtcttgaattatgggtttcaatgacatcaaacatgggcagcagaacacacatgaatcatgatggttgggtattttgggagagagagtaacaatgggtagatttttttttactttttcctttatttttttggtaagaattgtttggttttgtaactgggtcaaaataaagtctggtacaggcgggtgttgcaggttcatttttggcagagctagctggctgaggtctgataccaagcttatttttatttttatttttttcatttgtgttttctggctttctgctgtgtaacttcttcaaatagataaagtgtgtgccagtagagaacgtggctagggttaagtcttgcccctctttctctcgtgggagagggttttggctttgtccaaaagtagggactcgaaagctctctgaaagaaaccccaaaatatagtgtgtttttttaataggaatgtagtgttttgttttttcatattataagatttagatactttttttttcttttctaatt

SEQ ID NO: 300877 - DNA, 3067 bp, Cannabis indica
atagaaaagattacattgaaatagagttttatttagggcacaaagcccaacaatcaggccaccacttcttataaggaccaaatccagcaacttgaatttgatacatctactgtgaaggctgaagtgatttttatctccaggaagcagaaggagactcggaggagcaaaactactggatgcccgagtgttgacaaaggccaaagagctcaaaaataaacaaattgaagttaatgcgacagagctgaaggtgaagagaattaaggaagaatttgagaagcttgcagtcgatgttgagcctaggagaaaaagggtagtttctctagagattgacctggactcagagagggtttggaggaggcagcttccaaatatggagaagacatggactgctgaaaggtccaatgcttttgtggttgttagaaccgtaagcaggttagtgtctttgtacactcggtttgtcaaggaattccaacaagccaccattaggactaagaatagaatggagcaagccatggaaattgctctctttaggaagctgctgatgttgtagaagtgcatcgcatgcagagcgtaaagatgaccctcgtgaccacacttaattatctatggaaaaaggatcccattatcctgaaggttcttggtgagcaggaagaagcttatttggccaaggtgcgcgcaatggaagctgatacatgccctgtggccaagaattttgaaatagaagtcgttcactctcaaggaactaatgttgttgcctctggggatggagcttaccaaacctagtcttgagttcttctcttttaaccctttatttttttctttgggggctgctggcccccttttagttttaacaaagacaattattatgccttaaccgcgaggctagatgtaataactttaatttttgttttatgtattttttctgaactatctttattccaacttgcatctcaaatattgttgattacataatcgtctttcatgctacttcgaatgtctcgagtccttggttccaacgacctggactctaagagttagattttgatttggactgatctaagtcatgcacttccatgtgcctctcgcgtctgaaagggttggaagtaaatctactttttaatgttaatcattactttgccaaacatatatttgttagtattcagtgcaactctatatatacaaataccggtcttactgatatgttatctattaggcaatcataaaatatgcatgctaaacatgtaaacatgtacacaactattatactagtcttacctaaattctaaattaaagtgtgccagtcaacctgagtgaaaactgatgcttgacgatttaaaggcccctaagtcacgacatacataaactggtaagtgataagctaaattactttttggggacttaaactcaacattaaaaggttcactattgataaatagcgtgacaataccctaaatatcaagaaaataaaaaaaaatgagactttaggaaaaatatctcaaaaaatggcagaccgtttcttaaaaacggtagactgtttttttcctgatccctacctgctaaaaatcgtagatttgtttctagaaaaacggcgtgccgtttttaactacaaattctaaaagacctcatctctcacacaaaactaacctaaatcttccaataagctctagatcacttaattaagccataaataacacaatacaactaaaaatttcatcatcaagaatcaattataataatcaccattaagaacctaagtttaatcttaaaagcttaaactttatctttcacaacaacaaccaaaaaaaccagcataattagctaagaaacaatctcagagaacaaactcaaacattagtaacaccaacaacaacacaaacccaaaaacatgcatgaaattcctattttcttcttgaaaattcaaagagaaaaaggagagaagcttaccttgagctaactctctcttaatctatgaaaaacttagatcaaactctatgatttttagtttaaaattgaagataaatccccagctgcttgagattgtttgggccgaaccgagaggagaagggaagcaaaaggaatttttcaaatttttggtttatgggataattatgacataacaaattaaattcagcttatcaatatctaaaaatcccaccgaaaacaaattactgaacatgggtaaaaagactatcttgcccttaccttcacttttaagaaatctacaaccgaaggggtgaaacggtccaaaaccataaccccaaacaatatcgacataccaaatgtctaactaagttgtcttgctaaatctaagacactaaatcgtatctaagtgactctaatggccaaatcatcgcatttcactgttatcgggcataaaatacataaaataaatttcatatataacataattaatacagttaggattcaaatataagcccgtagttgaaaaaaaataataatttaaagcctaatcttgacaataaaccctaatcatctgctaattcctaaaataaaactaagtggtcattacacttatcccccgattaaaaggatctttctataaaaatgtaacctgaacaactctggataccgagccttcatattagactctaactcccaggtggcttcctccaccatattatttctctagagtaccatgattaatgctattgatacgaaccacaacaacagttgtgatgaaactcgacactatatatggaagactctaagaattctcaaaatttgaaagtgaaacaacgacctcatgtttagttaagcatgaacattggtatgaaggaagatgccacaaacggtggtggaaatccgtttgataagtcaggttgaacgccacaaggaatactccttgataagttcgaataggtctctcaagaacttaagatgaaaacctctcaaaattttattaaaaaataatctgattttccaaagtgtttacaaggctttatatagccaacttacaaccaataaaaaagaaaactaaaagaaagacaatttaagtaatactaaaatataataatatgcaatactaaaaaaaattatataacataat

SEQ ID NO: 300878 - DNA, 8507 bp, Cannabis indica
aaaaattagactaaaaaactttactgaatgccaaaacaaataaaaactctaactaaaacaaacttttaagagtctactataaacatttctatgatttatacaacaagattaatgatatgcacaaattatacaccaaaacattacaattaaaaaataataataaataaccaacaatctttatttaaaatggacaccactgtattaaataaccaatcacagttagcctcttttagacatggcttagtacataggttacattagaaggaaagtagctcaacaagcacaagttcaaagtagagactttttaggcttcgaatgaaaatcaagatttccttattattagacttattaggtgatgatactcatagtttgaagtttgaacaatcagctcttctctcaaataactgtaataatcattaattccccaaaagctggctaattgaacataatctcaagtcttttattaagcaaagagagagtgagagagagaatgagagtaactcatataagcacaaagctgaaagtacaactagaagttaccaagttttttcttcccactccttcctctattatccagcactgacttcaaagacatggcagatgttgttcaaacaatttcaccaaacccaccaacaagtactggactggtctatatctcattaggcaatcaaacagtgacaaccacctttctatatttacaattctattaaggcacaacggtcgtcattgcaaaccttttgcagacaaattgtcttttgttgctctatcagttatgtctgccagcgaagtgaagatacctcttatttgacgatttcaaggagtagcactaggtaaggatacactttcaggctatgtaaactgatgttaaaaacataaataccaaaattttaatacaagaacaatgacagtggagtcctctgccatcccatcattgctgagttttcctgaactctgttaggacagggtaaatgttctcaaaagcagtgtaggtctcttccctcaccttaaaaaggccaaaaaattaagaatatagtgatgccggtcagtaacagacagaatagactgaccataaatccaaaacaaaagtaacataacaggtctacctttgctcctgtaagaacaatttttccagagacaaatataagaagaacaattttcggttgcttcattcgataaatcaagcctggaaatagttctggttcatactgatcaccagaagtgaaagaattcatcattaacaaaagaaagaaggccatactcgacaacttggagtaattcaaaaatgtgaaagatatagatcccctacaaatctcatcacttcaatttcttggcgaaattgttcacatttcttaagatgagccctaactagttatttgacaggagaaaacgtaagttatagatataaacatatgtatgtcacttacactagagaaagccccgtgtgaaaatgcaagtccctcaagcttaatgggaaatttaacatcacaggagcctactatattctggattttaaaatcctgaacaagaaaaatgagatcaacaaaagaaaagtgtatagatagtaatatgagatacttttaaatataacttcctttcaacaccaaaattaattaagaatttaaaaggttcaatagaaaataatatatgtattctcaaggaaagagaaagataataccttaaacttcgcaggaaacccaagtttttgaatgatacgagcatactgaagaacaaataaggcacataagaatgcaaaatttcaaagtatgaccaccgtggtataggaattacagctttacaaagtaaccagatcacaatgtttttctccaatatttccagtccattacccatttatcttcatgtcttcaaacaagattcagtagtttagacttcctccttaatgtggattatttagcaatatcatcacaggcccaaatcttttaatacataacatggtacactcgtaaaagtattataagaaacaagcttgatcttgccaactgaaaaactagataccctaaggtatctttagcctacagaccagggaggaaataaaaattacctttcttgcagcaagttttgactgttgttcgcttttcgctcccgtacatacctatacagcatagcaataagtaactgaaggagtcagcttcaacttaaaaaggagtgtctttgatataactatcagaagagccccataaagagggcctaaataaaatctggaagaaaataaatgtgttctacatctggcttcataactatgctttcataatcagactagaagagaaactaaatggaggactttaaatataaacatggccaacaaaagcaacaaagactaaatatggcgaggtaaaggaaaaggagaatgtcacaaaaaaataatactagccacgtcaatttatttgaatgacataaggagttactcttctggaacttaccatcttgccagatgcaaatatcaaagctgtggttttcggttctcttattctcataatgactgcagcaaaacgctgcaatgggacaacaaattaacaaagtgagcaaacagaaagtcgttttcttcttataagcaagtgttgaaaaatagcaatggtccttgtgctgaaccatgcgtgacttggtcaagcactaagtgaaaaatgacatctaaatgagtcgtctacatacaaaacggtgacttcacatacaccaagaaaattctcatttttatcaagctacaagcttagacacttatacatgaaacaaataggtcaaagaaaaagacaggaggaggaacaagaggcaagataaagaaacaccacgtgccttaggattgtattctgcatttctagcttggagcgcaatggccttaagatccaacttgcaatccaaattaacagtggagacaatattcctgaaaacacaaaaaagaaaaagaaaagtcaaaagcctgtaagaagcatagtgcttaagcaagtctaagactgagtccagcacaatccttctctatagctccaatttcatcctcagtcgcagtttatgttgtatgagaactacaacaaaagagatgcataaatggaaaaatggtatgccctcgttcatagattaacatttacatatataatataagagcaaacttttcttatcacaagggaacactatccattacccacaatacaaaaatcaaatacccgaaaaacaatatatttccacaggatccgcaactagacattgtcttttgtaaaaactaaaattattaaatccacatatcaatcgaccaaactgataataacataaaaaagactcactgtaatgttgggactattcccgaaggatgcttctcgagatcaactggttggctcccttccacgacttgttccgccattgtttcaggacgatacccttacttcagggagattgacaactctattcataccaacataatcatgatataaaataattagcatcgcatcaatcaaaagtatgagctacgctcttcaaagtcagagctaaataaaactcatccttaactactactgagtcgactagagctgttttgctacctcaacccacaaaaatatccagcattaagtacttccaggaccaggagataggggaaagataaaaaggaaatattttcctaaaattttatagtaagacatttttttatcaataaatttataaattttctaaatgacactgaattgaactttcattttctctacagagaaaaagaaaagagaaaaacttcaagtacctgtgaggagaagagagccaaagaaccgagctgacctgtgaggagaagacttccaagacagaaatctcgattgagagagagaaccagggcagagaacgatgaagaataaagattaaagggtgagactttggggtttttttttttgttcttaattattgttatatatatatttaataggcacagctaatagatatatgtgatgaaatatattatgtgatgtaccgttaaaagttaaatagggtagttaacttatatgatttgatgaatggggttgatttagagttaaaaaatagtaacgtactctcgaatatattattacgtactttaggactaataaataaattcatacacattattggaactacctgccgtacaacagaatacattccgtgttttgtatttgtaggcacaaaatggctgcctataaatatatatatggctaattatgattttttttctctctaaattttgacatgtaataaatcatgcctttaaattttttttgtcgttaaaaattcttcctaaactattgagattgttagattttaagaatttttgtctaattttagtaaaaaaaattctaatatggatgaaaatttagaggatatgatttagtacatattaaatttgagaggtatgatttggtagatttcaaagtatggtaacatgatttagtacataaacaacagtaaaattgaatgaaattagacaaaagtctttaaatctaacaatctgaatagttcaatgagaattttaaacgataaaaaaagtttaggaaaatacaatttaatacatgtcaaattcgacggataaattgtaattagcctatatttatttataaggttagttttgggagaaaagacttcttttcttcgaactcgaccatcatattcttttttttaagggaactcggctatcatattcagaccgcacccacattattttataaagttacccattttcatttaacaaaaaaagaaaaagacatattgctttctcttttaattgggggccaaaattcttacaacaaaaatatctttggcatccttcactttctggctattactctcaatagactccacgtgacaattttttattgacacaaatattttcaaaaccaacaaaaatttgaaattttgacacaaaatactatatttatttttaaaattttacatttatgatatttataccatattttttttttttccctactatttttttaggctaaggagaaagccgcactaagcaaagaaagaactgaaggcatggtgcaggcttcgtcaccgatccaataggtatctttatctatccttagcactttctttgccaagttgtggactacagacctacgaacgtagttaatcttagtgcttagatagagggaaagaagtgtcctaagcagagaaatgagatctccaaaaatgctgaaatgatccaatttagtattcaaagcatcgattatattcttgtagtctgtttctatgaagtgaattggaaaatcttcactaagaaactactttagagaaataattaagacttttgcttcttgaatacgggattctccggtgccaatgtaggggacagctatagtagtgactgtatccctgttactattacgaaggatacccgcgaaacccgacttgttatttcgagagtcgatagctgcatcagtagaaagtttagccaatcccgaatgagggggggtctagacttcaagggcctttgggcaagcaatttgagttccttggagggcatgatgtgcttctcttgcttgggagtaatcattaagcaacgatcttgctttgtccaggagggaatgatggccatcttttttatcgggaagcatacactataaccccgttagcttgcattagaacacatcctagaccctgtctggatgcatcacaatatgacaaacctttcttggtctgatggcaaggctaacactggagctatgattaaccactacttcaattcttgaaaactcgcttcacacttatcggaccatacaaaccgttggttcttcttagtcaactccgccagtggcattaaaattttagagaatcctccaacaaaacgtcgataataccttgccaacccaagaaaccttcgtacttcagtaactattcttggcctcaaccaatttttaactgactgagtctttctcagatcaaccatattttcatctttcctgacaatatgcccaaggaaggacactttcgacaaccgaaattcacactttttaaacattgcatacagcttgtgatccctgagttgttccaataccatttggagatgctgctcatgctcctcttctgtctatgagtatacaaggatgtcattgataaacactataacacagctatcgaggaaatccttgaatactatattcatgagatccataaaggtcattggagcatttgttaacctgaatgacatcaccaagaactcgtaatgaccatacctagtccaaaatgcggtcttcgaaatatcctcctcctaagttctcaattaatgataattggatcgcaagtcaatctttgaaaacacaatcttcccctggagttgatcgaacaaatcattaatcctcgataatggatacttgttcttaattgtcagcttgtttaattctcggtaatcaatgcacattcagagggatccatccttctttttcacaaataaaactggagctccctagggcgatacgatgggtcgggtaaatcctaagtccagcatcccctgaagctgtatttttagctccttaagttctgtcagagccatcctctatggtgcttttgaaacaggttctgtcctatgtgccaaatcagttacaaagtctatctttcgctatggtggcaatcccagtaactcctcatgaaaaatattaagaaattgtgttacaactttgacatcctcagacccaaatgtttcaggtctgctggactcaattacattcgctaaaaatcctacataaccactgtgtaataaatctttacccttcaaaactgaaataattgggattcgagacccctaaacagttccaacataaacaaatggatcttcgccctccgtctgaaaggttaccatcttccacttctagtcaatactggctgaatacttggacagaaagtctattttaagtataatatcaaactttgttaattccagctctactaagtcaacactcaactccctattttcaatcctaactggcatagacctaatccacctttttggtgataacaaattctctactaggcagtagggtcccaaaccctcttataatgaaaccataaggcctaccaaattaattaattactcttgacaccacatatgggtgtgtagccctagagtcaaatagtatagcaaaataagagttgttgacaagaagctaacctgtgactacaaaagggctggctgcagcatcaacttgagtgataccaaacactcgagtaggtttgggctttgcctcttacttctgctcttctttcttgtctgggggcaatctttcttaaaatgctcaaccatgtgcccgaccatgccacactggaagcatgttttccaattgcattcttttgatatggtgctccctcaacgtgggcactcaaggtaagaataactccaacgtccacctctgccctggatcccccagaaccttttattctgtcccgaacctccagatgtcagaatagtctttcttttttgatcagcggtggaatcaccgccatccctaccatatccaggagtaggaagagtggtggttccaccaacacttggagtctcacggggctcctgaagaaattttactactctctcggctcgaagagccttccccaccatcttagcataggtcgttgtgtcactcgtagtaattatcagattgtgcttaatcttggcatttaaacccgtcagatacttctccttcttattgaagtccgtaggtactataccggaagccaacttggctagacagtcaaacttcattgtatattctgttatcgacatgccttctccctaaactaaatcagtgaattttttccgcttagcactgcagattgcctcgttataatacttagcattaaactcttcccaggtcatggtagtgacatctcaggtgagggacattaattcccaccacacaagtgcatcttcctggaactagaaagtggtgcaagtcactcggtcattcccaactactctcatgaaattcaaaattctttctataacagtgagccagtgctcggccttcataacatccgagcctcccaggaaaactagaggtgcttgtttacactctcatacaaaggttccatacggttgccagtaacaggttgttctgctagcaccactagaaccatagcaattggcgcttgctgtggaggcactataggaggaccctactgtctcggcctctgaatctcttcatcttgctggagaattcaagcttgcatttccacaaacctttactcccaattcggaggagcttgaggtgagttttcatgtctaccaccttgaaacctttcacagcctctgccgcgtccacggggattcaggggattttgacctccccgaccgactccagtctcaaccatgttaccctgactcctcatatctcacggggcatcaatttaataggacttagcctgcgaacccataagtcaagtaggtcagacagcgatcatatatattctatgtaccgcattttatggattttaaggtaatgcatttaaacaattataaaatattatgctccctaacatgcttttctaat

SEQ ID NO: 300879 - DNA, 2260 bp, Cannabis indica
cttggagtccctcattgtgggcagggttaacaattttgtctttcattatcttgtccagaaagtctcatctaaactaaatatcttgaatgaaaaattcttctctcgggcaggcaaggaaaatcttataaaatctgtcattcaggccatcccttcttttgctatgtcctgttttaagctccccaattccacctgtcgcaccattcaaagtttgacctctaaattctggtggggttctaactctaacaagaggaaaattcattggcggaaatggtctgctctttcggtctctaaaatctttaggggtctgggttttagatctctcacccatcataacaaggctcttttggccaagcaagcttggacggtctagtctaatcccgactctttcttacactctttgctgaaaagctcgttattttaagcattctgattttctccatgcagctaatggctacaactcctctttcacttggaaaagtctcctttggcatcgtcagcttttaaagaaaggacttgtctggaaaattagttctgggcgtgatatccatatttctgctactaactggattcccaggtgtctcaccctaccattctccaccaaattgatccctccctctccactgtctcttttttaattaatcttgatcacacctggaacgttgataaaatgaagcattttcttcctctatatcaggcgaactcagttctcgaaattcccttggaccctgaacctattgactctcttatttggggctttcatcattctggcatccttactgttaactctgcttaccatcttgcctcagctacagccaattccacttctccctctccttcggaccctaacccttttaaggattggtggaaaactctctggaccttaccactccctcctaagataaaacattttacctggaaagatttcaaccatctcttaccttgtgctttaaacctgttccacgagcaaattctcccacaaccttattgctcatcttgtgggggtagtgcggagtttgtctctcatgcacttgttgactgtactagagccagccagatatggaaacactccaaattcaaacaatttcatgaaaattatcgaaggctggatattagagaattttagctccatagccttacttcaatttccaaggaagatctccctttgctgttgggtttactttggcaaatttggaacataagaaattttgctctctttcaaaagtcgtgtgttactaacaatgtccaagagtttcttttaagctatttgcaggattataaggatgctcaaatcttgtcctctactttgtctttgccgcagccttcctctccacatgcactgcatcatatcctccaggaagatactcccgcattatttgttgatgctgctctaaaccatgaagatgatgctactggtttaggtcttgttttcaggaaaggtccgcaccaaattctcaactctgctacgttttgcaaggcaggagcttccactccaatttttggtgaagctcaatctctctatgaaggaattcaatggtgtatttcttcccagttgatcccacgattcatctttacagattgtcttaatcttgtcactaaagtgaacggaacttggcatgatcactcgaccttatcaagtcttattgtgaagatcaggctctccctctccaatttcgctgaggcttctttgttgcacttatcacgccaatttaataaaaatgctcattctcttgctaaggcagccctcaggtcgcgagatgaagagttggaggaatcgttttagtttcctcttttggctgttgttgttctcttgtcttgtttctttgttgcagcctcttgttcctcaaaaaaaaaaaaatgaatatatctattattatagtcaattaaaaaatatataaattttaaaaattataactaatcgggtaaaggcagttttattaatcactcaatatgaaaaatactaattttaagacagaagataatcatcaaataaaatcttgtattatatagcctatagtaatagacacgcaacactttctaaataatgagagatttttttttgaaacaaaatgttaaaatctcaccaaatttacaaaattgaaagagaaactatagcatgccacataaatttatttgtgctttctaatatatatatatatacatattaatttttgcttgtagaaaaaaaaagaagataatagatattagagtaatttgcggcataaatacataagtttaattctgagttgtaaataaatattta

SEQ ID NO: 300880 - DNA, 1058 bp, Cannabis indica
tcttattccattatattaccattactattaccataataccattatcattacattacatcaaaccaaacaccacctccattagaatatgaatcactaattatattgagtaataaagcaaaaaaaattatccaccaagctatattttaataaaacaattcaaatattaatgtgaccttcaacaaaaagctaacaatatgcacaatattgactcaaatttgtatgttttatatgtctagagtttttaattatgggtaataattaacattaaaaaaaaaatacatgtaatatattaaaggactgagcacaactcatcttttggcattgtagttaaggatgatgaggacatctgaccttgccatcaataatagattatgagaatatgcgaactcataagaattagaaatatgacccttaaaaaatcgtgttcttataaatgcaatatttattaaatttcaataattgaaaatacgactgttacgatctgtagtaaaagaatagaaatttattgttgcaaaacatagatttaaaataataaaacagaaataacagtgcagaaaataaaaacttaacacaagagaattatacgtagtatcggtgttctttcaaacattcctaattcacaggatcacgcccaaagaatgaaatcaattagtaaagtctcaaataattacaaatataattgacttaaacaagtttagacttcataaagagaatttattttcttgtatgataagtttccaaaacaaaaaataacagttgtaaataaaaatttcctaaaaaaaaaaaagtcatgctataaccacaaaattaacacaaaaaataggataaatacttatttgtaaccttgtgttttgttaaaatgcacacttggtaccttatgttttgaataatgattaactaatactcttagtttgtaaaaactatccactttagtaagggtccgtttggtatgcaggattgtattggattagattggattagattggatagggttatgctgaatccagtaatgtgtttggttatgagttggattaattttttttttttgtattaaaaaa

SEQ ID NO: 300881 - DNA, 1816 bp, Cannabis indica
ttatttacttttttaagtgcaaaaaaagggtgtcaagactaaacatgtcatcttaattatagtagacagtaaacatcatactaaagattcaatttgctgtcccacaaagaaacttcatgcccttttttttttctctttacatatatatatatatatatatatcaactctctcttcacccaaatcagatacagaacaacaaaatcattctcaatctcatccacaattaatatattccaagatgtttaagcaagatttaatctctaatcccaaaccgattgtgattcgggaagtttgggccgaaaatttggaatccgaattcgatttgatcggacaactcatcgatcaatatccttacatctcaatggatacggagtttcccggtgtagtttttaggccagctatggattctaaccgaccttatcaacctcgtaaagtacgaccgtccgatcactacaaactactcaaatccaacgtcgacgagcttaatctcatccaagtcggtttaactctgaccgattctcacggaaacctaccggatctcggtcaagacagccgtttcatatgggagtttaatttcaacgattttgatatggcgcgtgataaatacgctcccgattcgatcgagttgttgcgtcgtcaagggatcgatttcgacaggaacttgagcgatgggattgaatcggctcggttcgccgagcttatgatgtcttctggtttggtctgtaacgacgccgttagctgggtgacttttcacagcgcttacgattttggttatcttgttaagattttgacgagtcggaatcttcctggagcgttggatgagtttcttagggttgtgagagtgttttttgggaacagagtttacgacgtgaaacacatgattaggttctgtaatagtttgtacggaggattggatcgggttgccaaaaccctagaggtgaaaagggcggtcggaaaatgtcaccaggccggttcagatagtctgctgacgtggcacgctttccaaaagatgagagacgtgtattttgtgagtgctgcggctgcggagagccacgctggcgtgttgtttggattggaagtgtattgattttgtaattaattgaaatattcaaattataatagaaattaattcattatttgatgattaaatattattttttatttttgtggtttgataattttttttaatataattaattaatttgaacataattaaccatttttgtgataattaacaaaaaattaattcaaaattttagttttattattttaaaaaatacaaaatttattttatgaagatgattctgtaatttttacaatagtatttctacttattttatttattggaatcaattattgagtatagattagattaaattggtaaagtaagagaattaaagtttggattcttttgttataattgggcaagccttcgttgaccgaaacatctataggaaaatgagtgtcacgtgaatgaacaagggaagttactcttttcccaaatgaaagtaggggatttttttttatttttttttttttatttttgcatatgaaaagaaaaaaacacttaaaaggtaactagtcatggtacggtaactataaagtgacatttagttggaagtaataaaatggaatgaaaatgatgcaatttttatttcatacctttgtttgttgtatttcgtggcacgtttacaatacaatattcagaatcgaaataaattaatgaaaaaatataacagaataaataaagaataattagaatattcaatatttgtaatatgttgtttactaattttttttttaaaaatggtaata

SEQ ID NO: 300882 - DNA, 1182 bp, Cannabis indica
tttagtcacaacatagatttttttgtgactaaatgtgacttttagtcacaacaaaaaattatttgtgactaaaacatagcatttagacacaagttgtcactaatttagttttagtcacaacaagtattgtgattaaaaatatatttagtcacaacaaattgtaatttttgtgactaatacctttagtcacggaccttttagtcacaacataggaataataatttaatattagtcacaatttttttacttttagttacaaattttgttgtaactaaaactaagattttttgtagtgcctgcctcgaatttacccaactcaaaactcaacccagcatcacaattgatcacaacctttacaactattggctgaagagaaccactttaaaattccatacttcaatcgaacaaaaatgtcatcatccacacaaattttttggctgaagagaatcgtattaaaaaaattcatactttaatcaaataaaaaggtcattatctacacaaactttttaatttacccatttaaatacaaataataatttttcaaacatggtaacaataataaaagaactcatagatatcccaattatatatataatattagtctaaattaagttcaaattaatacaatgtgtttgaaagggaagttatggttgaaccctaactatatatagccagcccctctttttataatatatgatcattattttctacaactgtactactttttcttttattttctataattctactatatatgattcttaatttgtcaagttttttataagattttttttcatacaaaaatatataagtaccctttttgctttcatttatattcatgtaatcattcattcaatatgtgaagatctttgttccatagagttatatttcgagatattgtttcatataatattctatatattatttgagtggtttatataattatttagttattgtgtgttgattttcatagatttaaaaataatgggattttcatatatagactaattttgtaatattttcaatctatcaaactttgatcaacttctcctattaatatctaaaataaagaattgtgtaattataatttgtatttacactacacaaaattttatttttagttacaacgaaatttgtgattaaaagtaaaaaaaaaattgtgactaattataaattattctt

SEQ ID NO: 300883 - DNA, 1061 bp, Cannabis indica
aaaaaaaaatataaaaaaaacaccataaggtacttggttatcccttatagtaattggttatccttttggttatcatataaaattactttgtaacccttacatatataattttatcatatttttcaactttttcttcatgtaaatttaaagtaaaatgtgagtattaatgttgtttttgatattgattatatattattctatttatgcagcctattttggaagcaaaagtgacaacagtttggttaaataagaagtttcgtccagaccgtataccattggagatagcatctttacttgataaatccaacagaagaaatgagaagaagatgaatgtaacttcatgagatccttacaatataaaatatattgtaagtggcaacgaaatctttttatgttttaatttttatatgcttaagcttttgatttatttttttgtggaaatacctcgctcttttgtttgcaaatttaaggcgccatttaacttctaccgataaacgtcaacacggatgccattatgtacacatgtaatatatatacacgtgacattgaaatctctgatgaaaatatattacgtacatagtgataattcagttcgtatttaatggtaactgggcctccaatttcaaatagaagtaaaattaatggggtattatattgccacataaaaaaaattagagagttgagtataattaaaattaaaacataagggatgtttgtcgccaattacctttatataaatactagattatagttacgtgcgaggtacgcatactaaattttatactaagtattttctattttatttaaaagttatataattaaaaattaaagaaaaaatattattagtttttaggtgagattattattatgtatatttaaataatataatttataattttgaaaattaaaagtaaatactggatgcaatatattagtatttaagaaagcttaataatttaaatatgttcttaagataatccaaaaataaactaaaaattaatgttcaaatacttaaggaaacacaacttaaatgtgtgcaagataaaaaaaaaattaaaaat

SEQ ID NO: 300884 - DNA, 983 bp, Cannabis indica
aaaaaaaaatcttatttttgttatgtaggttgacacttgacactcctttctctctcaaaaacacaaaatggtcatgtaaatttttattaattttttattttacgagtaaataaataaattagatatacaataatgtaattttgacatggagcattaaaagaattattaaagttttatttgttacaacttgcaagagctaagtcattgatttttttaaggttgtaataaaagaattagtattaattattaagattaattacgacataaatataaattttttgagtttataacacataaacataattgtattataaaactattatgtagggaaactatgcgttttggggatctactagtgatcttcatgtatgtgaaatgtaataatctcaaatctaaatatacataattttttattggggccatccattcaactaaaaagagaaatttgctaattttttcataaaactaattaaatgagaaggaaattacacagcttcgtaaccctaaacaataaccctaacagcgccgtaacagaggatgtagcttcaccagcgccgccgtatcaaagccgccttattagtgttgccggagtaggtcgatcatttttctcaggtcttgttgcaggtacagtcgcacagtgtttctcccagtaagcagtcgcactttgtccctccagcagccgcacgaaccatcgtgctcctccaatagctgcacgtccgacttggtccctagtagtcgccggtgtctctggtcgtctgaacgtcccagcagtcggcgttgtcaagtgatctacatgtcgtcaacaaccagtgggggttggtagaattttttcaacagtcggaaagttgtatcgcaggttaggtcttgtcgtatgacatggtttctttgtttctctagttctatgttgttttgttaatgttcaggtgttaaggttgtgtggtgacagttcggatgtttcttggttgtcgggtgtcttcattgct

SEQ ID NO: 300885 - DNA, 2324 bp, Cannabis indica
tatttttgtaagtttctcaaaatttatctaccatttaaatcagctaaaaaaaatttactatcattaataattctgcattaataattttgccttagctttttaaaaattacacaatgagaatgctattaataacaataatcaacacaatgctcataaattttcaagaccacactttatttaaagcattaaattaaacaataaacatacatttattattagtagagatacatgaagttgatgataataacacctatttgggattgcctaatactattgggtgtaagaaatcagaaattttaggctatcttaaagataaagtgagacagtgtgttcaaagtttggatagaaaactcttatcgaaggcagagatgttattaaagattgtagcacaagctcttccaaacaatgagtgtttctattgactcttgacatttgcaaagatacaaaaataatgatgtgtaaattttggtgaaaatcttcttcaaagaaggaaaaaagtattcattggatgagttcggaaagggtgtgtaagcccaaatcgaaaagtggtataggttttcgtcatatgcatgattttaatgtggcttaggcaaacaagatggcaccttttaacacaacctagttctttagtaagtagaatttacaaagcaaggtatatttttccaatggctcatttcttacagatgaaggaggtagcccaagttttatatggagaagcatcttggaggttcaagggttagtcaaaaaaggtgttactgttcaggttggtaaggttgactttgtcaatgtggtttcctaattgtgatgactcctttgtttatactatgagtgattctttaatgggaataatggtgtcaagtttaatgattctagggcattatcaatgggatgttaagctgattagtgatatttttattgaaagagatgtgaacctaatcattagtattcccctagtggaggattctcctgattcttggtaatgaaaataagaaaaaacaggttaatattcagtgaagagtgtgtattgtttactgcaaaacgaaaaggaaggtaagcataccaatgataatttgggtttttagaggaagctttggaattttaaagtctcccctaaagtcaataatctattgtggcgtgcttcaataggatgtctccttactaaagcgaaactaagaaccaagcatgtgacttgaggctagctcaagtggtcacagatgggtgtgtgtgttggagagatcctgggttcgagtccccggtaaaacatggttgtaatatataaacgcttaaaattaaaaaaaaaaaaaaagaaccaagcatgttgaggtgatttctttctaccctttttgtaatattgaaagagaaactatttctcatgtgttggtgtcttgttcttacttgaaagcatgttaggccaaaatttgttttgctgtcacaatagaagttctagggacttttacggactgattaactactatctttgagagtcatggtggggggaaatgaacatggctggaatggttagttgggcactttgaaaatgcagaaaagaatttgtttggaatcaaaaaacaaagatgttactgaggtagtagtgttagtaaagattgtccttaattaataaatagcaatatgctcaagacaaatcacaagatacatccttaggtttgttgaacccagaggatggagctgagcagtagaaaactctaagctttgatacgattaagatgaatactgatgtcgctttgtacattccaactgtttcagttatgcttttgtcacccaaaatcatgctggtttttagaggaagctagagtttcttgtattagaggaagtgtccttctaaaaattgcaaaagccattagaatacgtgaagcactaagttggattaagcaccaactatgacgcaaagtggagatcaaaacagattgtcttatagtcattcaagccatctaaaacttagctattatgttatcctactaataattatgagaatatatatatgagatctggggtcttaagagccattataacaagtgtgtttcattatgtatcaaaaacattaagttttgaaagtaaatataaataaagtatccttaaaagtgttgacttatataagtgtgttgtaaaaatgtggtcaaataaagtatttaagtcttaaatcgatctaattcaataagattttgaccgatctaattacaactgatcatcaaacattggatatccaattgaatcagattggatggtgggtgtgttgtctaaaaatccaatacatccaacatatccaatcaaactaattagtattttcatttagtttggatgagtaa

SEQ ID NO: 300886 - DNA, 1321 bp, Cannabis indica
taattaccctacctagtaattatacagttacttccaaacacaccctaaatttttggttgaattttatcccattcatatacatatatttttcatttgtttgtgtattgaggtgtagtctttcagagttaggttagtttatgtttgaccttatctcttatctctaagcactaatggaatttttatcaaaccttgtgttttaacaagtgcttgttgatagaatgcacaaccaccatcagcttggagcatttaattttcctgtcaaactaattttcagccatagttttgaattgaataaacgcattgagtgcatgtgctttggatttcaagacgtaaatccatgtataatgactaaaatcatcgacaaaataaacatagtattttaggtttgtatttgacatggggctgcaccccatatgtcagtgtgaattgaatcaagcacatgtttggctctattgggaggaaatttaaaagggagtaagtgggatttaccatgttgacatgcctcacaaaaagtttgttgtttattaattgaaatgtttacattgcctatattaaggtacttgatttaaaattttagtggaaggatgaccaagcctcctatgccattgatctcttaaagacacaacaaactcatgtgcaacagacttagacacaacagagaacaaaacatgtgcagaaccaggagaattagaggattaatttctagtttttgagaaagatagtaaagatgttggtgatgaagagctggttgttgatccctcaagttggtacaagccatctttaagtttctcccgcagcatcatcttctttgtttccagatcattaacaacaaaaaatttattgtcagcagttagcttagagacactgataagattcttagcaatttttagtacatgaagcagctcttttaaaaataaattagtgccagtaaactgatttgtgccaacacttgaaatttctaattgctcaccatttccaactgtaagtttgtccttacctttataactggtagcaccactgagattgttcccttcaggtgtaatgtgattgcttgccccactatctgcataccagatttcattattcacagtgtctggtgttgctatgtaagcacttggatcttttttgtcatgcccattataactatctagtatgtgtcccatgaagttttcatcatacctattataacaataggctgctgaatgaccatacctgccacacatttggcaagtcgttttagagtttttgcctcttcctcttcctcgagagctagagcctcctctgttattattgttgttgttggtgttggaaatttatttta

SEQ ID NO: 300887 - DNA, 1812 bp, Cannabis indica
tttgcaaattctgaatataatgtggatggtgctaatgcggcatctgagcaccagttcttgtcaacttctctcgttgttcagtcccttgattcagtgccaatggaggggatggatatcgatgaatttaaaactgatgaagcgaatgcagagagtaaactatactcccaagatactcaacaaacaacttcacaaaaacatgcagcgacatctcacagtacaagtaatagcacaactcgaaagtatcaggttggaccaaagtctatggcaaagaaaaagtcaaagcggtatgctaatgggaagttgaaaaaagcagcacagaaggaagtagatatgaagttggttgctttacttttgccaacaaaggaagcacaagaagaagtattgaaattcgaggtattcgtaaattttcactactttcttattattaattcaatctaaggctaagttatgctggaagtttattttttatgtcagagtacttgagtttcttatttggttgacaggaagtgaaaaattgtgctacctcccatcttaaaactttatacgatgagatacgacctgccatcgaagaacatgaaagggaccaccaagaaagtgtagctaccactgtagctgagaagtggatagaagcttcctgcatgaaatcgagggcagactttgaccttcatttttcagtggtaaaacatttcgtgaccacgcctcaaaaagccaatggcgaagcaaaaccaaccgaggctgatgatcagggcgaaacaaagtacttgacaaattgatgaacaggtactcatattgctctgtaatataacacttcgatagcaatttttttatgacacacattaacatagtgatctttaactgcttgtcgggaattctttctctcggatagtcaactatgcaattcaccatgcacatcaacaataaatggagttcgacgagaaaatctacttgtgacaagagtccaagtatgttcgggcatgactgaagcgaaagctcttctcattcatgtatcttctagtttggaattcttaccaaaacaatttggatcatgagtgacaaccctaatttgggatgtatgcttaatttgatgagcatctaatttttcatgtccaactcctaggaaataaaataccatttgttaaaacaaagggcatatatgtatgtgcttctatgccttggaaaaattatgtagtatttttcatttcttctttgccttcttaactttttctttattagaaagcatttcatggaatggaacaaacatgatctagaataggttagtggtgtatggaaaggtcaaagaagagatagaccaaggttgataatattggagaaattcttttagattgatgtaacaaatatttgtttaaagatatacaaaattcatattgaaataaaaacaaaaaaaatacaaaaatactcaataaacatgatatatggaattaaaaataaggtaaactaatgtgtgtatattcatatatattctcctgacctagtgtatatttttgtataaaaaaatgtaagagatattctgtgtttttgtagatatatttatcttatatggatagtaatgtctgcatttgatttttctttcgacataaataattgaacatttttggtttaaataatttttttctaacataatttttttttattaggaagtcttaaattgataaaatgtaaaaatttaatatcataaataatttgcatgaattactcaatttaattgtttaattaatattgtaaattgaacatcatacatcttaccacaaactgttgggttttatactactaataaaactttatttctaatat

SEQ ID NO: 300888 - DNA, 2399 bp, Cannabis indica
ataattgtaatataattattttagttgtacgtatataaaaaaagccctaaataataataataatagtatttcttttgacgtgaatagtaaacactaatctatatcacccgtactacatattaaaaataatgaaaatagtaaaagtaaaaaacacaaaaataataagaatggtcgaataaaggtgtgatcgaagatgattaactaactcctcctagtaatgttttacattacctttgggattatctgaaaaccgtcctatcctaaaatactcgagatcaagtcctttggtttctccggtcaacgcaagatcggccaataaggtacccaccgccggtgccatcttgaatccgtgaccggaaaacccaccacccaccaccacatcttttccaaactctccacccaacaagtccaacacaaagtcctcatctggggtcattgagtacatgcacaattgggtcataaccggttcgcttgaatctaccctacccgaaaaccgctcctcaatccactccttcattgctccaagtgaaaacccgggtctccacggccttttatccgggtcacaagggtacccgccgtggatcccaaccttgatcagacccgggtactcaaacgaaggcgttccgtatatgcacggatcaccgtagcttgcaaaagacgggaagccattgtcaatggcgtaatcggacacgtgttcctctttgattcgccagtaactaacggtggtctccaagggctgaatcggtaattcaactccgctaacccttttaactaacttcctggtccaagccccaactgtcaccacacatttctttccccgaaaactctccccacttgcggtggagaccaaaacgccgtcgttttctccgcctgtcttcttgatttctataactttcgaattgtctttcaatacggcgccgtttttcgaagcaagagtttggaacatggaaacggccttagatggcttaattaccccgcctttgtccaagtaaaggccgacccaattttcgggtatttgaatccgacccgaaaattgttgagcaacttgttggctgtttaagacccggtgagggagtgattttctgcggcagctggcgatgatggcgttgaggctctcggaatcggatgggcccatatcaaactggtgggccttgtaatagaccttgtagccgatttcagattgggcctgttcccagagcgcgtaggagtcaagaacgagatcagtgtagtagtcgtctgggtaagtagcgcgtatggtgcgtgactcaccgtgagaggagccaaggtggtggaggaaatcgtattgttctaagaggagagttttttggcctcgctttgaagtttggtaagcggtagagcttcccatgactccgccgccgatgactataatgtcgaattgttcggcggaatattccatgattgagtggattaagagtgagccgtacaggtagtaataatggtttatgataaggtatgggtggatttattttttaaaaagggagtttcacacactaaaaaagtacaaaaataataaaataaaataaaaacagtcatataataatattagtgggtggcattgaaagaagttaagttactattatttatgtgtgcatatactcttttggtttagagtgaaattacatgtaatatgtaagcacaacaatacaagcgatttttgcagggtctaatcgtaaaatgagtagtggaattaatacttcttccattttctaagattagtggagagaacaaacaacttaacaaccattgctacctttgtttattttttcttgatataaatcttggtctccattttctctgtacttaatataattttttagaatgttttataatggctgctgtgaggtagttaatatggttgctataaaaatatgtatttatgtcgtctctcagaccaatttagtccatttctcaagaaaataaattcattttttttgtttttaaaaaagaattttttttttattgctgaatgaggaaaaaagaaaatctattaatgtttccatcactataccattctagtttttgtttttattgaaacaaaatactactcgaggtttttcatacttggattgtgttgtgttggattacttattggaatataataagttgtttttccatatgaatacaattatttttggaaaattctacaatacactattttaaaatagatatattgatgcacctttatctgttttagcacccgaaataattttttagtcaaattttttctcatggtcatatacgttatagttatttaagacatcctgcaaaattttaagaaatttggaaaagtttaacacgccgaaaactacgttcaaacagtgtattgcactcgtaactattttattttatacgcgtgtaaaataaattgtttgaacatt

SEQ ID NO: 300889 - DNA, 2799 bp, Cannabis indica
ccatgaatctcgtaagttggaatgcccggggctgggaacccgagtgcattcaggcatttatgcttgcttgtaaaagagcaagctcactgtgtcctttttattatggaaactaaattaaagtatggtagtatagatagttttcgcaataaattacactttcctcatggcctaaaagttccaagacaagcgcaaggtggtggtcttatgctctaatggaactcctatgtcaacctatcaataaataattattcaccaaatcacattgattgttttatggaatgtcaagatgggccatctctgcattttactaggttttatggacatccatgtatttctcagagaccttatacatggacattgttatgtagatgcttcgatgtggcacctctatctccttggctggtaataggggatttcaatgaagccatttcacatgaagataaaattggaggcccatggagaagttctacacaacttgataccttccatgctgctatggatagttgcaatctttgccaaattccatttgaaggagaaagaacaacttggaccaacaagagtcaaggaaatggtaatgtgaaagaacgtctagactatggttttacaaataatcactagtaatcaacttttcttgctccttcttagaaacatctggacttttttaagtccgatcgtggagctatcaaagcaaccattacttctcttattgatcaggttgaaatactagagtacagatcaaggttttgttttgagaaaatttggctgcaagaagaagcttgtgctgatataattcctgctaattagagccataacaccagtaaccctttctctcaagtgattacaaacatttctcattgtgcaaccgacctacagaattggcattatgcaacttttggcaatctgaaaaaagagattaaagattctcatgaccatggctgccctctagaattctaccagcaccaatccacagcattttccagcactacaaaattcagaatcgattttggatgagttgttagcaaaggaggaagattattggcatcaaaggtcaagaatttcttggatgcaatcgggtgattctaatacaaaattcttccatcagcgtgcaaatgccaaatcagctaataatcgcattaaaaagctcaaagattcaaatggtaatacttaaaacagtacactagctctgcttgatattatttccaactactttcagaccattttcagcagccaaggtgtggatgaccaagccattaatactatcttggcatctattccaacaacaattgatgcgaattcaaggcatatcatttcagctccatacacggctacagaagtttgaaatgcggttaattctatgagtaatgataagagccctggatatgatggaatgtctgttatgttcttcacctattactggcacattgttggctctcttgtcactgattcaattcttgatgtcctcaacaatggcgcggatcctacaatactcaataagaccatcatcactctcatccccaaagttaaaaaaactcagctcatcactcaattccgtcccattagcttgtgcattgtactctataaactggtctccaaataaattgtgcttcgaatccaacccttcttaccaatggtcattctgaatatcaaagtgcttttttgtctcaaaggttgataacttacaatgttcttgtggcatttgagctgttacattctctcaagaatcggaaacaaggctcacaaggttatgctgcaattaagttggatacgagtaaggcctttgatcgtgttgaatggcactataagttggaacaactgttattcagcttatactttgctgcttacagtcagtttcttattcttttcttttaaatggaaaagtgcatggtgatttgatccctacgcaaggcatacgtcaaggcaatccactctcaccatatcttttcctcatttgtgttgaagggttttcaaggctgctgcaaaccgaagaaagcaacgattttttatagggtttaaaagtatctagatctgctccatcagtgtcacatctgctttttgctgatgatagtgtgctcttctgtcgggcaaggcatcaatcagcaaggtccattaaacatgttctagacatttacagcaaagcatttggtcaagctattaaccttgataagtgtgtgctctcgtttttaccaaatacacgacatcgtaatcaggtttattttcaacatcttctcaatatgccaatacaaccttgtcatgagcaatatcttggattaccatccttcactggacgagatacaacgaaacttttcagtggaatcacagataaaatttggaaacttcttagtagttggaaggagctattattttctactggtggaaaggaagtcatgttgaaagctgtggtacaagctattcctacatatgtaatgagttgcttcagattgcctattacattgtgtaatcaaattgaaagtatgatggctaacttctggagaggctcgacatcatttggcaatgcaattggaaaaattggaattccctttgtaaagccaaaattcatggtggcttagggtttcataatttcatacactttaaccaagcactcctcgccaaacaagcttggcaattgtttgaatatcctaactcctttctcaaccgtattttgcatcataggtactttctaaatggacagtttcttgtagcagatttgggagcttgtccgtcattgacatggagaagtataatttgggggaaggaacttgtaaagcccgcttagttaatttggaaattagcagttgttta

SEQ ID NO: 300890 - DNA, 1196 bp, Cannabis indica
attcccattcctattcttgtattttcattctttaaaccaaatgtaccctaaaagtgaacatgtcaacttcgaaattacactataattctgttattgtggcattaacaggtgaagattttattctagagacagaaagaggccacagatttattcatttgattctaatttagttcgaaaacaaacaaaacttgcaatgaaacagatctgttttacctttgtctaactttgatcattccagtgccaagctgcattggtatacccatgattatgcattcacttacgccttcgatcatgtcttctcttccgtttactgaagcattgaacaagtgatctgatgttttctcaaacgaagcaagcatgagtacactctttcccattttttgaatcccgaacctagtgattccaaggacttcaccctgttttgacaagacattaataagcaaaatatcatgcattggtttactagttatattttctttaaaaagctagatagaatagcttgaaaaaacttgccctggaagtcatcacatctgctaaaagcatcatatgccgagtatctatgctcattccgtgacttttcattgtatactctatctcgtcgatgatacaggttcttgccgcttctattccaagtgtctgctgcacttcaatgatgtgattacttttggtgttaatcccatctactccttcggtgcccataacttgtaaaagacccgttctaaacaatgcaaaacagaaattagttcgctactagggtaaacttttggttgacaaacatattttcgatattggaattgagtactttagtcaacaacaatgagttgcctatttcactgagaaacaaaattttcattttagccaacgatccgactgattggtattaatgtatcgatctagacaggaaataatttgcttacgtatcacacactaggaagtgtgtaaacataaatacagcagttagaagaggtaatgcaaaagtgtataaactacaatgtgacttctctgccttaacaacaaaaaaaaaggattgatcaaataattgaacaaccgggatcagttcattttttaaataaacgatttgaatgattctaacaattgatggcagagttcattattgggacctttcaattcatacatagatgtggatctcggacctataattggggatattcccaaagctcaaagggaaaaaagga

SEQ ID NO: 300891 - DNA, 1537 bp, Cannabis indica
aaaaaatatagtaaaaaaaaaaggaaaaaaacctatactgtagtggttgtagaaggagctgtagaagtaggagcgccactactatcaccacctccagtactgaccccactagggccactcccactaccactactggccccagccgcagaagaggcggctccgcttccactaccgccagccaagtccgccgacacattcccgggcggcggcagtgctgccgtgggtctcttcctcttctttttctcgtacggaatccctcttgctttggcctgcccttctcttacttccctcaggtaaatcctaaccgctcttgctccgaaaggattcgactcgggccgcccaccgttttcttcgtaggcagctctgagtcgtcctatcagagcgtcaagactgccccaggcttgcttcagtgggcaagcgcaaggggcaggtgggttcgggtgcccgaagtaaggacacccgatcacgtggactttagtcttcccgaactggtctagatacttcaagaattcgatcacgtgcgcgccactacaccgggctagcgtcaatggcggcttgtggttcctaaggtactgcaagaacgtgttccagtcccgccgtttctgtgactcgtaacggctcggcggtactgttgtcccaccggttgctgcggctgcggccaatgggctttggtccgtacttgggcctggtagtggcccagttggtgatgggccatctgctcctccgctattattcggatcggatgatccagtaataacagttgtagaagaagtagtagttatagtaccggcgccaccacctgaagctgaatccattatttgtggacaaaaaggccaaaatcttgataagatgtagtactaatagtaccgatgatgataaaactgtatatatatgtatatgatgtgacctacttttgacgatcaataactgaaaataataagtcctcttatttttattattttctccttgtgtcttgtgcactacttggctgtgcaaatagagagagagagagagagtgagagagccaataattaaccctttggaaaattatggtggctgcaatttaattagaagctatatatatatatagatagcagaatcttaattggcctctgataataatcacggctgggttttattatccggagactggatcctatgtatacgtactctagtctggactgagatatcgatcgatctctgatcttcacgggaaagtctttccttgattttgttttttattctattttcttcttgtgagttagaggaaagggttttaggggtgggaagaaagaagaaattaatgagaaagaagagagaaatttagaaagagagagaaagagaaagagagagagaaaagaccgctcaatgatgggacgtaaaaagtatagatgaatgaacacgaatgagactctctccctctcacatctcactcaagagaaagcaaactctagagagagagagtgtgtgtgtctcagtgaaaaaaatatgaaataaataaatagaaaaaaaatcaaataataaataaatagaaaaa

SEQ ID NO: 300892 - DNA, 2819 bp, Cannabis indica
ttttaaaaacaaaaattaaaaaagtgttaccaaacgctatctaatataattacaatttacattttccgaaacattaattatactgtgaaatttctgactcaaagaaaaatcaataaagaccaaaattaatagcaatatactaacagagagattaaaagcaaaggacacatgtctactttttattagtgcgacaataatgaaacagcaaaaataagacagtagattaatattcgtagagaaggagaagaaacaaattttaatttatttaaaaaagtataactcttagtgggtccatgtaaaaatatataatatatagtaattaattaattttttaaacaggatctaacatatatgacccctattataaaaaaaattaacagaaatatatactaaaagatataaagttcaatataatttagatattactaatcaatggcaaaaacatacctctaataacaatgtttgcaattgaactaactagaccaaaagacaatatagtagtatattactacagtgacggaatttttgttacaatagagaatataatttttttgtttcagcattgatacaagtgtaaattggctggagtattatacaccttactattactgctctagagcaattcgacagaagtgtaatatcacaattcacacacaatatgttacatgcattttcaaacattcatatatacaccatctccatttcctacaaaaataataatacgaatatttcatatttgctaagcatggagatcctccctttgaaaaaaaaaagcatatggagatccaaaaatgtcccactgaatattattatattaattaactgaaggtataatattagatctatgatcgaatagcataaatcttttaattctatttgctgcgatcttcgtgaatagtttagaatagaaaaatgttaaacgacactagtggcgcctaaatcttcttatgtgtcaatattactattagtctaactaagtataaggtgacatatagtttaatataataatttttaggaagtatcactaactaatcgtaatgcaacatatcgagaaagtgctaactacttacggaataacattacaaaatttttaatcttttgatggacgtgagcattaatcttttttattattacagcccattttccaaaaaaaaaaaaaatattgtattgaataaaatatactgacttttcctgtgtgaaaaccttggctggtaaatataaaagtacatacacaaccttttaaaagattaggttgagaattgttggagaaaaagaagaggttctctggttgatttagaaaaaataattatacatatatttgtgtattgtgtaattaaagtgaataattatttagagtgactaatatatatattcgtgtaaaaattaatatcatatgtcccaaattgaatcatgtagtatttcgtcaaaatcagaaaaatcaacgtcttcgtttaaacgcacatgatgagacgaggagtagaagtagtactgatcactccccgtcaacggcgccggcgccgccatttgcatccacgtcatctttggggaatccaacggcgactcattaatcgcctgaatctgactcggcgaaagccccaccgtcaccggcactgagtaggactcaccactcttaatatcagcattaccagacgacctaacgtttaattcgttcgctcgatccatcatcggctcctcctcggcgtgctcctgctccctcctgaaccgcattgcggcttgctgggccgccaactggacatcctcgggcctagatgtggcgggccttgggagggcttcggccagctcggggaagttaagccgagccgcacgtcctcggaggtggagcgctgccacgtcgtatgcggctgcagccatctcgggagtttcgtagcttcccagccatatccgggatttcttgccgggctctctaatctcggatacccatttcccccactttcgcttccggactcctctgtacgacggtgccacgtgtccgtactcggattctagtactacttgttgttccatttttaacaatcgcgttctcagtttttgttatgaagagaccactttaaaaaatttctcaactctcaaccatatatatatatgtatgtataaacacacgagatgtgatcgattaaaatttaataaattgaaagataaatattattataattcagatgatgaggactggatgagtgagcttcgcagcagttacacgtatattgaaagttgaaagctgtcaatgaatgaacacgtgcatataactatgcattatattatataatgcagtcacatcataatctttgtaactatgtatattttaaatttttcttcatatgacgcaattgttttttttttaaaaaaactttttctcttgtgcagtagccatcaatttttaagtttcataaaatttaaagagtaatttgcataaatatttaagttttatgccgagtagcagataaatacttaagtcgtatttttggcggtaaaaatactttttgtcacacttctggaacttccgtaggtacctggtcgttaagtgccagatcagtatctacgtggcaacatcatattagtccagatcatttattaattatattttatttaaaaaattatttgaatatttcaaaattaaataaaaaaaaaaaataacaaaattattaaacagaaaaaattaaactcaaaataataaaataattcttttacaaattattaaaaaagttaagtctttccaaatccatatcagagaagaatcatatcatggcttcttcattcaaaaaaaaaaaaaaaataatcatggcttctctcaataacagatc

SEQ ID NO: 300893 - DNA, 4073 bp, Cannabis indica
aaaaatgcatagagatgcagacaggaccttcctgtgcacacgaatttaaccttaggcaatccacaaaaatcattgagaaggaatctaggcaaattttccctttcaggaaatttggctaaaaacgtatctcacaccgatgtttacactaacttttaaatccagaaaggaattcaagcatgtctttcctttgggaatttttgttcaaaatgcattccatttttcgtttaatatgcatcgtgcgctaagtcccccgacaaagtaagcgaatatgatgcattgtatgtttttggggatatacacagctaggcataacaccctccaaatgagctaagaagcctggatgcctccgaattcttgaccatttgtttaaacatagctcgtggtaatgatgcattacttaggtcaatgatggcaagatttggtcatgcatccaagtgttaactgggctcctttcagcgaggtatagtcaggtttgcgctgacactttaatcacattctctctatctagagccatctgtgatgggcttttcccgaacaatggggagagagcaccgggaaacacgaaaggcttctagttacacaaagctgagagtgtattagctgcactttttttgggggtcgggttgaattatacaatggactctcgacttcaacaagggaaggctaaagttgcacttgaattcaagcgagggcttcacgctcaaaactaatggtaaaaactaagttgggtgtccaataggcttcaagcacttcctccttcgagaagtgagggttgaaggcgcattgaaccctaatcgacattgtaatgaccgcatgttagattattgattagtaaaggtaattaacgttaattattgactttttataaacgtatatgattttatatttattgtggaccccatttttagaaattggcattagagttataatttctcaattcagagattttattaaactataagggaattatttatgctgaacataaattatgcaattttaataatttttgcttggcgacaatagaaaatgtgatggatgaccattaaagtctcatggataagtttagaacctgattcttagtgggaaaaacatattagatattgtgaatgttgggtttaggcggggtggtggtatttgactattttacacctaggcctttagattacttaagttggaagcaagggcagaattgtaattttgccactttggtgagatttgtcctttagtggaattattgttttttagatggtttttaatattaaacttagcgttaattttttagtttaggaatagaaagaaaagacaaaatttaaagaccaaattctatcttgctctctctctcctttggccctagcaaaacaagaggaaactatccctaattattgcagcttttaagttttcttcaagggtttgaggtagctcaagctaacgtaagcctctaacactattcctctaagttcttgtgagtttttgtttaagttgaagtctctaatttggggttttcaattctgtccgaaccttcaattttttagggtcatttttgggtttagtttacgttgttcagagttggtttgaggttgttttgaagattgactcttgtgttgagcaagtttgagttcaaggaactcaaaattagctcaaccatggtggatttggtttttgtgattaattgttgcaattattgcttgaattctttagttgggtgcttttataggtattcttgaaagtttggtggagtttgggtttgatttgggtgagttatgaaggtttttgagatttttgctatgaaccagtcagccggttgtacaggtagaaccggttagccaattctataggtagaacaagttaactatttcattgggtaggatcccaaaaatctaatttaccagtttaggccattttcagcaccgtagtttttgtgtttcctctatatttagggtattgttatgctatttatcgatagggaagcttttaggtttgagtttaggcccccaaaaaaggttttaacaagttgtttacccatttatgtgaatgtgacatagggcatccattcagcacttgtttttttgttcaagtcgaccagcacacttgaattcagaaatgagaaaagactagcataaaatgtatttatagatgaataagtgtatgtgtaatatatgcgtgctattttagattcgtatgctaccaacactagtacggtaggggttctaagtacatttgtatagtgtatgatgttcaatgagtacaatacagtgttaccaatagtagtacagataagtactgtagtgtatgtggtacaacacttagtggtacttgaggtatggtgcaaaccctaccaacactagtacagtatcggtacgtagtgcatgttgtacagtggtcatgccttagttaaagaatgttcttactcatctgttaagcctttgtggataggtgtatggacaccgagatacaagttgataatatattgtatgttacatgcttttcttactgagtctgtttactcacagatattactttcttgtgtaggaaaaggaaaggctaaagctgaacaatagtgagtccagagcttaggggatgattgtaaatgtcgagattgtgcgacttagagagtttgatctctcgacaacatgggccttattttgtagtcgttgtgcaacatgtgtgtaaatattattttaaatgtatatatagttcaatgtcatatagtatatgcagttttaaataaatattgatttattgtcatatattgaaatccctacaggtttattaatattattaaatatcgtaatttttaaaaattcttttgatcaggaagagagaaatgcagttgaaatcaatataatgttttgaaaaatgttccttgctcaaagtatatataaaaaatatagttcaaaatgataaatggcaactgcaaattaatattattcaaagttgagttagaatgagtccaaaattatctaaaattgtaaataagaccaattgaattcataaataagtcctattctcatttagaattctaattgattaatcaaaaccagttgattgagtctataacgcaacattatctcacatagtgtgggggccatggacctatataatcaagctcccaataagtagttctaaaatttaatgattaaattccttatctttttaattcatcctgactccactatagattcagaattatactcttgattacataaagcgctcaattctccaagaatagatattgtataagttatccattatttcaatctaaatagtcaataatcctctatagatagtctacattgaatagggattaaattactcttttacctttcaatgtattttatccttaaaacatttagctacttgtaaatgatatttcaagaaactaatataattatcattaataaggctttaatcatttaaatgcgtttagaaaagctctaaggaaaccatcatttcacttctatgtacttatagagaagctatagattccatatatatgactagtactcccactcaattatacttctctgctcctaagatataagtattgagacaaacctacaggtaggcttcgaacaaacaactcaaagaatgagaatgacacagttaaggtagaatctaattatctcaggattaagatcattgatctaagatcagctattagagatttacctagaaaagatattttggtaagtttacaatatctctttgctgtaaatattaatctagtctaatgcatagccaatacatttcgatgttagtctactttactaacgctctaaaaaagacattccacttatccatgtgattgtaaaccccatcgttgattatcatgttagtataaatcctatgcactgataaatcttgggactaaataatttgaaacatataatcacagttactttctattgtgatgacatcattaattgtgaatgctatatgtttgagatttaataaaacttatatattaaatccataatcgtgtgtaaaacacgtgaacaaaggttatgactaggtcatggtatgatttctgatctttattgaaagtaaatatgattatattgaattaggtttta

SEQ ID NO: 300894 - DNA, 3520 bp, Cannabis indica
ctctctatggtttacaagccccaagggcttggtttgagaggctacatcagtgtttgttgtctttggggttcactgcatcaaaatcagaccattcactgttcattcttcatactgcatcatccattacacttgttctagtgtatgttgatgacattcttgtcactggaagtgaccccaagtcagtagcatctcttatcatctctcttaataatacattttctcttaaagaccttggaaaactcaaatatttttttggcatcgaagttgccaaaacaaacagtggcctttttctctctcaagcaaaatatgccaaagatcttctagtcaaggctgatatgcaagatgttaaacctatctcgacaccaatggttaatggacaaaaactctctgcttatggcagtgaagtttttcccaatccacatatgtacaggtcaattgttggggcattacaatacctcacaatcactagacttgaactctcctacagtgtaaacaaagtttgtcagtacatgcaacaacctcttcaaactcattggcttgttgtcaaaagaatacttcgatatgtggctggcactactcactatggtcttcatctcacgaagccctcacactttgaagttaaggcatttgtgatgctaattgggtctctgatacagatgacagaagatctacttctggttttgccatcttttttggccaaaatctcattgcttggaagagtcaaaaacaacacaccatctctcgatcaagcactgcggcagaatacaagagtttagccaatgttgttgctggcttgcttggttacaatctttgttttttgagctacacattcaactctctcagccatcaacagtctggtgtgacaatctaagtacggttttgctcagtactaaccctgtacttcatgcacgcaccaaacacatagagttggatctatactttgtttgtgaaaaagttcagaaccaccagattgctgtcaagcatgttcctgttgttgatcagttggcaaatgattttaccaaggctatttccagtcagaacttctctgcttttcgatccaaactcaacattgttgattctaccaatgctcaatttgcgggggagtgttaagggaattcaatttattttgttattttctattaagttagtttctcaattgttttggtttcggttgttaggttagcttttcaattgcaacatattcttattttgatggttactcatctttgataaagtagatgagtatatattgtactgaatcttcccagaaatgaataacattcaatctttctcttcatcttttctctctgttctttctttgttgcttatgttcatcgactgaacattatgttcatcgactgaacatcgatggctaggagattcaactctcctaacaatcaacaatccacccatatggacaaatctaattgcaactatggttgtggccataggagacatcaacaaattatttttattttaaacgaacggaatgtactgcattttttcgatacttgctatacttccgaggattttttcgacactaaaactaggagtgtaaaactctaaacaaagctatagttcaaatgaaaaataaaatcttatttaccattggattcaaaactcacaatggagttgttagtgttttggaacttataagctgtttatgctatgtcatggattttatatttacacaataaaagttgttatttgaaacgtatatagtacatacacgacagaaaaatttagaaatcgaaaaataagagaagagtcactacgacaaggttgttttgctgttaaaagcttcacatgcaataatactacgtccaagtccaacaatgacaaaaatatattatatatcgatgtctcaaagctctaaaatttatttcatgtaatctaatctcgaaaccgttaaaacaagttttgttaatgtgatcaacaacaacagccagttcaaatgaattggtttaaactcagagttaactaaacatgtcagccttggaaagtgatcttgaaaaactgttgttgttggtagtgatggtggtggtggtgatgacactgctattattcaccacgaacagaaacattgatgtcaggagatggaccaaggtccggtctggactctgaggaaccattattccaaccatcaaaatgaatagtagccgtgccattattcggattcgctttggcagtaatggttgttgggttgtgttgtgtttctacatagctttgcacaggaaaggttggcggtttgtttaagaagggttcaaccatgtccggtttagcctgtgaaattggagttgccgcagtaactggtgagtctagagctgttggaggaggagaagccactgtgtgttctcgatggtggtacttccttttctgcactttgcagccatttggtatgaaacttccaactacaatctgccaaaacagatgaacccatatgatcattatcatcatccattatgaaactgattttgggtcaagtaaattctaatctatttttttacagaattaactaaacagttcaatctaagtgtacactttcaaaaagaaaatgtttctaaacaaaacccctgaaagtgtttccgggattgcactcacaaacgtcattagtgaattgaacattatgaatatgcagaaactaacaatgaatccatataaattctgactaaattatgcatacagaaaatacatacaataaagttcagcaacttttgcaggctgccaatcaattggaagacgcctcacaattgattggccccgacagtttgaactggagatcttacaatagccccaagtttttcgagtctatggatttttaaaccttgaaaccaatacctaccagcaccacacgccagtgttgctactacgctagaatatatagtccttactttctatcagaacaattctcatggtgccaaactcaaggccctccaaggagagtaaaatatcacatacatgtaaagaagtattattgatcaaagacataactagggaaaagccttgcctgaatgggactagcagccgttagtaaaccagcaaggccaccaccaattacacgaccatcaggaccggccaaagagacgctcaagccaccattccgatttcttgcacccgcagagtattcagttacagtgtacgatccggctaaggacaatatctcaaagcggccctgtcaaaaagttgaaaatagttcatattaaacaaatgtatttatatatatatagataatatcaacaccattataattagtaatagatacacaagcacctaaaataaaaatctgcacaatggttttctcaatataagaatcatttgtcaatgaaatgggcacatgtccttattagcaatttcgaggaagcaaagaatgaggacaaacttaagcactaaaataatactgtttcgaatatcttattttattttattttccctctcctggaatagactagtcatataattgttgggagttagaccaagcaagatatactaagaggttagtaagagtgtgtgtgtgtgtgtg

SEQ ID NO: 300895 - DNA, 811 bp, Cannabis indica
ccttacccgaccgactcctccaacgcaatcacagcgacgtgattgatcgacgtggctgctgctgcgagccgcggctgcagcagcagcggctggcgggagactcgatgaattggtgggggcgccatgtctcatgactcggcggagatggaaggggggcggtgagaatagtaacttaaacaagagcgagcaaggagtggtggtggagagtggcggcggaggaggaggggatggtggaggtgttataaactggcagaatgcgaggaacaaggcggagattatttcccaccctttgtacgatcaattgctttctgcacatgtggcttgcctccggatagctaccccggtggaccaactgcctaggatcgatgcccagctggatcaatcacagaatgtggtggccaagtactcagctttgagtcagggcttggttgttgatgataaggagcttgatcagttcatggtatatcaatttatttctcatctctctctctttacagatttaattaattaattcttgattttttttttacttcttcgtctgttttattttgatggtaatttaatgaactgaactgaaattaatatttgtatgtattgtgttgctatatgtgtgttcgtacaaagtctaaagaattttgtttatttatgtatattattaactctgtaaaaagcagagaatttcgttatttgaaatggatagttagttttctcattaagcaggttgatcaggattaattcaaagaaataataataataataacaaaaaaaatggttttgaattcttaaatgaagattattattattattatta

SEQ ID NO: 300896 - DNA, 3160 bp, Cannabis indica
ttgtgactaaaaaattgtcattataaaagtaactatttttgtatcaaatcaacatcttatgaatgttggatcaattagatgactaaaaattaattggatcgaatcggatggtaaaatctaatatccaatatatataattggatcagatctaaataaacttaaatctgatgagtgttacggtgttatagataatctagctaatatggacctaaaaatttctgccataattaaaaacacactcaaatggccgtcgccttaattttttgttttgcatgctaaaattcatcaaattcattagaaagaggaaatattattggtaaggcatatcacctaaattaagagctcacttagccaacacgccagcgcaaacaacataaactatcaagactgaaattaaagaagcaaagcatgcaaaagcatataattgccatctcggggcccttctcatctcaatggccttcaccagcaccatgcaatccgagcaaaaattcacaaaaattgaaacacaaatttaaacttccattagatatatgttctagtgaattggcatgatgaggcctgcaagtattttattaagaaaaaaaacataaatcaaattttatatttatcaaagaaatttctgacttaacctttatttttactaaattatgttggatgacgattctaaattagattataatttttatttaaacagtgctgcatttggtaatttacttatcgtcttcttagagaaaaaaaataaataaaagaagagatactgatgtcttgtgtcgtttacctcataaattgtgtcgtttttaaattagtacaagtggagtagttgtttcgttttttaaatattgtcgtttgttaatgtcatcgttttcgaatttcattgtcgttttatactttaatgtcgtatttcaagttttgtgtcggtgtcaatacactattgtgtcgttttacttaacactgtcgggctagtaggtagcaagagaaggaaaagtggtgataagacgcatttgcccctcctgaacggtatttgcgttctagtgtacacgttcccgcgctatatgaccagtcccccaacatgttctcacgtttctccttcttcctctctcagaattcaattcaaaacattctcacctctttctttctctagcttatgcttttcgatcgaaacgccatcgaatctgcttctacaacatgtcgttttcggattccgattcttcttctcatggcggagccaacgagtacaaaatcttccgtcaaacgagccgcgacagtaagtgttctttttatgtgtgtttggttcccgagaaagtgcatagggcacatgatctagaaactttcattattaaaatgttcgaactattctccataaaagcgacattgaaaggaattaagacagaattaaattgatggaatgcttgatattttcaatagggtctccctagatgattacatttgggaatttcatttcatttaatgattgtaggattgttgcatgaaatgctgggatcaacgaaaacaggggactcgaaagcttggaaggtctgttcggattagtgtttttatttttaccaatttcaagtttttctgactgagtttttttatcatcaggtacttattatggataaagttaccgtaaaagtcatgtctcattcgtgtaaaatggctgatatcacagaccaaggaatttcatgtaggcataaatatgatgttcatttctcttccatttcctattttttgaaatattgagaacaaccatttgatcatgagattgatcgttcacattctggaatgaatacatttgtcatgaaagcatataactttggatattttactgcagtggtggaagacctatttcggaggagagagccattgccttccatggatgctatttatttcatgcagccattaaaagagaagtacagtattcttttagtcattttcataattgaattgtactcctgtaattttaatatgaggtgcatggatcagtaattaatcagtgtaaatgtaaatgtaaacagacgcctctcgcctttataatgagattctcaacataaattaatcagtgttccatttagctcataatggtttaagtttgaaacactaaccctgtcttttgctagcatgcagtgttgtcatgttcttgtctgacatgtctggaagggagcctttatacagaaagtatgagaatccttacattagtcattttcataatattaaaaatttcaaactagtaacatcttgtttttgactttcatttttcattattgggtttcagagcatttgtgtttttcagttcgcctattccaaaagagtttgtcaatcacatcaagagtgatacaagtgtattgccccgcattggcgcactgagagaggtccaaatttcaattttgagttgtaatggttctcagtatgtgtaactcttatttaattttatcctaattgttgttttgatctgatcttatgatttataatgtgcagatgaatttggaatattttcctatagacagacaggtacctctctattgtttcatacacaatttgtattcgaaccataatatcttgtcttcccctcaagcttagcaagtagattttattcaagatataatttaaatcttgtccttaaatggagttgaatatcatttagtatttcttaagtcttttcaaccccccaataaaatgggacttttaacttgtatatcttatacagctatgacaaatgacttggttactgacagttaaagttccaccacagcaggacatgcgactacatttcttgtgatctagtctgtgctattttatgttctttaaccatttattcttttgttaaaaatattattattataggcttttattactgatcatgagagagcattggaagatctctttggtgatgtggagaattctcgaaaatacaatgcctgcttgaacacaatggcaactcgaatcgctactgtttttgcttcgttgaaggtatgaggtccggacttcaatgaagaaatttttctgatattttttaaagaaactgaaatccatgtttaatttgaatcttgtactattgtactacatttccttgcagaatttttctccaaatttcaagggtacatttctttcctgttgctgcaaatgtcttacctagtttttttttttattttttttgtcattt

SEQ ID NO: 300897 - DNA, 1178 bp, Cannabis indica
agggcataaaacccaacaagtgcatggggctgtcttccttggacaaccagctaaaggtcttattaggatcttgcaagtgcttgtatatctctgtctttgcctgatggttctgatatcaggatgaacttgcttcagaataagtctccatgctattcttgttagtgtctaccgtgcaaccatagaatcttaaaagatggaaggttgtacaacactaacctggccagttagtgttaacctgtctcctatgtattttttgctttctactacgtgaaggtgccatgtcaagtgaacaaaaattggaatacaatatattatgcaacataagtgacttaatggagatcaatgtttgacattgtgtatcttatatgaataaatggtgttgtagaatggctaataaaacactcatgaaacttgagtcactcatgtatatatacttataaaagtaatttaataacaaattatgtgaatatatatatatgtggaacactatttaaacctaatatttatatttgaatgatatttaaaaagcccataattgttttctccttaaaaaaaatagttattttctccagaccaaaaataaaaatatagagaaaaaaaacaattgttttgttaaataaataaataatgtccattgtttgaatttaaactaattatactctgtttaggataagaattttttttttttgtaaaaagagcttcaagaaataacatgaaaaagcagcagccaccagaggaacaagaggagctcctcttagccatccactcgcagcctgatagcatccttgacaagagagtgtgcttggacattgagttgtcgaggcaaatgttgcaaggagacaccagggaagttggagatggaaagcctgatcaacgaaacgaggcttgaaagagccgattgatcctgccatgtcccagtagctttggagacaaggtttagacagtctgtgaaaatcaagtccggcttcaactgagatgaaacacaccaggatagaccttcttaggggtgttcataaaaatcgaaaaaccgaaaccgaccatcaaaccggccagaccgtaactgaattttcggttccacgtcatcaccgaatttggcggtcggtttcggtttcagttttttttgacatggcggtcggtttcggttcttgaaataaaaaaaatagtttaaccaaaaaacc

SEQ ID NO: 300898 - DNA, 4704 bp, Cannabis indica
tttcatgtaattttactaattctgatagtaaactatgctctttagactttaccgtaatttaatatttaaaattttttaacaaaaaaatcgtaattaacaatttattttgaggaataattattaaaataaaaattaagagtaagcaatcgagaaaattccgcgagtgaggatagtggaggtgcatctaataaatctcccttaactctcactcagtttctcttgcaatcaactcaaactcccatcattttcgtctctttccctctctctcttcacataatgtggagagtatagctctcatcagctggtttttcagatctcattcattttctcactccacaaccaggtaaccttggttatcagatctttggtttttttttttttctctttacagatcttgcttgatttctcattttcgacctcttcgttagcattgcttgcattttctgattaccatcggtttgatttcaattttcgtatatcgttttctgttttcatggcattttgataagcttgtttggtagattttgtttttgtagttagataatattgttgttgctgtggtactagtgacagatcttgagaattttgatggatctgtacgattaagaattggtggttttaatcgatttactttttgtttgaatttcagttgtttgggattaggagtgtgtcattttgaagtatggcgttaggaaagtatactagagtagacaacaggaggtcgtcttcgggctattgctcgacggtgacgattgtggtgttcgtggcattatgtttggttggagtttggatgatgacatcttcgtcggtggttcctgttcagaatgcggatgtttctgaggagaataggaatgatgttaaggaacagagtagggttgaagtgccggagcaagtgagtgagagcaacgtgagcaatgatggcaatactaagcagtttgaagataacccaggtgatttgacggaggatgcgacaaagggagatggcaatggaagtggtaataataatagtaatcaggaagaggaaaagcctgaagggaaacccgaagagaattctgaggagaaacctgaagagaagcaagaggagaaaattgaagaaaagcctgaagatggaggtaatcagacggaagaaggtgattccaagagggaaaatacagagtccaattcagaagatggagagaatgataataagtctaattcagatgagaaccagaagaaatccgattcagatgatgaggaaaagaaacaagagaatacagaggaaacaaaggatgaagagaagatagaggagaaagtggatcaaaatgataacaaggataccgatggtaactctggtgagaataaagaaaatgatcagtccaaaaaccagggttcaaatgaggtgttcccttctggggctcaatctgaacttttgaatgaaacttctactgaaaacggtgcttggaaaactcaggctgcagagtcaaagaatgaaaaggagactcaacttacttcaaatcagaaaactgtttatacttggaaactgtgtaattcaacggctggatctgattttattccatgccttgataatttgcaagctattaggagtcttccaagtaccaagcattacgaacatcgggagagacactgtcctgaagaggcccccacatgccttgttcctcttccagaaggatataaacgcacaattcagtggcctaagagcagggaaaaggtactctagttactatgcaatctcgtctttgacattgtcttttccctgattttaattgagaatatctgtgaatgtttttgatttgtctttttctaaatttctgtatcaacgataaatttgtaatgtccgttgcttcagatatggtactccaatgttccccatactaagcttgcacaaattaaaggacatcagaattgggtgaaagttactggtgaatatcttacttttcctggtggtggaacacagttcaagcatggtgctcttcattacattgattttatacaggaggtaactgactatggctactttcctggtggtgaatcactctttattcatattgcttaattaattttctttgtttagaaatattgacatgttctagtaattaatgattaagagaaacacatccacctctggattctaatggatacaattctattttggaataacctgggttctcaccttgaagaaacaaatatggaatgttcttcttactgttctctgactaaattagctttgttataaaatttctttatcatgcagactgtgcccgacattgcttggggaaaacgttcccgtgttgttttggatgttggatgtggtgttgcaagttttgggggctttctctttgacagagatgtactcaccatgtcccttgccccaaaagacgaacatgaagctcaagttcagtttgcacttgaaaggggaattcctgcaatatctgctgtgatgggtacaaagcggcttccctttccaggacgagtctttgatattgtacactgtgcccgctgcagggttccatggcacatagaaggtaaaaattgtactattttatggagaaatcatgtttagagttcaggttcaggcagttcagcttggtatacttattttattacatccttggcagtgccatacttcttttttctctttttttttttgctgcttttaagattttgacctgactacaaattctatgtgaaggtggtaagcttcttttagagttgaatcgtttattgcgacctggtggtttcttcgtgtggtctgcaaccccaatttatcagaagctgcctgaagatgttgaaatatgggaaggtatacaaattgatttcatattcttgatgttcatgttttgtttgcttagtgctttcttataataatttaagtattgtatgtccactatttgcagccatgaagaaattgacaaaagcgatgtgctgggaagtggtttcaattaacaaagacacagtgaatggtgtgggtgtagctatatacaagaagcctacttccaatgaatgttatgagcaacgaatgaaaaatgagcctccaacctgtcctgtcactgatgatccaaatgcagcttggtagtgcttttattatataaatttttaaatacaagaaaagtgtttcaagtatgaaaaaattgtttcatctgagttttcttcatttaaggatagaaactctttgcttttgtcggaacaaaagttagacaattgaaatccctgaatcttccccaagactttcttgacaacagtgtttctgatcgtgctgactattatcctggtctgtttatttcccataggtatgttccactggaagcatgcatgcacaaagtgccaactgattcatctgagcgtggagctaagtggcctgagcaatggcctgcaaggttggacaaaccaccttactggttgtcgagctcccaggttggagtttatggaaaagccgctcctgaagatttctctgcagactataagcactggacacgtgtagtcagcaagtcatatctcaacggaatgggaattgattggtcaactgttagaaatgtcatggacatgagagctgtctatggagggtaagcgaaattgtgtcagtgggttaagtgttgtaaatagcattagtttttttaaattatgaagtgatttcaatgggttttcatctgatgcattgcaaatttatgcttttgccaacgtaaatttagttctgacatctatgtgttaccagatttgctgctgctttgaaggatttgaacatttgggttatgaatgtggtcacaatagactctccagatacgctacctataatttatgagagaggtctatttggtatgtaccatgattggtgcgagtcattcagtacttatcccaggacctatgatcttctccatgctgaccatctattctctaagcttaaatcgaggtcagtcaacattcttattcccattttccaactggtgaaacattttagtatgttttctaactctcgtattaatgttacaggtgcagtatagtaggtgtacttgcagaagttgatcggatcctgagacctgaaggaaagtttattgtacgcgacactgttgagatcattaacgagttggagagcatggcaaagtccatgcagtgggaggttcgattgacctactcgaaggagaatgaaggtttactctgtgtccagaaatccatgtggcgacctaatgaatccgagacactcaagtatgccattgcttaaccttgtcctaggaagttcccttccattcttgagggtgtaacaccccaatgagttttaggtattcttttgctttggtagctaaatgttcaagtaatggtgactgccccaaacttcacatattatatctttagcttatgtatcacatattagttaggcttttttccattgcccgctattaattcattgtttcgttggatatataattttgatgtcattacgaatatgagtgtcgagtgctcgtggctgtgaatttcattgtagtacatgtttactaatagatttgatggaaagaaatgaataccttcttgcaaatgtaaagtccattgatgagatacttgatttataatgaaaatgtattgctatcaatttttattgtttgttctatttgaggtgatcatataagcaaactagcatcaatggagttgcaaacactattttaagacaccactattaaaatagatgttttctttactctctctctctctcttctt

SEQ ID NO: 300899 - DNA, 1867 bp, Cannabis indica
aacttctgagatccaaaagtattaactcagaatttcgttaacattaataagacttttataattaatgcttgaaattaattatgtgataaattatatatatttagctgtaaataacaatgaagaaaacaaatatttttatgttatttgtaattaaaatctacatacttcacaagtctatattatttctgagtatttttgggttgatattacaatttgacagagtttttttaattcagaaattatgtcgtgccttctacagcattttcactactatttaagattaggatagcaattatttttgatcttatttacataatatttatgaaacgtggatattcctcacgtttcatttagttaaataggtggaaaatagcatgcaaccgttttctattcaaaaataaaaacaattgttatttttgacttgatctttgtgttttgtggcatgttatcgacgagacacttgattgttgaagtgtagtccttcagaaattcactaatacccgaatgtgtgtttcgggtggcatgctccttagtaaacatcttgacttcaattatatttttctgaggtgataaacagaaccaagcttaagcaacttaagcatctcaacataaaaaatatcggcactaggaatgcttctgaatgtcttcacaagtttagcaccctcaattggatatttggttctcgaggtgtatatcgtgtatgtaccataatcttcttaaatccaatattgcccataacatttaccctgaggagacaatatatgaccttcacatttcgaggaggtcattatgtctcaattttctcatcaactaagtaaatttattatcctttgttggacacgtgtcatgtaattagaaatgctcttttattgtttgaaaaattgatataacatgaataatggtactttctcaaataaatgaatgctcaaaagaatatagtgggatgccctcaatacgggtcatcccgaaagagtaatcgaaagggtgttgtggagcgttgaccgtccggtaccatttggcgtggctcgattgcttctgacaccaaatcctgaagaataagggttttgttcactatgtctgtcttaagaaaggcgcacaactaaaaaagcaaattacctttgtccaacgtccactactcacctactattcatgatcgacagtgcaagttcagctatcaacatcagacagtacgaatccgtacggatgacaaacaccctctaaattggttgaattgttccctcattttgttactttcattcaagtacattcttaaagaccctccattatccataactagaacaccaacaacaaaatacctttcttggacataaattttgcgggatgtgagttttctaaggtaactaatttagtcctactgtgttttgagttttacatacggtctcgacatcttgcccgacctgctggttccatccaaaggctcgatcttttcaataataatcatttaatctctattatctctatgcttcaatttattttgtcgagtaacttgattgttagaagttatggccaccaatactaatattcaatctccatgaaatatttctctctgacgacaaatgagattttcaccaataattcttcttgatctacattttaatactttccattagtttgttttattgattagagtattaatttcacttcttgttttaataattttatatatcatatgtggcttcattttgaattagattaaaaaaattgataatatattaaacaagtaaactcttttcaattagattagaattgtgtatagcgaggtatacaataaatatgatgaacattaatgattctacaaaatcaatagtctaaaaagagcattgctattaggcatcagtggtgccta

SEQ ID NO: 300900 - DNA, 4979 bp, Cannabis indica
aggatgttaataaaacatacttggtagtaaatctagatcctggtaaaatatttccaacagtcaccctataccaggcttccgaggtgcctcttagagcaccttctccggttatgtccctatgttcatctggaaggtttcgtttattccatctcgtgaatgcaggagaccttggatccaagtaagcctctatctggaggcgagtcttttgggctagaggtaggcttgggccacctctccgtctaggccagatctatccttgtagaaaggtgttgggccgagccgtcatgagccaatcctactttggaaacgctacgtgtctcgtctccagaaacatagataacatgtaggatttaggaagaaagaaaaagaatagaaagtgggattataacatctataatggagtagtaaataagtggtgtattgttattttttagcacttctcaataaaaagcttctccaatagtgtgctataagttatgccaagtttaacacatgctaaaaattggaccaaatttggcacacaataaatactacttttttaattacatttttaccattaatcattaatgaaatactttaatacatatattttatttacaatattgtcattagtaattttttttaaatatttaatttattatttgtcattaatgatactttactttttagaccaatagatctcttaaaatgttattgtgcattggagtaacatagcaaatattgtgctaaatataaagtttgtttattttttgtgccaaatttagcacaatatttacatcttgcattagagatggtcttatgagagtattttgaggttaaggtgaacatgtggtaattttttagagggtgacaaaatgttaaatattttttaattttagtattaatttatacattaataatcaaattaacatgtctttaatttatttatatgtacatgattctcacatgatattttaaatttgagtggaaaaagacagacattgagtgttgatgaggtcatgcatacatgaaattttgttaatatagatgtggctagctaatattgattattcaattcaaacaacacccatttttctttttctttttaaaatttttcggctaaagaagagaagagatgtgtaattagtcaaagtattaaaagcgtgttaggttgttaataataatattaataataataatgattgattgttcaactctcatcccaataacttgaaaacattttacacctactaccttccctttcctttccctaaagtctaaagtctaaacccatattatttattttaataactaaaaaaatgtaattatatatgataattgtgataattaattatttaattaatgttcatgttcatccaccgcaaaaaacaagcccccaccccccataattaaatatatataatatataagaaaggtggccatttcatttcatttaatatatgataaagaaaattcattgtcattctcaaaaattgcattttaattgaaaagaagacaatatgtacaaacattagatttaaatagaacaacaaaaacaagtgatgatgatgatggtggtggtggtgatttaatattaaaaatttgattgattatacacaaattaaacttagtaataaaagattgtaaaatattaataattaattaaggatgagaatgaggatgatgatcaagagaaatagaagtacgtttaatgaagtctaagcaatctgcaatggcttcggcatagaatgagttagagcgttgaatgatatgtctgctcttgtagttgttgtagtaactgttgttgttgtaactgttgttgttgttgttgttgtaactgttgttgtaacttttgttgttgttgttgttgttgttgttgttgtggagtttgatcttcatcatcatcacctcctcctcctcctcctcctcataattatgactcttcttagtctttttgttgttgttaattaggaaaagagaaagagagtactttctcaatagcctgaagaaggttgtgaatctggcacgtaatcttgacactgttagtctcttcatgtgtagcctcaaccctcttcttctactactactactactactactgcaactgcaactgttattccccactaccttgctatagtacctcatgatcttctccaatagtgaataatgaataatgaataatgaaggaatgatacaacaataaagagagagagagaggagtgaagacctatatattttgggatgatgctatgctatgctatgctattatttaataaagaagtataagagagaaagagaggttttggtggtggtatggtggggcctccactctctcaaaaaacaccaaaaaataaaaaaagaagaggctgttttcaaattaggtgactttcctaaggaagcagcctattttgttagaccaatttcatattactattataataagatatttgctgtgtggtgtgagacaacacaacacatagtacacattaaaatcatatggattttgtgtgattgcatgtctttctttccctttaattgccaatatgttaattctcttgtaaccaacacaacacaacacagcacaggagagaacagatcagatagatagatagatagatattctgttggtccaacaaagattgactttcttctttttggtaagagtggctaacctttcttccaccttccaaacaacatcacagggaaggaaggacacacctcacctcacacactcactatctcaacttcttgccctgttttttggatactaaacatacatatattataatttataagaacaaaaatataagtatgggattaaccacaacctcaaccaccaccacctacactactctacactacacaacgcagcacaacttcactagaaagaaagaattctatttagataaaaactaaacaagagaataagggatctcccatcccaatataacttatcaaaaatcaagtcctattgaccaatatctattccatttcgtaaaaacaattaactaaatataactttaaaaacgacacatgaggtgtggctagtcttatgagatgagatgaccaagataaacgtgtcattagtcaaagccctccaagtggaatcccttttaaatttaattaaactaaacttttgggagttgacctccctgcctgccattcattcccctttgctaaaaaattgtccaaatcaaatggttccaaaagaaagaaatacaaagtattcattcttccacggaataaaatgtacaaattattcaaaacataaataacgtttaaatgtgaacaaattacacaaatgaagttgaactacaaagcacagttaagcctaaactaaactataactgggtcgaggtctgaggtctgaggttaccaacgcaacatcatgctaaaactcctcctgtttctactttagactttactattattggggagagaccggaacaaaaaaataaagaaaggtggtttgtaaggaacaatcaatccttatacgttgctactccgacaactcaaatggaacacgaataaatagttgcccgtgcagagtcaccactgccgatgtttgatgtgggtcgattcttgatggcaggctcacgacctgataacacaaaaacaaacccatgtttctcttatgaaaaatcatacttatttgaaataaaatacatcagaagcaaaagaggagacaaatattataccttcttgaaaggtgtcacaccccacggattgtcagcatgttcgggttcaccacttataaccagccgtcccgcaggatcagattggactcgcacctgaggttgagtatcgtacaaataagataagaaaatggatggttgaccaaatatgtgacgtgcacaagcaagaagaggttatcatttctccacaaagtcaaactttgaagaagcaaaatacaattacaagcctattaattttttataaatcatgtggagacacacacactaacaggcatctacatttctaatcctctcaaaagagtccagccatttaaagcacagaaaatctcaatataatcacccaatgcaaaagtcaaggcaaaaggaaggggaagtttgctaaaggcaacttgccgacatagcggttgacagaatacaacaacaaatttattaaagatttcaatgtcaaagaatatctataaggagaagaacgagaaatttattaaaatgtaaaacttacctcctcgcgtaaaagtcctggaactaatgcatatacctcaaagcaatctttctgttatacatcacaaatcccattctaattagctcttagttttcggaaacataataatttcatccaaacaacaggtatttggaacttacagttctttgcacattgatcttcacccattcagctggaggtccagcatcaaccactgcaatgtccaacctaaccatacagaatcataaaaacaataaattcaatgcaacctttgccataaccccgcccacacaacaaattcttgatgtactcagtaaaatgtaacatgaatcttaactgagactttgatgctttagtgcgtgctgcttttaccacgtgatctgtgtaaggaggcttcttacgtttaagtaaacctggtgccaatgtacaaaagattttaattattgaaaattcatcagtagtcataatgcaaacactgttttaggcagtcagttctgttgagcggtcatatacctatatttttcagttgtttttcacgcttctgcatggatatagaacttttgtcctgaataaagttgcaaatgtgtaattatgttattgaaaagttgttaagggaaaaataaagtaaaaaacaatcagcacaagaacccatatatccaccaccgtactttaataatggggtcactgacttcaccattaccaagaagacgctgtgagtgccaaccctgcatagcacgtgcagcagcatcccttcgtgctctacctgaacctgaagcctaatagcaagggagtaagacacacacacacatagagagagagagagagag

SEQ ID NO: 300901 - DNA, 1694 bp, Cannabis indica
ctgatatttttctaatcttttttcattttaaatatgaaaaaataaaagataacaagcgtaaaaatactccaaacacgattaaaactcaattaaaaatatactaaaattaatctaaaattaatactaaaagtaacctaacatagactgggaagacatattggctcttagacttagattgcttgagagtgtcatagatgtctacctttggtacaatctggagcactcaaagacaattatgctttttcagacacaagatcaaatcttgtcccctttgtctaggcatggaagtgcgtgcacctcatccacctttttgccaaacggttatatgaaacatttacttttaaaggtgaaacttttgactaacacgtgccctatacttttaaaagttaaacctttgggtgccatgtgtccatgacgtacaatggtccctaattgtctatctatagcataaatgagaaaaaatattttctaagggacccaatagtcagctctcttttacatgtaatttaccctattattcggcttttagtagaaaccctaggtgcgtaatgggcatgtccatacccatccttagcctataaatacccttctatttccatacgaagggtgatcataacctaaatagctaaggcgctgccaatatttttctatgtcttctcttcttcaagagaaactaagagtacagagttaaggtttcctacaatatattgtaaacacataaaataagcacttagaggctaatatactgactcgtgggctaaggctaattaacatatgaacgatgtaaaaatctccatctcattaatttctacattttattatttctttagttctgaaatatttagtttctaaaaatctcgaagtgtttccattaagagttgaagaaagacctaaacccatagtgttattgtaaccatggtgtttacaagaaaaatggttactaagaagaaccttttagatggtaccaacgctattatggaggctgtaaatcctttgtctcctggcctcaccaaaccgagaaatgcaagagaaggggataaatctaaccaagacagccgagaggccaatcttaaaaaacaacatgatgtgttgctgactaccatcatgttgaaggcaaggaggaggacgatgatggagagtacgtcaaggatgggtattacaaatatggttacaactatgagcaagaccccgaagtagttcgagtctcgaaaaagtcgcttgagaccaaacaaaagctaacccatcaagagaatttttctcagagaatggagaagataatggctcatctttgagccaagttttgagatctagatgaggtagacttttacgatgaaccctcggtggaatgagtcagaggaaataatgggaaaaaccctgctaatgttggaacctcagctcccatataggacaaggggaaggctaatgtaggtgacccccaaagccctcttgctcccgtacctcctcaaaaaaaatatgaatccacccaacaggcctcctcacacagaaggccatcgacgcctccaagctcggacgaccttctacccaaaaggccctattgcactaaaagggactagtacgaaagtaccaaagcccaatggaaggaaaaacaaccctattggtttagtaagctaagacggtgggacctgttgggttttatgccctaaataaaactctttacaatctgattagttatc

SEQ ID NO: 300902 - DNA, 3687 bp, Cannabis indica
atggctgatttagattcagataaaaaggccctccttgacttcatttcagctgttcctcatggccataaagttaactgggatccatctacacctgtgtgcacaacttgggttggtatcaattgcacattgaatggctctaatgttatttccattcggcttcctggtgttggattgtatggcccaattcctgccaacacacttgagaagctggatacacttatgatacttagtcttcgatccaacagactcaatgggactcttccatctcatctcctatccttccttcacttcgctatgtatatcttcaaaacaatgattttcgggtagtattcctgcttctctatctcaacatctcactgtttttgatctatccttcaactcccttagtggcaagattccaaatagtgttcgaaatttatcacatctcactgggctgaatctccaaaacaactcccttactggatctatccctgactttaaccttcctaagctaaagcatttgaatctgagctacaaccacttaagtggttcaattcctaccgcccttagggtgtttcccgctgcttcatttgaagggaacatgatgttatgtgggtctccttctctaaaacaatgcatttcgccttctctttctccttctccatctcatttaccatccgagccaacagcccctcctaaaaaccgaaatgtctcaaaaaggaaacttagcgaaggggctattattgctattgcagttgggggtggatttgcattgcttttcgttttagttttgttgacgttgctttgttgtttgaagaaaaaaggcagagaagacagtagtggtgtagcaaaatcaaagacgggaaggagtgagccaccgaaggaggattttgggagtggagtacaagaggctgagaagaacaagttggttttttatgaaggttcgtcttataattttgatctggaggatctacttagagcttcagctgaagtgttggggaaagggagttatgggacaacatataaggccatcttggaggagggcacaactgtagtggttaagaggttaaaagaagttgtggtggggaaaaaggagttcgaacaacaaatggagaatgtggggagggttagtcagcacccgaatgttgtgcctcttcgtgcttattactattcgaaagatgagaaacttcttgtttatgactacatatcgtcgggtagtttttcagcattgctacatggtatgttctttctaagtaactcaatatttttcttatcataaataagcttcattatctgtcatttcctcaaatttggcaataagaaactagattttcttgtaagaataaataaatcgagcgaagtaagaaacatgttaataccaatgccttctgttgatcttgatcacacactcatacacttgttcactcttaacaacactaaaaaaaaccagtgatagaattgaatggaagctttttgttctaatctgaattgtattattctgtgtatttggttattacaaggctatgtaaatgaattgatagaaagtctatttataggccatagactcttaactaacataactgaacacagggcattagtggtcatcacttgaaatgaccaataaggacattacactgtactaattgaattaacctatgctaactgtatgaactgtcccctataaagactaactactaaatgttgagttaatttctttcctcaaatttggaaaatttgcagaaaaagcatgccaatatttaataaacaattgattaggttcacatggatttttgattttttgtttttctttatttgctcaatatgatatgctaagacttttatcattcaaaattatatgaatagtatattatggtttttctttacattttaatgatatgaatttctccgatttttgcaggaatcaaagatggtggacaaagtcctccgccagactgggaaaccaggcttaaaaaattgccattggatgtgcaaagggcattgcccatatccattctgctggtggaggaaaattcatccatggaaacatcaagtcaaccaatgtactcttaagtcaagacaacaatggttgcatctcagattttggccttgctcctcttatgaacttccccactgtcccttctcgaagcataggctatcgagcacctgaggtggttgaatctcggaaatttacccagaaatgtgatatctatagttttggcgttcttctccttgagatattgacaggaaaggcaccagttcagtcgccaggacgtgatgacattgttgatctcccaagatgggttcagtctgtggttagagaggaatggacagctgaggttttcgatgtagagctcatgaagtatcaaaatatagaagaggagttggtacagatgcttcaggtagcaatggcatgtgtggcgacagtgccagacatgcgaccaacaatggaggaagttgttaggatgattgaagaaatccgaccttctgattctgagagtgcaccagaagagaataaatcgaaagacccctcagttagtactcataccccatagttgagttatatgttgatgactgattctctgacgagtcttagattagtatagcttaatttgattgtcattctttctcctaagttagttgcagaacatttgtgatttattagccttgtctgcactgttgttacatcattttctgtaaatgtcatatttctcaggcttttcatttctctgtattgttcaaacttgtagtaaaagaaaaatgtcttctgtaccacattatcgagatcaaataatgtcatcgaaaaactcgatgaatgtctcaagagctaactgcaagagagatttgttatgatcattgtgaaatctgtaatcgtctgaaccaaacgtgttgatatttcgtccatgaaaaatgcttgctgctgcaactaatagtgcatttagtttaaaggctgtctcactaagttagtcgtgttagtttttggttagttcccataatgtcataatgaaaacttcatttctactggaaaatcattataacaaaggatcaagaattgtttagtttgtagatttctaagaattgcaataattaatatgcataaatataaatgtacaacattaataaagcaaattaatatcagttatttcacaaaaaactaaatatttcattctcatgtgaactaatcatattcaccaatgtacaaaattacaattaaagcaaagacaattcactacaaataagagagcattgcgagcaacaaaatattgtccatattctttagcccctaataattgtcttctttttttttttatttcaatttaaaaatttggtaaggacaatgtttaatatttttagggcaataaatattacatttataataattataaaaaaacattgtgtggaaataactgttatcagggacgcctttaaaatttgtagggacgactttcgtcgttcttaaaatattttttattttcttaataattactgtttatgcatattaattgttgcttttcgaatagtgattattttatatttcatctcgtttgtactagataattatttaatttggtactttatttgaagtgtttgttgtattgatacacattgatgataatgttttgttagtctgctggaggagctaggttcacttttattcatggttatagacatgttatattgttgcttttctgctataggacattaaagcaa

SEQ ID NO: 300903 - DNA, 2675 bp, Cannabis indica
gtaaaaataatgaatatactaattgactacagtcgatctctaaattaaattcatatgtaaatataacacatcaaaatagtaaacaaacaaataaaaaatagagataaaataaacaattataaaattaaaaagaaaccgaatcacttggttatgtgactggatggaaaaacgaaaaaatgtttttttttttggtggacattcattcttctattaagtttatagctatatgaccactcattcatatcatacaaagatagatatataaataaaatataatgatacaaattgataaagacgtacctcttgttttatggttgatgaacttggtgaaatgctaaaggtgtaagagaagagagagtgcgttagataagaagaggaagaagctatttatggtagctcatcagtttagtgctcaattgaaaagaaaaagctggaagtggtatttcttgcttagttggaattgttatctgaggacctaaatttaattatttagttttggatttggagatagatagatagatagcttttagttcaattttgcttttgacacataagagacacgacatcaatactttctactagtccatccatttgtggtttattggcaaacgtctcttcctcctttagttcaagccccacatatatttttgttaaaagaaaattattttcaaccgttagatttttaatctgtttttattattattattattaaatatgttgtaactattttaaaaaaatttaacgaaattattttgacaaaaataaaattcaaacaattacacttgaatctctaatctctattcatgatatgaatattgtaaattaaatttaaaaattatcctatataccaaaataacaagcacctagaacaaaataatttttgaacgtgcctacataatattctactaacatgcgattcgattcagaacttactatataatgtaatgttataagattatacataagaaaaatttaaatttttccagcaaaagaataaacatgattttctccatgtttataagtaggataaaaatgtaattttatgtaagcttttttcgattatattttgtgccccaatcaaattatgcacatctaatctacaatgtatgattatgcgtgtacatttatatttgcatacagagccttcactaacaatgctattcaatcaagacagacttgactgctcttcttttaaacatgatgatgcctaataaaattcaaattctatatggtgccttttgattaccagtcatgtgctcaaactcccatctcgatttggttacctgactcgatggtaaaaaaaagttgactagtattaggcaataataaacagttagaaaaagatgtaagaataacaatatcaatacaaaatcctcgaggaagagatgcaattacacagatttcctcactctaataacagttgtaccgcacaaatgtcaatgaccagatatatgccaaactgagtaaaatagcattcgaccatttaccattttccttctctgtcgaaacaaacgatgaattgatgcctagagtttttttagaacagttccaaacatctcatgaactatcgaccagcattagtacagaaacacagacgttaatataataacctctggcaaacctctcttcttcaaattaatcgctttccaagtcgatccattgatccctcatctttgagttatttgccattgaaattcaacaagtgaggattcttattgactagagttaaccaggctacttcacttctcctcgccgttccccgagacctccttagcatctccaataggaccgtcattaccagcattttctcgaatgctgctttcatgtattgttgcattttgatgatttttgacattcatggctatctcatcagtggtcatgtcatcattagccacttcatcaacagagttttgaggcacttccttttcctcagcaaccacctcgctcataccatctcctgtgccattcgtactggagagttgaatgttagaaccgtcgtaaccattgccttctgcaggatttatttcatcatgagctgtaggagattgagcatgttcttcaatagatttggtttgctgaccagcattttcgtcacgagatgggtcaatggacatagcactaacaagctcatctgaggcaactgttaacacagaatcctctgtgctctgtgcaacagactgatttgctgcagattcagccaactcggtatcacaattatttgctgctatctcttcttgcttttgtgcttgcactctgtattcatccatttgatgccgtgtcctttctagctcccctaacagatctccataccgcttttgtaaagttcgctcaagctccttttgcttcttaacctcctcccatatattattaatccgatgtgaggctgctaattgctcttgcttttgtaacgcttggaagcactcgagttctttcgcagcagtatccatctgtttgaaagtctcctcaatttgtggccaaagactctttttagcccgcaactaaacaacagatatgaacactagttagtaaccggcctaaatatctgttcactttttctttctccacccaacgaaatctttggtaatgcataaaacaaacaacagaagaatgaacatatttaaacagaacttaggtggcatttggttgggaggaataaaaatataagaatgggaatg

SEQ ID NO: 300904 - DNA, 3406 bp, Cannabis indica
agagagagagagagggcctgggagcagggccgaccctaagcataggcgggctaggcccgcccctagggcccaaatttaaaaaaatacctttttaaaaaaatataatattttttttaataattttttaaaaataccattttatctttatagtaagagcctaaaaatattttgttttgcctatgacccatattaacgcagggctggccctgcctaggatgggttcaatagaaagaagaagaagaaaaaagtaaaaaaatatatatatttaaatttttttttttgtaattttttaaaattaatattacgtgaactactaaaaatttgtcacttgtacaaatgcacacatgtggacaatctaccgtgacatttaactgtaatttttggacggaaagatacaaagcaaaacaaaatgaaacttctataaattttgccgtcaaaaattaaatttatgtggttaagtgttacaaaacgtaaaatttatgtagtttagctgtcaatatcccttaattaaaacacttcaaaatatttttagtgcaaaattactgtttgtaaataattcaatatcctcattagattatcagtaatttcataaaataaacctcatttagccaaaataagtttgcgttatatttttaattaaaaaaaaaatccgataatctagtcatttttttttaattagatcacatgacatggctagttgtatacccggagatcaataagagaacacagaacatttaaattcataaagttcacgattcatagttatgttgaccttgcatttataacaggtaaataaattgcaacacaaacatcccaacacataaactgaaaccatatttaaactcttaaaatgttaggttatgccttcacatgatcatcaatcaagcaacccccaagagctcctttatgccatgctgcaatggtgtaataaagaaagatgagttttatatatttcattatgataagctgttaagatacataacataacaagatccattgaaaaacaaatttaaatactgtagttcctttttcttgtatttagattgcaataatcctaactaataacatttttaactcacttcaaatttcttattctacaccaacaattccaaacacaacattttgatgactagaaatttgatatgttttacctcaaggccaagtggaggtgtggtggggtaataccgatcggtcactttcccatctttgtccaccaaaaacttggtaaagttccactgaatattatctccgaaaaatccccatttccctgctttcaagaacttgtatactggagcagtattgtcaccattgacttcaatctggaatgtgccacaaaaaattgaagcagcacaaatcagtacaatttacaagttaacagctatgatacaatatgtcaatttactgttataaacataccttgccaaaaattggaaattctgacttgaaacgagtacagacgaattctgtaatctcttcattagttccgggctcttgttcatcaaattggttgcatggaaatgccagaatctcaaagcctacataaggccccccgccaaaataatacagcagaagagatgtgaaaaacactaaaatgtaaacattctcaaccagaaagacagtcaatatttagatatctcagcttgcaaatggttttctagagcttaacacaccttgatctttatacttcttataaagctggttcagctctgcgtagtttgagtcagtcagtccacttcaatgattgggagaaagaaaacaaaagatggttgtaagtaagagaatactttcagtggtttgagaacatataaaatataagaaaaagatgacctaaactgcagagctgaaacaatgtaaagagtacacaaatttaagcttggaaataacaaaaaatcaaaatagtaatggtatacacatcatcattatcaccatcttaagattaagataaaacgttatttgacaatagtggggatgaagaggagtaccatttggaagcaacattgatgatgagcagaactttccccttgtaaatgctaagatctacatcatttccttgagcatcctgtatcaatattcaacagccaaacatattatcacataaattgtctaagaagaaatatagcatttgtcaatgatagtactgagtacagatcacaggaaagactcataagaaccacaacttgtaagccaaagcataaagcaaactctgtatcgtatcttcttcaaatggattaaattcttttgaataatctgtgtttgtgagctgcaaagatcctatcacttacatgctaaccaatatgaaattacattgcttgagaagccatatctcattatcttattatacatgtcctaattttcaacacaaaaaataaaacttgatgacagactccctaaattggagataacaaattttaaattttaaatctttcgtaagattatttgttcactaggtcctctttcataaaaacactaactttatacttaaaatgacgaaaaaataatagataaacggacatttccaataatcaataaataagacccacaatccaaaatctgggaaatcattataagggttggtttgaatgttacataagaacatttgtctatcaaaaccaatttacccaaaaaaaaagcaaagtaaaaagctttactttttgacataaagagaaaactaaccttaacagtgagatcgtagattgtctctgggatctttgaggcttggcttgtcatccttttgtacgtaccagagagagaacacaactacagggccaagttaaccggtgagagagaagacagagaaataattcgcacaagatacattaaccattgaagattatataatccctcacattgtaaatgagacttaacaatcttttgttattttgtttattttttaattacttagacccacgttttagttaacgttattagattttgaatatagtacctacctactattagtctgtaagcaataactcattaataatattagctttgaaaagcagtaaaagactgaatataatcttttcattgattcaagaatgatctgttacagattttttaactatttatacttatactccagcaaagctagctgtaatacggctgcaccattttctccctttactaattacaacttaatgttatattacttttgtaatttagtaataaaatattaagatttgttataaaataatataacataatatagaatagatgagaagaaagaagaagaagatgaagagagaaagagaaagtgaatgagaatttttgagttgtttattccgatagggtgaacccttatttatacaaatacaagagtgaaatattaagaaactaagataagggaaactaagaaaacgaagaatgttgattacaattaatggtaataaataaaagatttggacat

SEQ ID NO: 300905 - DNA, 5978 bp, Cannabis indica
tttttgcaccttttgttctaatataatagtggattaataaaaatatgagaattatcccggatactattttttaaaattatggtttgagaatagggatttttatacatttttttttgttgcaatttaggttgcagcctaataggagtttctatataaaatttcgtaaaaatacaaaaaaaaaaatgaaaaagccctagaaacatttctaaaaattattaaaatagtattatattcttatttattatatattaaataaacaaattttcttagttatgataaaataatatcataataaaataagaaagggaagatataaagaatactatggtatgatatttttttgaggtattctttttcgttccaataataagtattaattaaaaaatactaaaaatatatccatgtcatcaaacatccttcttaagattgagacacataggatgatataataaactattttttagagcatattgtgatttgtcacattatttatcaaataaaaatatcaaattagatattcaaatgtactaatgatagtatttatgtaccattacaaatgacacttcttactgtttgacatcttataataccacctaatatttttttaagccgaaataggatctttatgctcatacataatatgtacatttttcggtattgattaaaaaaaaaaagcttaattctttcttttttaataaaatgtaacaataaacaatatatattggtaattaattttgattattatgtgtaataatagggagaagcagtacaagattggcgtgagatagtcacatatttctcgcaaccgcggcggttgagagactacacgcggtggccgaacaagccggagggatggattggtgtgacggagcaatacagtgataagttaatggagctgagttgcaagcttttggagttgttatcagaagggatggggttagagaaagaatccttgagcaaagcttgtgtggaaatggaccaaaaagttgtggtcaattactatcccaaatgccctcaaccagaccttactcttgggcttaagcgccacacagaccccgggacaataacccttcttttacaagaccaggttggcggtctccaggccactcgcgatggcggtaagacttggatcaccgttcaacctgttcaaggagcttttgttgtcaatcttggcgatcatggtcatgtgagtatttttagtttcactaccctcattacttaattttcttctaaattgatccccattgaaatgatcaaacattttattcaatgcagtatttaagcaatggaaggttcaagaatgcagatcatcaggcggttgtgaactcgaattgtagtcgattatcgatagcgacatttcaaaaccctgcaccggaagcggtggtgtatccgttgaaagtgcgagaaggagagaaatcggtgttggaagaaccgatgacgttcatggagatgtataggaagaagatgagtaaggatgttgagcttgctaagctcaaaaagttggttaaggagaagcagtctcaacacttggctaatcttaacaataaaaatatttcccaacttgaatccaacactattgataagttacttgcttaattaaaaaaattatacatataaaaatatatgcatttgctttaaataaattgttcgagtcgatcatgaattttgttttttccttttgaatttgaagatgtaatgagttttatgttttgaagcttataaagttctctaattagaatatcataaattaatccatattaaaataataaatttctaaaagagctctttactattatgtcttacatagctaaaatgtaccataaattaaagttatttaaattgaaaaccaatcaaacctgcaatttttgaagtgttttgtaaaactggttactaatcttttatttcaattccaaacttgttactaaaattactactaatacaatggcaccattctttctattttcattttattttcaggtacaaagctaaaagtatccaaaaaaaaaatcccaaaaaattaatcaatagggcattaaattcggatacaattcaaagaaacttacaaataactaatcatgatccttaattagaacaacatcccttaatgtcgtccttgtcgtggtggtggtgatcttcatattcttgatcactgtcgtcttcatcgaaaggcttctgtttatggaaaatacaacattttttcgaacttttcttctgcataaactcgttgtccacagtcccttctttccaggttacttgctttttctttcggttaaggcgaatcgttagagtatttgacttctgcggctgactagacgacgatgaagaagatgttccctccggattctccaatgtaatggtggcagtcgatgaacctacagctgctctggtggcagagctcacaggtctagccatggtgtatgattatcttctgttaatcggttgaaaatgagaataaaaatgacaattttgtgatttcaacacagcttctgactcaatcgaatacttgtgtaatctgcaatttcaacactcatatgagaatctattttatagcaaaatcaattaacatataatgataaaacagaacttcaaaaagtctcatataaataatgataataaacttcaaaatcaattaagtaccagatacaccataacctgatattaatgatttcttcctaatatttcatatgaattaataatgataatgatattgtactaccttgctacttactcctatagatacaaaactatggaagtattaatcaaagcaccaattgaagagatattgagtagctaataaaatttagactctggttagcaagaaaacataaattagaagataataatgcaatttttaggtttggaactcatttaagaaacaatttgctgtgaaatctacagtaatttcccagttctttctttaacaggttgtcattttttcaccccggccccggaacaaatgaacagtaaatttgtctaaatttgttggatgtttgatgtgatctggagactaaactgtgatttggtaagtatcaatgaatcaaaagtgaataaattacaccgaatgaatcaagagccgataaattacctctatcggtaggggcaaaaacacatgcccccatataagaattctcctctataaaagtaaaattaagatccctttcgagaataaatcatcatcgataagaaagagtaaaaattcttgttaaaagaccagagcaggtcttcaatagttttggggccataagtgtcacccaatgaagcaactctagcacctcgagagtgagccttaactgaaggtagctgacacgcatcttcaatctggacaacataacttttattgaaaaatcagattcaaaattgagcttcggagaaagaccatgtaatgcaaatttggcgtaggcaagtaacctgacccgctgtgaagcacccaacttctttattacagatctcagtagaccgtctgtgcgtagtattctaaggaaatcgggtggcaaagattccataaatgaagatatgtcttccatctttagagaagtcagctcctttttcaagttacttttctccacagctgacattctcccatcaagaactcgtttactgtcaatagttgtccccgtaaagatgactggaaagtatctaaagtactttgcaacaccgaattgttcccccaatagcttaattttattcgagtctgcaataagcagagctctccaaagttcacaatattttaacctgaatccttcgtctaactgtttatatattccatgatctaatagaaccagggaaaacccatgtggacctactggacaaactaatatgttaccagggtgaggatcaccatgcacaaaaccatggacgaaaatcatctcagcaaatatttccaccaatgcttttgctaccttggttggatcaattccatgctctttcatatataccacgtcatcaaccttctgtcctctacagaattgcatagtcagaacctgatcggttgtcaaatcccaaaacacacgaggaatcttgagcgtgttgttgtttttgaaattaagggcggttctctcagaatttctagcctcttgaatgaaatccaattcaacaattatgtctttcacaaattctgaaaccaaccaatcaaacctgtaatcagggaaaaaccacgaaacagatgttgaaaggaacgacatggttgttatatctatattcaactgctgcaacaacccagggtactgaaccttgattgctaattcttgaccatccttcaaaacagcgcggtgcacttgagcaatagatgcagcagcaattgggttttcatcaaacgatgaaaatatttctgacaaatcctgtctcaggttgtaaattagtacctttttgatagcttcaaaagggtaaggtactgcctgatcttgtaacacagatagagtcaatgagtattcttttggaacatttcgcaaagcggcaacaagttgaccagcctttacatagaagcctttattggcttcacatagtttcaaaattctctcagccgagcgcaagtgaacctcagataatttacgccgataatcatcagagtccattggtgatctacgcaaagaaaacttgtaatcgacggcagtaagagtgatagcaaagattgcacgagaggagcgaagaatcccatgaattgtggcacggattttctcggggaagatagaggactcgggagaaaatgaagaataatgagaattgaagtaggtttggaaagtaaggccagtggatgtggcagtgaataagaaagagtgattttggacttcagcattttgtaaaaacggttggctggttcttcggcttagagggtggcgtaaatcgagagttttctacaactatgtgggggggcttataataatacatacattggtattgagtgttggatatgtattttctctatgtttcttctgaaataaatttcaaacagaatacagagatcagagagaagccttaggtaataagtttgttttgaatttggctaaatgagttagtttacgacatttacctaataaactctacaaattaagtcctaaaaaaccagaactaaatccaccaaacaagaacaccagattttcttccaagttcaatcttcaatttagagatttacaatccagtgtctgttaaaggccaaattataacaatccataacgcatcacataatcgttggaaattcatcaatatctaatttaaacaataaaaccaaagaaacccagacatcaaactataagatcaaagctataacagcaaaaaccacatccacaaaattaaaaataatcagataaaatcattaagaatcccaaaccaaaaattaaaacccttgaacagaaattaaaaaggcccaaaatctagggtttgggttcattaaaatcacacacgataaatatgcaaattacagcaataattcaagaaaatatatttatataaatatatgcataacgcattggaatggagttcaaaatcatgataaacaattagatgttagaatgagaagaagagatgattaccgtgagaatcaaactgatcggagaagcgaaatggtttgtcgaaaagtgggtaagtttttataaattattaagtaattaacatagttgcgattttaaatattagttttcgatgtttaaacattttaatttattttaattatttattaatttattattaagtaattacgaaaatttaaaatgataaaaataaaaacataaatttaaaaagggaaatttgattttatatgcttataaaattaaaaaattttattattaaaccaaaaatttaaacccttaaaaaattatgcttttttttttttctaaaactccaaaaatatccccctccacaattctctctctctacatcatctctctctctatctcacatcccaaccgcccaccctcaccaccacctccgaccctcaccgcgacctccgaccacccgcaccaacaccccgacccagcctcactctc

SEQ ID NO: 300906 - DNA, 3703 bp, Cannabis indica
gaagtcaatctccattgactcactggccttccttcccaactgcctagtcgattatagctccagatctaccattgacggcctcgatgtctcaaaatcaaaggccaggaggcctgtggtggcctctgttccatgatccattgtcggatgggagatgctcatcgaactctcaccatgtacgacgagggagctactgagctggaaaagaagggagcaagagggaaatatgagtcttcagggttgggcttttttggagttctcgatttcagggtctatttggaccatctaccctgatgatggcttgttctagtgtgttagcgccaccgtccaagggaagacagagagagggaaggaggtcgggtttcagggttgtgaggtttcaggggttgggagtgcaggacctgatgtccgcctaaagtgggaaggccagagaatggtggctctgatcttggttctggcactacacgaaagaacgaaagtgagagagagagaggtatcgagagagaaaattagggtttgaaattttagtatttttaaattttctacttatgccccttcaaattttacccacagttatttattttattatttcatttaatagctaaaaaattatattgtgactaaaaggttatcactaaagataatttttttagtgtgttttcaaattggattaggttataattatttgtgttcatttaccttcagttttgatttcaagttcaattattacttctaccattaattgcatctatgttttgatcttgaataagaaatttcaagtgatcaatttatttaatcaaatgtttgggatctattaataaattataccaatgataatatattacctgataaaaagtattggcacgcactcttcgagtgagtactaaattacaaattctaataaaatatttttttaattctcattcatttcatagataatccatttgtgaaatagaattacatatttatactagttaggatatattaacaatttactaattagtccccataccacatttatgtaacacttcaactactacaaaaaagacatttcctgttagtaaaaaaaattgatattttttaagcaccaacagtaattaaaatgagtgactgatatccaccaaatgctcttgtatgttattagcgtaagttttttaggatcgatcgatatggattcttctctatttataattgatactgaaatgaaaacacacgatttggcttgagaatacatatcaattttatatagttatttatatagttggcgtttggtaatacttttttaattagttttctgtttttaaaattgaaaaagtgaaaatatttatcaaaaacatgttctataaaactgtttttacttttcaatttcttaattgagaatcaaaattttaaaaacaaaaaaaagtcactttcaatatttttttaaacagttttttttttcttaatcaatattttggacttcgatcagactcagactcaaatccccccacagccctggcgctgaacctggcctctgatctgaacccgaatctgaccctggacctagacccgacgtaaataaaatcaaaaaataaaaataaaaatgaaatttacagaacacacttttgtttttctgtttgtaaaattgaaaaacaaaagtggttacagaacacatttttgtttttgaaaaagaaatttttgaaaacaaaaattttactttcattatgtgactaaaaaattagaaaacaaaagtgttactaaacaacaccatagaatacaagaaatgttacttttgccagcacaaaaagttggtattgtgctggtaaaatagaaattacttgtgatgtgttagcaaaaaggggttggcaaatcaatgttggtattagaacttttgccagcataaaatgaaaaatgcgggcaaaaatgacttttcccaacgtgtaaatgcgctggtaaaagttagattttagtcattgcaaatgtatgttagtaaaactttgatctctttgccaacgcagtttgcaaaattctctctcttagatgcaatttgaagtcccaccaccaccgaaacttcaccgtcgacgaataaggccctccaccaccatccctccatctcagtctctctccctccttgctctctctcgtccgctttcactcatccatacaacaaaccaccaccgacacatatttagggcttctcgtctctatcactcatctctttcttgtccgaatggcgagccactaccaacccacattttctttacattcgactccaccgattatatttaagatttatatatataaattattgtttaggtatatgtgtaaatcgattcgtgtaaaatttgaaatctatatatatgatcttgttaaaatttgaaattatgtatgaattttttattttttattaatgggttatataaaagctatgtactaaatttgtagcgatgaacactaaatttattaatttaaaatttgaaatcatgtgaaagattttgagaaagtgataaaatataatcagggtaaagaaatataatatacaaagaattaaattagaatattttttacgtggttgatgtgttaaagagtcttagggtacatttttttaagatccagatataaatttcaatgcatatctgaataataagatatcatctgtgaatctgaatattaaaatatttagagtgttttttttttcaaatctgaatttatttttttcttcaatatttttaattttataacgataacattaaagtaaattatatttattttaaaataatttaaatataaaacatgattaacttttaaaaaaggttcaagtattggttaattctttaaaagaaacttatattttataggagtaaaaaaattatttaagactacttgtaaatttttagaaaattctgaggagtttacaatataccagaaataaagtttaaatattttattgcattattagtgttcacaccatgcgttgagctgtcttgtgccccgcctgaacggaggtacggtgattcagcaaaattttggtggcggtggggaagagccttcatacccaagccataaggcttgacaatcaggtgtaccagcgtgtcaaagagacgaggacaaaacttttcagagtgtcccatcaaaccacaaatgaaacaaaaaattggtacatttttataacggaacgtagcataaaaggagtcaccatcacacttacgaaatttcattcttcttttcagtgggagttcaagggaaagcttaactcgtaccgaaagatattcgtgccacacccccgtaaaattattcgatcggattcgattcaaaaaaggttcccacataatttccagcctgcatcctaagcaactttcatggtcatgaatccagtttacaaatcgtgactttgtatccacaaattgagagtgttaaggatccgtgttctagggttgtcaccttcctttagggatgatataataatcttttttcgatcataggtccacgggctacccgcgatgacacgatggatatctaactcgtggtaaaattggaacaagaatcggttttaatcaagctacttcgcatacattcctttatcaagtttccagagatctgccattatgttttgaaaaatacgaaattcggagactttccttgtgagaaggcgtccaatgagacaccatctggttgttggaatttattttaccaggatcttagatctactcacaagtatgttgtttaa

SEQ ID NO: 300907 - DNA, 1608 bp, Cannabis indica
aattctgggaagacaaaacaggagtaggaagtcctgaacttgtcgttacattctctttcacactcaacacgtcactcttaaacttgttctttgaggcctgaccaccataaagagctctatcttcagttgatacagttggctgaccgtcatccaaagccacacgagttgtttggccttcatgactcctctgtttccacattgacaatacattattcattttctttttatttgctagaatactgctttttgacgccaacttaatctcttttaacttttctttctcttttttttctgctgctattgctgcagttgcagcagcctggacaacatctggtaatgatgatcccttctctgatattgaggtagtagccggagcagaaatcactactttcctgtcattagaaccatctgatattttggaaagctcagattgactagccatcgttttgttgtcattttgatctgtgcaagggatgtactgttgtgcttggtcatcatacgaataccaaatcccattattactatcataataaagacctgtaaatagcacaatagaataagggaatgatgtaatatatatttctacgaaaaaaaaaaagcattttaaaagaaatattaattttaaagttcctaacaaataaaaccaaaataaacaaatgaaagacttaaaacagtatttttctgaagcatgaagttatgatagaaactcttgtcaaagagtgagaataggttatattactacttcaaaaaggtatcaaagatgctgcagatgcatcacatgtagccagcagatatctgataccgaaagaaagcagagagagaagttaaaaggaaaatggatatgccaaataggaaaagaaaacattgcccgaaaagttggcaagaattgtaatagttgtgactccttaattactttgattaaaaagaaatgatgggaagtcatatgtattagactataagacataaaactacataaaataaatattgtttttctcttcctcatttgtactagttgagagtcacattttaaaaatattttgggccttattccataatcgcaagtgcaaaatcagtgaaatatttattagaaagaaaaagatacacaaacgcaaaaggaaggagaacctgtatttccatcatagtagaagccagaagcagcatcgtaataatacccagatgcttcatcccaaacaaaaccagattgtggagccgagccctctttttggacaacaatatccccaccactttgccccagtcctccaacagattgcttgtcatctggattgtattcttttggtgcccatccaacagcatcatactatacttaaataataagctaattagctagaaaataaaacatcaaacaagaaacatagtttgacataagtaatatatataatagatatatttcattgaaatattattgttacttgtgccaacactgttgacacattatagggcattcatacaagagtgggtgtgctccacaacttttgctagtattattgcaacaatatttaatacaaggtgtagttttgtttacaatatatatatggaacacttctcagtgagtattaccattgatagttactaaacaaatttaactat

SEQ ID NO: 300908 - DNA, 4385 bp, Cannabis indica
aactaaaccattagagaaagctaaatattaaagttatatttgataaaagtaaactctgccatctactggtgatgatgctaacaaatgctttaaactctgaagttccaatgttgcaaaatatgtatttgtacaacttttagagaaacaaatttaacagaacttaaatgaattttctttctgttttctagaaatatatattgacattgacataagaaaataactcattgagaaaaaggatttaatcaggcataactagttttttcaagaaagagtcgcacaaaaaaaaagagcttgtttttctactaagaaaataaacatgagaaaagaaaattgaaaaggatcatatagtttattaccaaatggaaacatgtaatttctacaccctcagttggtaagccatctacatcttgaccgtcatctgcaagacagtgagaatcaattaacagctaacattaaatgatattatatagtatccgtacagaaaaataccagtttccccacttattagtccatgtgggttaaggtaccaaatatgaggtccttaaaagtaaaagaaaaataaataaataaaataactgaattcagcaagaatggcagtatttggcatcatctatctcgaacgatgtaaaagaaggatattttagaactctcagatttctgtttttctacagtgatttttttcttttataaaaagaaaatttggttcttacgtgggataccagatatttgagatgtttgagggttttgctgtttaaggatttcctgaagttccctcctaattttcttgtgagggttttgtgtgaaattctgaaatgtgatgtcagtttagtaagcttttccttttagagaacacctggtcaactcatctagtcttgttatatatatattcatttatctttttgaattttctcaacatgtaaggaaaacatttaaacagtaaaagaggcatacaatactttaaaaaagttttacaagagagtacaaacaaataaaaactggcattgcctgtgcgaaaatcaaatatatcatcttccgagtagcaaaaccctcctcgtgctgtatagcagaatctgcaaaacaggtaacgaataaaaattccttctcacatattttaaggatgaaaaaaaaaaaaacaacatgaaagatgtcaatatacatcaaaactaagctcatcaattacatcctacccgctatgtactaaatgcatatgaatctttgcgagggcataatcagcagagggaagaattgcttcaacttctccatcgcttacctaaaatgtaacccaaagtaagcaataaagtcaaatattctgaaaacgatatatgcatatttatatatatatatatttatatatatatatattataattatcctattttcatcataactatcatatgttgattaacaagacttttgataaaaccagccaaacttattcattcaataagggaagggggataacaacctgggtggtgacaaaagaggttattcacttccatgatcgcaatttaattacgagtttttctagtgctttaatttgaaaagaaatttgttccacaatcaataattcattctcaagaagataagaaaattaaaaaatttagcaacacgataacatacagctgaccagccttcaatatttgtgctcttcaatatctgaacaggcctgcaagagatataatgaagtacatattaataggcagaatagcatagcttcttatattttggtatttaaagcagtcaattaagatatgttacttacatgtcagctggacatagcaacatacaatcatcccctcgcgaacttttaaatatcctccttataacacactccaaaggataattattggtaggatccacctgttcacaatttctttagactttttcaaagttcatataaagattaaaaaaaaaaacaaatattccaaaatcaccaggaagtcaaaaaaaaaataaagcataaaatcaaatttataataatagtttatgttcacacactatacatatagatgttaactttgataacccctcaattaagtgggtttaattaacgagagtcaagaaagcaactgaggttgagtctagtggctgaagttgatctgaaccgcattgacacggctaggttgttagggagtgatgttttaaggttggataaagaagaatgatctaagcaagacttcagtaaattctgttttctcatttggaggcaggcagattctcatattttcctaaacttcttctttcatcctttcttgctctgcaccaggaattctaagattttcagtaaaacagaagacttccctcaatcaaaacatgtcctatttcctgttcagcattctgtacttgtgtgctagtttttcactacacgattgggtgtctgtcagagttatacagataatgcttcacagtaagattttttttagtcaacctaccagataatagaatacattgcattggagagggaataattattttctagagcaacataaataatgactttctagtttcaccaatataaaactaaagctgaaaacaaacagttcttaaaagtattgggaaactgacaagagtagggtggataggtttgctaaatcttgtggagggagaggcagaagggctaagaactttcaaagcattcttcatcaactttagaaatacaacaacatattcttctcatttgacttctttttttccatttttcatttgtttaatttattattttctatttgctcctggttccataacttaaattgtacaagagattataacctacaacaacgtctagtttattataattattacaatttttcctagtgaaaaatattacttttgcaatataccctatatgaacttaaagccaggtgcttactgcactttaccaattcagaatacatttcctaataacaatgattccatcgagcagtacaataaacaccctatggcctattctataaacattattatattttaaataataataataatataataaagaagaaggaaagaaaatatatatatatatatatgacatctctgttgcaccatttaacccatataatattttcaaactcaatctctcacatccctacctgctcaaatccagagaaggcctaattaaaacaaaaccacatgcaaaatctcatttcagcaagttctggtaactctttctcttcatgggcaaccttaaaggggtaagaaaaaggtttttccattcttttgagtgacagataagtgggggacgtcgaacttatagagtacaatttgatcacagtaaggaaactaacttgtcagagatgaagataaccatgttggtatccttcatgctgggctaataaacaataaccatcttgcaaattatttcctagctttgatcaatcctatagaatctacagacaaactacacgggaaagtaaaggaagaatcatgtttgtaataccattaacttctctctttgtatgagtatggttagtaaccattgtgaatttttttatggaaaggaaaacaagttattccaaccaatcatgactaaagcaaacttatcaatcaaaagttgagcataagtgaaataactcacaatggtagcgattcgcttatgggaagccattagaacctttccatggtcatccaccaagaacccagctggtggtttcggcattggcgtagcatagttacccaaagagcgagaatccgagccggaaatcgaggcctcaaccccaggcgaaacagactcagacttgacaatttcaacctcactgaagctcaacccctcggaatcgtcgatgtggtcgcgttggtcaatgggtcgcttgggctttttcttcctcttcttattggcggaagaggaatggcggttcttctcgactggaccagtttgggacttggcggcggcgcaacagagaatgggatagtggtggagttgattgatatggagtgaggaagggatagtgcgttcatggcggaaagagagggagcaagtagtgtagtagggtgtggtaggggtgacagagagagccatttctgatactcaacagtcaacactgtcggaggggtttaagtttaactgaagaataattaccatttttagactaactttttacattctttctttaaaatatctgattttttaatttttttcttaaaatataatagctacggttataaatattaataaatatatagatttttaagtattttatttattattattaattgtaattaatattctattcttttttagtttcctaatatttaattttcatatgtgtataaataggagatcacttattgaaataagatactaaaaaaattctcataacttttttattttctttctctaaattataatattttatggaaatttacatatatactgtttttggaccaaa

SEQ ID NO: 300909 - DNA, 2819 bp, Cannabis indica
tgaaaaaaagaataagtagttgaaataaagtgacatatttttgctcggaggttttctactaggtcaaagagttggctgaactatgccacgtgtaagggccacgccatctgtgcaaactttaggataacaagcttagttttaattcttgcagatttttttttgatgaatcagccatgaaattcattactccaaatcacttttgtacaagctaagagcaccttacaaagaggcctcaattctaactatttacaatgtattttaactagataattacttacaatgatccaaacaaaataatatcttttttgctgtattttttacggcatttacacatgaaattctagttctcactatttcttgagtttgttgcactaatctacacgggtttgctacttcagcttccagaattttccatttctattcgaccagatcatgtaaacgagggctggaatggcaacagagtatacatctttcttgaacctacttgtttttcatctctctatccatcttagaatgccttgcaaggaagaaattgctgcctttcaaccaacccattccttaatctgctgtaggcactgttgcaagaaagtgcattcaaagaacaagtgttgagttgtttcagcaactgaacaacagtacacaattcacatcatcagtaattttgaacttgtggagcctctcccttatttttagcttgtctaacattgctatccaattcaaaaaactatgctttggaacatttaatcgaccccatatttccttacttaaataacagttcccttgaacttgatttagtaatttatagcctactgcaatgttatatgaaactagtgagaattatatagaatctattcataccttgattctctctttgatttttacaattattatggattattacttagttacacttttatttataaaatcctttgattaacaaacattagcatagtgattagaaaccacgtaacgtaccatatatattagggagttacaagtggcttcgttggtcattgtgaaacttattttaactttggctgcaatccaagggtagcctttacatcaactagatgtaaataatgtatttctctatggagatttacatgacgaagtgtatatgactatccctaatgatacaaatcaatgttgtatgcaaactatgaaaatgtatttatggtctctaatcttttagaaaatggtgtgaaaaattctcaattgttttaattgaggaaggcttagttctgctactaatcactcactgtttatgagacaacaattttatcatctattgatttatgtaaatgatgttattttgaaaagtaataatttgaaagagttataagctctaaagataaggttagagattttataataatagaagaaaatcaagatattacaactctattacaatataatacaatgatcaacaaaaagattaaataaatgttacaacacataatatataatatatatacactatatatattatatataagaaaggtagaagagatgaaaagattatctaatattatataacagtacatatatataatatgaagaaatatatatatactcactcacaactttgagtgtagattagtgggaatcaccatgacttggtattaacctttgtccgaaagcttatttcccctatctctctcatagaaatatgggaattatcaagcccttttagggttttctaacaaagtgctttcttgatagaaaacttgatcatcaaaatgagcacctcagacctctttatatagtgtttaggatatcaccatttgaaattcaaactcataatccccatagatgttatggactcaaatgtaactcctatacacaccataactcctatagcattaagaatttcaaattaagatatgtaacatctttttacactcttaatgttggtgataatggtggaggttactcatagtaacaagtaactccccaaatgttacaaaaagatgacaactaatatacattgtcatatattacatattattagtttattacacatatttatcctatatattatattattataaataatataacagataatattgaataacaagttaaaactgcaaggcttgggcaaactaaagtattcttctggattaaaagtttctagatgtgacaaagggatcgttttatctcaaagaccatatgaaattcaaactattgaagatttagggtatcttgggtgtaaactaatgaatacccctatggaaacaaatcactcgatcaagatggcgaagacaacttccaaacccaaccttgtaaagaagaatattttgtaaacaccaatatttgactataaccaggatagatctatcctattcagtcaatttttagttaacgcatgaaactagcactgagaatcttacagtgtgtcgaagcttttccaggacaaggaattttcatgtcacctaagtccaagattagattagatgcctatactgattctaactgtgtagtttgacctgatagtagaagatcttcaacatggtttatcatcttacttgggtaatcaatctatctcctagaaaaataagaaataacatattgtttctagatcttctgttaaggtagaattcacagctatggtccacatggtttggattcactctgttctcactacaaaattttttacttttagtcaaaacaaattttgtggctaaatgtaaaaaagttgtaactaattataaatcatcatttatatattgtggataaaaagtctgtggaaaaaggcactagtcgcaaatattacaatttgttatgactaaatgtatttttagtcacaatacttgttg

SEQ ID NO: 300910 - DNA, 1099 bp, Cannabis indica
tctttcttttcacaaactcaaatcgatttttctagttctatatatctatttcttcctacctaatatctaaataggttgtcctcctcataatagtactttcaatgctcaagatgtaagtagaatctgacacgtacttctttaatatgggaatgtgaaattaggacaggaattaaaccataaacatactccattatcgtcctatcttatctacctttctttctaaatctctaaattttcttaggagaataacaaagtccacacttggaacctattatccctatgtttcaactcaatgcaacttctctgtttactcttggagacgagcatatgggctcaaatcttttcaatagcctcattagttctctgaaccttcttgatttaatgcacactttctcactggcttcattctagtgaattagtctattttcgctataaaacataaacccagttagagaaaataaatttattctaaaacactcttttatatgtcatacataccgtagacatatcttcaattatttgagtattcctctcgaattgtccattcatttgtggacaaagagaactatattaacctttaatttgatacctatttgtttctcaaaacatacagataaatttaaaatcatgacttaagtcattcgactttggaagtccatgaattccaaccatctccttaaaccctatttcaatattttgactcactacacatgtcatccgcactgacagcaagtgcattgacctagtgtatcttatccactattatccttgtggagtcataaaactctatagtcttcagtaatcctactacataaatccataattatatatcttccattttcatttggggtcttctaagactgatgtaatcctgctagtcatccattctctacttttatttacttgacaactaatacatgttgacattttttccaatcatatcattcttacaattctcaaccactaatatattctcgttccaatatacattcttattctgatacctcgtgccaaacactactctcagttgattcctagaacgttactagtgtaaagcccgcttaggttaatttggaaattagcagttatttatgttaat

SEQ ID NO: 300911 - DNA, 1298 bp, Cannabis indica
aagataacatatttacagtatgtctggtaagaagtatccaaggaaggaaggattgaatatgatatgtaggtgtggattccaaatccacagggcacaccaaaattagtgggattgtaaaaaaaatggaacaccttttcttcctctcaattttaccaaacaacttctaaggatacattatatccacccactactttcccttttccgcaccttatatcaatccatccttaccattttccatccatcataccaaacaaagcattaatctagaaaatcttattggacaaacaaaacctgttttgcttgatcataatatattttaaattcaatcaatcactcaagaaaatcatgctcttaaaagaattcaatagagttggcacttggcagagacttcccaaggacaatcattatctcactctggctcaatcaactcttagatagcatttggttagaggtaatgaaatatggaatgtcattccaatggaatgactattttaaaatggaatgaaagactattccaatgtaagaaaatatttaataatttttacatcaattttttttgtatgcattttaaatttgattctattccatttctattcctattctcatttccatttccattcccatttagatttttatacctcacctctacattcacacctctacttcctgggatacatttaccataaaaaaaagtgaaattgatgaattaattttttattatcaaacttcaaattagacacatttactacaatatagataaatacaactctgaattctcattcatcactaaaattttatgagcctatacatatatatacatgtttagagcattgcatgaatgtgtgtccaaaaaaaaaattgaaaataagaactcaaaggttgaagcaggagaacaaacctctggtagtgatgtccttcggtggtggttcgggaattcatttcatcggcgacaatgcggattaccagttgtgtacaattaaagccaataaaagggagcacttagccagggatcggagaggctctgggattttggggaacggcgaaggcattgatgaggtccctttgggcctccgacgatgagattagggctctgccggactgggcagtaagctgcgccggagggagagagagagagagagagagagagagaaaccgtgggaagaaactaaggtaaaaaattaggtttaagttaaagatttttcttttaatctattattatttattatttatggaaacttacaaaaaatactgtaattttgattaatttttataaaaatattgtcacacgaatttttttt

SEQ ID NO: 300912 - DNA, 2122 bp, Cannabis indica
ttttttttttttgtaaaaactccattaatcaatacatgcatgcctatcttttctactgtaatgatatataattaatttggtaatagttgtattagaaagggactcagtactgcaaccctcttatcattaattaaattagaagaaatcaggtaaggcagatctactatatattaatttaaattaaataaatccagaaataatactcaaatgggcagagtatactcaaagaagagcgagtaactaactctcaactataatttactaaagtcgaaaacaagcaagcaacgtacataacggttttgatcctaagtcaaacatcttgaactagagaatccaaaaacattaagtcaaaaatcttgctctctctttctttttctttctcagaaattccacatttttttcctttctccatttttctgtctctttctcagatctttgttgtctttttattacacattaatcgattccaagaatggagcagaatcgtagattgtttggaaatgtagtgagggacatcaacaccttctttctcccaaatcaaatagcagcttccattaacgcacttcccaatcctgaaagaagcgatattatgattcgtgacagaattttcggaccaaatttcttcatggttagctctctattcttaaatgacggtcgtgtcatcattaaagggaaaaggtgggatttgttcatcagagatcgcggaatcatagttggagacattctgctcttgaaactgcctcgtaataacattcccaacgtcatcgatatcaccgtaatccgaccaacaatattgttcccacaacaactaagtactcctacttatcgtaaccaaaatcaagttcaagtcccatttatctgtgtgaaaaatttgattgaggcagatgtgagtactgatcaactggagctgcctagagagatagagtcaggaataggcgtagcaacattacgacgatttcatagtcgtcgatttcgtgttctagttgtggaccagtcatttttgaatatccgaatacagacgaggctgcggaggtttgaagctgagaatggtcgagtgttattgaataaaaattggtcaaggtttgtgaatgcgcgtggcatccaagcgggagatatgattgtgctcttcgtcgatcttgctcgacgtgtcatcttcatcacagtctttcgtgccactcaaaatccaaatctatttcaagatattgtcattccacttcttccaccaccaagataaagatcaagattaatgttttgggcttgatttgaatcttgcaacttctttctttttcgattttaagcttggatatttgcatggttctttctttattctttcatactttgtctattattatttctattttgaaatgatactttgtattttatttaagtcttgcaaataaatggtttaattagacaattagtacgtatgtagtgtgtttgtttgattatagattaattaatttcttaataatattaaagaaagaaaaaatgttgttagaagaggacttttattataattttatttggatgattcaaccaagatgcaggatggaatcataataaagtaatatatgccatttaggtttatattattttgttctagactctgttttatgagcattttatgaagatcaatcatatgagatgagttgagtggagtgactcaaatgaccaaacaaaatgttgcttggttggattttatgaagatcaatcatatgagatgagttgagtggagtgactcaaatgaccaaacaaaatgttgcttgtttggttatactcactgtaagaatttgtgagttattataagtaatgagaatttggttggttataatacactctcattattataagtaataattaaaatggatgaaaggttagatttttgttgttttagaaaaaagaaaaaaaaagtgagttaatttgtttggttgattaagtttaattttatcattgtatgttgtatgtattgtaatattatgaaaaatcatagcaaagtataaatgctaaacaataaagttaactgaaacaagtcaatgaaattggcatagtcgtcggagttgctgtcagcaccggaaaattactggagttgctatcggcgccgaaaaagttatcagaattggca

SEQ ID NO: 300913 - DNA, 4571 bp, Cannabis indica
tttgaaactttaaacacagtattttataaagttggtacagaataaatgtaaaaaaaactccgtgtcacattatttttatgaacttttccctatcttatattatttttgtaagtttctctaaattttatggaaatattaatttaaacttaatttatttgaaatatgaatttttagaaatatgtatttttaccattaatcatagccccctgcaagtttattgctagtccctagcaattcaagcacagaaaaaaaaaatttatcgagttgaataaacaagttaaactaagcaaaactatccaagcattttttaaatattcgcagagagttaaaaatttctatcaacgttacttgagttgtaaatccagagtagtgtgtgcaccaaacttcatctatttcttcacaagtcacaacacagatattgttgaaaaatctcaaagatctcaactccaattttctacaggtattgaaagtatctgtattgaaaggataatactttttagagttagaaatgtaataattaagacacaaatgagagagaataaatttttttaggataaacaatttgaatgaatgagtttttataattttttttttttttttagtttcaaattatttatatatatatacaatactagctattatagtaacatgcaatgcgtattgtttagaggtgtacgagagttactattacataattattaatcaaaataatagtaaacaattaaatctaatacaatttaattatatttcttaaatatataaaatttaatctagttttaaatttattcataaaaaaagtatatctaactaattttattaaacaataatataactaaataagttaaaagttttaagttatataattaattaaattaattttaacaaaaaaaaaaaagctctttaaaaccaacaattctattaaaataaagcactatatacaataaaaaaatgtcggtttcaaaattttaaaaatagagatattatttattgaaaaataattacatactcaaatattcaaatttaaataataacaaataatttgaaatatttttattcaaattcacataaactattgttatttaattaagtatgaaaaaaaaattaaaacacttgtaaatacaattaattcaatttctaaaagattatacattattttttttttttagaattaatcataccaatagcatttatacattattgttttagaagaagggcaattttcatcaagttgactaataataacactaagtgagataaggtaatatagatgaaatataataataataaggagagaaatacgttgctgatgagtattccaatacattgataataataagtgaaatagtgtatgtcaatatgtgtgagatatgatattaattacaagtgagatacgggtgaggcaaagagtgacatataacaacagtaaaatatagtaagggaacaaatgaaatacgttattgaatgatatgatacaaaaattaaattaaccgcggctatattgattagttatgtataacaaggaagttaaaccataaaaggggccgttgatttggctcaacacttttgatcatctcatcaattatttcatcactattgcatgaacccttaaattggtcactattatagtaaaattaatgtcttaattcacagtcatctaaatttctgtatatacatacgcactcttttacaaatcacgagattgggtcactaatacttagacaagatggttgatttggaagctgaaattacagccaccccagccttaaactctcccgccatgtccatctggaagagagctactataccaattactctcaaggtacgtatcatacacgcacacatgtacatatattgatggtttttatacaattttaattcgaggtaataaccatagactaacttgtaaatgtacatagtttgacgacgtcgtttacaaggttaaccccagcaaacgacgaaagttatcgaagtttacccaaaataggaaaagttctgaagacatgatgacgatcttaaagggcttatcaggagttgtgagaccaggcgaggtgttagccatgttagggccctctggtagcggcaaaacgacacttctaacagcattaggaagccgattattaaccgaaggccaactttcgggtaccataacctacaacgacaaacctttctccaacccaataaaacgcaccaccggtttcgttccacaactagacgttttcttcccccacttgactgtttccgaaactctagtattcgcggcccttctccgcatgccgaacacattcgagagggctgagaagattgccacagccgaagaggtgatctcccagctcggactgaccaagtgcaaggatagcgtggtcggtggagcgttattgagaggaatttcgggtggtgaaaggaaaagggtgagtattgggcaggagttgttgataaatcctagcttgcttctgttggacgaaccaacatctgggcttgattccaccacggcccaaaagattgtctcggccgtggcagaactcgccaaaacaggaagaaggacggtgttgatgtctattcatcaaccctctagtaggcttttctacatgtttgataagctgatgttattgtcggagggaaattctttgtatttcggaaaagggtcggatgttatggattatttttccggtatgggatatgcaccatccattgccatgaacccttcagattttctacttgatttggctaatggtaagttaattaatattttgaattattataattgtaattattacacgtacacatgcaataaataagtattagtacgtgtaatttgagtgtgtaaggattgtaacacacgagaatggtatgtagttactctgagtattaagtatgtacaattatatatattgtttggttatcattacgtatatttgacctgcattttagtttaaaataaaatataaagaactcgacactaagtcacactaactaacattatactatattcaaaaatttataatgtaaaatttcatgtatacttgtatagtataacttattaattttggatttcaaagaaaaaaaaacttattaatgttgaattctctcaataaaaattaaaggcacgtgtttcgttatatttacaggtttgccaacagacgatagacatgatgatgagggagctgagcaagttaagcagagattggttttagcgtacaagctgaatctgagtgagaaagtgaaggctgatattcttgaagtggaagaaataactaatgagtatagtactgatcagtttcatctagattcatctttagaggacaaaagatggtcaacaacatgggggcaacaattctccgtcttgtttagaagaggactcaaagaaagaaggcaccacaacttctctagcttaaagattgctcaggtactatttatatccttcttgtgcggactactatggtggcaatccgacatttcccaaatacaagatcaggtaaaatatgaataacacatttaattataccatataatttgattcatatcaaaattaattattaaaatcgcacgtaaaagtattaatttggtaatgataatacacagagtggactcctgttctacatggcagtattctggggattctacccagttactcaagccatatttaccttcccaccagaacgaaagatgttatcaaaagaaagagcatcaggcatgtacaacctctcctcctactacatagcaagatcagccggagatcttcccatggagctactcctcccttccgcattcgtgacaataacttactggatggccggtcttaaacccgccgccaccacctttctactcactctctttttcattctcctcaacgtccttgtctcacaggggctcggccttgccctaggcgccgtgttaatgaatacacggtccgccaccgcagtcgccgctgtgattacgatggcgtttttttctcaccgcggggttcacgtccaaaacgtgccgcgtttcgttagctggatcaaatacgtttcgagtagctatcacacgtacaagctccttttggggactcagtacaagaaaaatgaggcatacccctgtgaaagatcatgtggtggtggattagggctatgcttgattggggattatccatctataagaaaaataggacttgatggacaggcgctttcggccttggctttggttctaatgcttgtgatttttcgattgattgcttatatttccttaatgaagattggagtcacaaaagattaggtgtggctgttcatgatttaattttatgtttgcattagtgagataattttaggtgcttttaatttttaaaaataagtcatttaggatgcacatttattttgtttatgggtatcaggtatgacaccacatgaaaccgtctttataaatagggcgcgaatttcggtctaaatggggataaatataagagttggaatgggattcattttttattcccaaataaacatggcggggagaaggatgatactttcgggataatataaaccatgtaatttattaatatttttatatcaatatgtgattgcagatatactaattctgtc

SEQ ID NO: 300914 - DNA, 1900 bp, Cannabis indica
attatatttttagaatttttgaaaaaaatgaaaattaaaggaaataaatcctaaaaaatgaacagattcgacgtttggtaggataacgatccggacagcgtgtcgtccctcgcacgtacgtacgtccatcccctcacagtcttctaaagcaaccggttttgattaggctcggctcggcttaagccgaatggtaaaacgattcaactgcccaagccaagccaagccaagccaagccaagccaagagtgtgaggagaaggacagattaaatcatgaccgtccaaagtaatcgatatttcgttgtcggacgattgagaaacatgttacacatgatccacccacctaatcctaatgttggccaaactatacaacaccccattctttggatttgtgtactaaaatacaattcacatagacctattctccaatactccaatttaattctctacaaaaaaaaaataaaataaataaaaaatcctctattttaattagctaatattattataacaaaacttatatttattttttctctataataactttattacacacaattcaaaataactagattttgcttaaattatgaggaatttaatttaataataagacaaataattccttgctcttttattccttaaatattttcgcagtgtaaaatattcctcaaacaatgtttacttatgagattacttctatcaaatcatgatgggaatgtcgtacacaagtggttttttttttttttttttaaattgatgtttgccctaaaataattccaaaacacatttgatttacctatcttcaccaatatatatcacgatattcttatctattcaagagattattttatcaaagtctttacagatgattgtcctttgagtttttattaatcccataaaaaatatagaaaatatacatacttagaattaagacttaagagcaccgtgctcaaaaaattcaaaatttttaattcttagtgtggtgaatttataacttgaaaaagtttatgagacaaaattataagggggtcaattatttatgtgaaaaatgttatttaccactaatgtatcttcttaatagaactcatttttcaaatattacaattattattgatagctttatataccaaacacgaaacatacatgaaaggccccatatataacattttataatgaattgtgctgtacatggtactataaatagtgtttgatgtttggtatggtaacatgttggattataagttagaagaaaaaagttgaaaaagtgaaaaataaaataaaaaatatcaagcctaattttggtttatgttgatgaaaaataaatagacatcaatattaatatcaaaattgaaagaaacatttaggaataaatataaaggaaaaaagatagaattataatgagtacttgatatcaatcaataagaaatagttggaatgactataaacaaataaaatagagaagaaaacaatgggtaaacactaaacaccatcttatgtcatgcacaatatgtattaagtcattgttaatactgtcagacattatctatttctttattggtataatattgtctgttttaggtctaagccatcacagatttatttttggactcttaccgaaaaggcctcattctaatggagatagtgtccatccttatacacccaatatctttctcatttctagccagtgtgggcctttggttgtacacccaacaatttgttgggttttgtgccctaaataaaatctgtttcaatataatcagatttactaattaatataagatcagaaattacttttacgttgcatgattcacatgatttatttcatgattatgtttaatgtatacattctatcaagtctagaacatatataaatatatatatatttgttcatgattatagtgtcgtc

SEQ ID NO: 300915 - DNA, 4023 bp, Cannabis indica
tcccttcccatgtatactccatacatccgatactggtgaactttgccagtgctctggaaaggacataacacttattcaaggtgtaagtataccttatcgccgattatcatgccagtctaaatccagtgaactgacaaatcatggaaattaaatttttgaacatataatcatgattatattccactatgctaacgacactgtaatcatgaataaatatatatgttctggacttaatagaatttatacattaaatataatcatgaaataaatcttgtgaacccagcaatataaaataatttctgatctttattaattagtaaatcttattattttgaactgagttttatttaggccacaaaacccaatacgagcccattcaatattagtctgagaagttgctcccccggagatctagggtatactttttgagaattttaccttgccttttgctatatatttttgtgaaaactaactaagtcactttttttgtgcagctatgttgtccaatcttaattccatgttgaaaaggaaggtcggtggaccttttgggtaggagattctggcaaaggttcaaaagaaagacaataagggtcagtccaagcagaaacttcccttggctccgcccccagctcctttggtcgttggagatgaggttattgttactaacgtctctgctcctgtggttgttgttcaaccccctacaaagaagagcttaaagcctcctcccgctcctttgatccgtaaaacaaattagaaaacacctatgcctattacttctgagatgaaaaaggcaaatgacatgattagcttgtatcaggattgtgtccactctaagctaaataagaagtagaaggggtcagatatgatgcccataaatctcctagcctcgcccatctgaaagagcatactaaggtaatgcttttcttatcaattctacttacctttagtttagactataccatgtaaatcttattacttatttatattcttttaggtgaatctatagctcgactatttgtactctcagacaaaagttgtagctgcccaatccactatggataaggccaaactggaaaaagtttaaggccaagttaaagacaaggaaactgccattggcaaagtcaacaagaagttgtttgagttttttaagaatattaaaggattggaaaaccaactatttgatgcgccttaggtagacaaattaaaggctgacttcgaggttgagacttggcgggttaacaagctagttgaggagagggctactctacggacactcattcagaatttagagcagaaggtcaaggacttggagcagattgtcgaagactggacttcgaaagtagccaaggaaaaatacccacagtggccaaggaggaagccttggatgaggaaattaaaggtcatgccaatgaccttgagatgtaatcagagatcggcatggagctcttttttgacttttgaaaggccaaccccgaagccaattttaattacatggatgagaactgttgtgattccttgttgtaatagtgcaaggagatgaaggttgaggagtaagttaaggtacctaggacaaagaaaactggtcaactttctgataaaacttctcggtcactgatcaagacgacgttgcgaccacaaaagacctaaacttggcaactccaatggactaattctcatcctttatataatgacctattttttcttttaatacgtttttcgacctacagacctttattttattacactatgccgatagagcgacattttaacttggtttacttttcttgttgacacatggctaaccatgcgacctttaatcctgggctttaatctagcctttttatgtctattcggagcatatatacttagattttcatattttaaaaaattgctcaagtattttccatgtccacttacaattgtagttgcccccaaatgaccgagcaggctgttagactcttggtcacttgctaattaacttgagtgctcaataattgtctgctcgaacttggttcctcgacggaccttttagtacacttgtaggtagtttcatgacttttaaaaataaatacctaaaattttgcaagccatgatatataaatttgtcataatttgaacggtaattaatcgctttattcatttattgataggaatttgttgttactaaaataacttccatttatttgataataaaaaattattacatgatctcttcaaatcttatcaaatgaaagaaatttggacgattaacactacgcatttactatgcgcaaagtactcgcgacagtaacatttaaccagtttgaatgtttcatacattgttggatatatatcacccagaacaatatattgaaggaaataccatgcatccatgtttcagagtattctctacatgtcactttattagatgtcacatcactctgtaaaatttgaaatatcactcgtctttgttattctatgcatatatatcagattgtttaaaaaccgatttcaaaactataagaattttcttaaaatttacctaatgctctaaataattataatggagatcattgtataataatagaaaagtaataagataggttatgctaaaacgaaaagcgatttaaagattgcaccgaataattgaagttcctcttattatattttgtttgaccagattttgacacgcagaacgatgaatggacagcagtgaacagactcaacactatcatgccttaatacacaaagcatctattagtagttacacagcctatactcctctcaaaatttacaaactaatgtttctttttcttttttcgtaaagcaatatacatgcaatacaaactaatatttttaattcgataatattacttttttatgctaaacgcatctattgactacttatataaataaaatatcttacaatcacgattatttgctctaaattataataaagttgcacttctttcattttggtgatatatattttatattgatcttaatggtattgcatttatgaccgggcttcttttggaaacccaccgagatttcttctgatagctttgtatccttttttttattattattatttgagaatggctattacaaacactttttacacataaaaatcacaaccacactttttacacataagaatcacaaccacatttttcacataaaatttacaaatgttataaaatattatttatgatagatgtccaaatcaaaacattaattaccacaataaatatttgattatatttttatttattatattgatttaatttcttattattttagttttattgttgtataaatagaaatttatcttattagaataaataactgagaaaaatctcattcattctttcattctattattctctttgtcttctatcttcttctatttctttatctattctatattattctataagatgttattagcaccagaatttaccccatataaattttatttgtttaagtttttgaattctttaaagacaggatacactaaatatatatttatatatacttatttagctgaaataattttcaagaacccttttaattttactttctttgttattatagtttatttatattcttaatcttatatatttattctcatattcatatatatatatatacgtacaaggcagaagctagaaaaaatatttaagactgtttatcgagatttttaaagaccgattatttacataaatagtagatacatagttttacgtggtttaggcattaattattcttagtgcacgaatctattcactactacaaaaactacctttagaggcagttttttaaggctttcaatgtcagttttggcaaaattcactaccgacactgatcacggtgacgctatatgatttaatttaactgacgacatatatacccctatcgcgtcggttattagctaggaactgacgccataggggtatatatggcgtctgttcctagctaataaccaacgccatatatacccaaatttcaatttttttaattttatataatttatttaaatta

SEQ ID NO: 300916 - DNA, 1259 bp, Cannabis indica
ttatagtttagtacgtaaatagaaagcaaaactaatctaatgatttttttctttttagtagtataatgcaaaatattttagcttaaatatcataaatcttttagtgtattttaacccacttatttgattttaattgttatagattaattatagtatatgactacatgcctttggaatttagatgtgaaaacaagaattctcttaattagaaacatataattcaatgtcttgcttgaggagcactctacagaatttgcagatatatatcctacatatcaaagtaaccatatacttttcaacttacaaacagtgcttttctacaatcttattagtttttccggccatttttctacatttgatctgtgaaagaaatgtgctacctaattggctaagttttcttgagttatgtcttttgagacctcaacaaaagatgagctatagttcttcccttcataaaaaacatgaacatgtggaggataccatttgatgaggctaagttgtagcaaaagaagaaaagaagttgcatcatctagcatattcaactagatgttctattatttgaaacatgcaaattaatttactactatagtagaaactattagtgataagtaataaaataacaacttttttaatggttaaaatctctatcttcattacaaatcttgatttttatctatctatatattatatttatctgcattgaataaacaaccttcattttcctgtggaaaaaagtttcagctggttcatattcaaattcaaagaaggtagttagagctttcatttagataagtatcatatttcccgaattgattttaaaagatgatgtgattgtttacttaacaaaacattgtatatatataaatatattaataacacagcacaacagttatagaaagtgtttaaccattaatagccaagcacgtggttttgacttgtttgaactttcagtaaaagagtaatttattttactgaaacaatgacgtctgggctgagactaaagatgtatctggtgcagcctttcaaagaacgtatcaaattgaaacttcttctaatgtatatttttttttcccttatacgagtattttcttctcagttcctgttttactttttatcatgttttaatttgtttctactaatttcattctcctgttgtattacttactagcccattaaaataaaataaaataaagagtatgcaaactattttgcatatggtataaaagactaggggttcatccgatccaatccgcactttt

SEQ ID NO: 300917 - DNA, 2267 bp, Cannabis indica
cttttcctttctatttttgtatttcaggcatgctttttctgttttccctcaccatcaccattattccatttctttctctctgtagctagttattactggcttcattttttaaaaaaagagttctctaaattcagtttcagagaggataaaactgaagatatttttttctgaaagaaaatatatcgaaatcttatttgtttaataaagaatctttattctggatctttcttctaagtaaattgtactgaattgttgaatatttatataaacaggtcttatatattgaaagttcagcaaacgccgagaggtcagaaatgcggttacttttgacacctaatgctgttacagggtaactccttcctttaatttcatttcctttctgctctctgacttgatttatcgctcactattttgtttcttcgctttattagttgattatattcagtattaaagaaatatgactgaaaaaagctttttgtttcagtatattcccttctttgatgaaaattaatttagtattgtggaaaaaattatcttaatctgattattattattattttaattattttttaacgttgccgtttagagagaggcattcagaagggtattgtgctatgtatgacatttgtggaaaacgtagtgatggcaaagtattaaattgtcctcgtggttccccatctgtcaaggtatttatttatacatatattttgtagaaatatatatctatatatttgtatatgcataaatatatatttttttactattaattaaaatggttaaaagttttacttatcaatatttttaatattacagccagatgatttgctctcgtccaagatccaaagcttatgtcctaccattactggtaatgtttgttgtacagaatctcagtttgacaccttacggactcaagttcagcaggtaagattcattctctcatctattcaaaattaatactaatattgtattgttacttaataatgagttctttcttttgtgtattttattttgttgtgtgatttgtatatatgatcatatgtatgcataatgtatcgtacaggcgattccttttcttgttggttgtccagcatgcttgagaaactttctgaatttgttctgtgagctcacctgctctccaaatcaaagtctatttatcaatgttacttctatatccaaggtctgcagtttcttcctgtctttaatacattttattattgcttttataatgtttttgaaccagcttcatgcatgcaaacctgcagtcttttgtttaatttcttttattattattggcaaatccttctgaaatcccaaagaacattttcgataacattaataagagttttagtgaacatactttttaagttctactacgaatattaaaattagtttttttttcccattttcaggctagtaacaatttgaccgtggatgggattgatttttatataactgatgcttttggtgaagggttgtatgaatcctgcaaagatgtgaagtttggtaccatgaattctcgtgctctagagtttataggcgctggagctcaaaattttataggtaaactctgacccttttgaagattacttgctagaactgcatccccgcaaataagtttatcttttttcgctctcttctagtgccatattcagtctctttatcttctatgatgtttcaaaattaaaatttgtattgaaaggggtaaagccagttgctaaagtaccttcataagtatttttgtaacttacctgtgctgccaaagttaatattgtatatggtctcaaattgggatgactttttggaaggcatcttttgatggacgattcttttagtttgtgacagctttaagctattctcctttggtctttgcagtattgagtttgagtccttttttttttaatacttaacctatgatattttcagagtggttcgcttttatcggtagacgagcacctgctaatgtaccaggttcaccgtatgccatagcatttcagtcaaatatttctgagtcatctggaatgaaacctatgaatgtatctacttattcgtgtggtgatatatcactgggatgttcatgtggtgattgtcctgcatctccagtctgttctaattcagctcctcctccttcccataaagaaggctcctgttcagtgcaacttggatctgtcaaagtgaatatatctcctctaccttcatatttgaaaaactcttgtagttacgttagtttgcacaccactgatacagtttttttaatttttttcctatga

SEQ ID NO: 300918 - DNA, 765 bp, Cannabis indica
tataatgttttactatagtttatacactcccattatttgtcagcgtaattccagacatctttggatacaactaattcacttgcaccttgaatacaactgaccaaataagcttcaatcttaatttggggttgacataataattctgtatcattttggccttcccttagtgacttgagcatttcttctcaacctcgattaagttaactatttgcttgtttcttttcatggcctaccttgtggaattagtttaattaactttacttctcttattttccttgttggtctgtattcttattgctttgatgctcatctattaacatcttctctaggtatatcatagcacaacataacaaaatggttgctctaattttatgatttaagttctctttctcactctcctcttttgtagatgatcagtgagaatatgcatcaaagctatgtaatgcatgcatccttgattttttaatgcattatatgactttctttctatacgttgaatttaaaaagttgatgttttattaatgcagtgtctgacaggaggagatcttttgctacgcaataaatttattataataatttacaggggaaaagacttcctaccttgcgaaattgcggatttaatatcgaaaagagaaatggagcttcaaagatgccaactccatgaagaacatgcacgactggaagtagttgggaaattttgtgtagctgatgaaccacagggaaacccacagtccgctggaactctatcagagttccatgatattc

SEQ ID NO: 300919 - DNA, 4489 bp, Cannabis indica
ttttttttttttttcaatttatagacctcaaaattaaaatctttatattttaaacatcttcaatttttatataagtcaaaattaagatacgcgagtgttctagtaaactaactccttgaatcaccaccctagaactgaatgaacaacaattaatttaattcagaaaatcaaatcgagagcgcataattcttgatcaaaatccttaagtgagaaagaacttattattccttttttaataattcttctcttattatcccttggatcgaaatcaccgagtaggtacataatcgatagatctcaattataatctccaattctcataatatcgtgtaattacgatatattattatttatacataattgaacatttcagtatcattactacattccaaacacattttatatttaaaatctaccaaataataaataaagcatttggaagaagaggaaatttaaataatattataaaaaggggaaaattacaatgcactcaacaaaatttgaccattttccttggcaaacattaaactttaaaatatcgaaacaatttaagaaatacaaaactttttcttatgaaaagattagctaaatcccataatttgagtacttactaatgcttagaacgagagtaatgattatcattaggatttctcttgccactgaaagcagctaatgctttccttactgggggctgaaaaggagctcttttatcactatggtgttggctgaagaggtcgctcgagacgaaaaggtcatctccctgaaagtgtaaaaatatcgatacgaaaaatcagacattggtataatttaattgggacgaaaaatatcgatatgaagccaacctcttttgctgctgctttcttcttcgcctttggatatagcatcttgtggggtagttgatcttcgcgtaagatgaggttctttgtaaccgcatctcttccaccttgcggtaatggtagtgagaactgcatacaagaaaagtgtcaacaacaaacgaattgactaaagaaatgctgaaattggaataataagagtttgtatcggtggatgaggtataaacttactttagtgccacgcagtatgatacgaggacgtcgagctgccaaaacaattccattctcaccgactgtaacagctactttacgtaaagtgccaccgtttccacacttaggacagaaaattctccctatctcagcagtcactgtatagcaggcatggcacctcaaaacccacctggaaaaaaaaatgtcatacatacattttgacatggtaaatgcttagaaattgtacaatcaagtacctttgcagctggcggatctgcataccacctggtgctagtaagcgtaaacccatctgaagaataacattctgcatagcgaaatcactagttatacaagccacactggactcggacaaggacctgagcgcccagctctgctcactactatcaccatcctcggtatttgaggcatcaacactatcactgatctcgcttgagagctctaaatggtcgagctcttcactatctccttcagcgcttccattctcatcttgattcgctgaatctccttccaacctcatctggtccaggactgtagaaagactttcttcatcattctgtccaacttgcatgtgactctctttaacaccattctcttcctctgttacaccattgttctctccagttacctcattcttttcagaagccttatctttttcggataaagcttcataatgctcccacctagcttttcttctgagaaatcttctatgagtgcttcgactgacagcaggcatccagtcaccagcatcatcaccaaactctccctgagacgcatctattccatcaaccaccatcttttttccttcaatatttatctcctttttcttaggaggatatgatctttttggtcccccatgaccttcttcaccatcctcctgctgatgctcagaactagtatcggaaataacattcaagttcaaatctttcaagggaaggattctagaattgtcattcgatttatcttcaccttggtgttccaaagcttcccattcttccaaattgggaacattagaaccccaaccaggcaattctttctcaggtaatctcttcacattaacagtatgaatagcaggaggacattccctaaggtgacttgtaccatgaatttgagcctccaaagtataagtcagtgcaataagtttgatatccacatccgataatgtctgtaagtctccagtggctcttgcaaacttaatcactattcaaaaaacaaaacaaaaaatcaaattgaaaactaacttaaaacccaagctagaaataaacttttaattcacatcttcaactaaattatgatgcaattgaaagagccacatacctctattgagagattcaggggaaggttccatggactgaacagaaaaggggactacagagagtcggtggcgggagacagggtcacgaacctcgtccatgacctcaggaacggaaacgaacttgtcagcgcattgggaaagcttctctccgccttggatgatggcattggcatcgactacagccactgcaatgcctttggtagagttacaggtttgtgcgaaaacaccgacattggcctcaggggtaggattttggggcttgggagctacctgggatttcactatgctactccagcaagaagctggagctggagctggggaagggtttggggtttcctccatagttattacaacctttgttaaagcaaaacacacagtcatacacacaaacaacccaataataaaaataaaaaagatgaaaattttgggcttaagcaatctcttcaaattattcaactatgcattataaaatccttcttctcaaaatctcactctctaatctaatatgtaaataatcaaaatcaaacccgtatattagaattaataaatttaactaaaaataacactaaacaactacaataataaatgaaaggattaaactttcagggtttaagcaatctcttcaaattattcaactatgcataatacaacccttcttctcaaaatctcactctctaagctaatacgtaaaattaacaaaatcaaaaccctaaattaaaattaataaatttaactaaaaatcaaaattaacatatttttcatcaacgattcataataacaacagtaagaataaacaaaaaatatagttctgatctgaaaaatgaaaatcattagcaagatagaggcgaaagacagactcactcagcaccagtattcagggataaaaagaaggggttaattcgttgtttctgctgcggcggcgccgattgaagagggaacggcgatgaaggttgaatcaattttccggtcgtcgagcctcgtgggatggtggtggtggcggcggaggtggtctctggtgtggtgagccgcagaagagagagaatggagattggagtgaatagagagagagaatgagagagaaaggttttaggttttaaagggtttttccattttttttaattgtttttcttttatctttttttttttttatttttaatattttatttttatttatttatttgaaattttaataatatttcattgaaaaaaaaaaaagagacatttatataatagaacgaaaaaaaaaatttaaaaatacatggaaacatttttattttactatttcaacttttttatttgtaaaaatatattcaataaggaaataaattattttcttggttattttatagttgtgttattttttagttgttgtaatattgatttctcatctattttaattattttttgacttttttttgttaaacaaaagaatatttgtataatttcaaaattttataaatatatttttgtaaataaaatttaaaccataaaaatataaataaaatataaaaaatagtattttttttaaaatttgcgtaactaaaatggaatacatttctttctaaaacaagttcactttttttcctaataactttgataaatatggaatttataactttttatgatttaatttttttttataagaataagaggcttagtcttatggcaatgctccccttatttggacattagattttaattaaagaaaaaaaaataagaaaagccaaaagatattcctttttttttcatccaaaaaatttaaaaattaattatagtaattttatgaaatttacatcaattataaataaatataaataatgaaagaatgatatcaaacttataaatatatatatttcccatcatttttttcaactattattttgtcttgtaaaattaacaatcattttagtaataactttgtttctaacaatgtgttgtggtggtcctaaattctaaatgcatttaagtacctattagtagtaattactctaattagtttaagtgatgagtagttgtaaatagtgattaactttaattaaaagcctgttcggtaacctttttgttttctatttttttaaatttcacttaacaaattttgtaatttgttgacggt

SEQ ID NO: 300920 - DNA, 1992 bp, Cannabis indica
tatattatttataataattttataacaatttttttttcttgtttttttaggaattccatttttttaggaatccccttcttagtagtttttcttagtagatacataaatatttttgcagctatttacacaaatctttatccgataatgattgtatttaaaaataaatattgtggcttctcccgcttctccttttttcttcttccacaattttgatggcaattactacatttccagctcaggactataccaccccatcaccaaactccatggctgtgctctctcttccattctcagtctcaccatatttcccctccaaattcagattaaccacggcgtggttttccctctcttcccacctcacacccttctccccatcgtctccaactcctcctgcccacaaaattcactgcctcgccactccccttaagcccacctgtcctccaaaacccagggttaaggttaaggcctctgaagctgagctcaaagaaaactggttagcctctctatcttgccctttacctcgagatttcggaacctcccatagcgaagcaaaagaagaagaagaagaagggtccgagtccgacccacgtaatgtgggctctgattgggttattggtattgacccagatctttccggtgcattggctgtcttgaaaagcgacgaccctgaatgtcctgctcaggtaattaggatttttggtctgaattttgttacaattacttgtaagagttactttaggtaatgtttttgactctctccgtacgtaattaggttgaaaattaagtttttctcaatttgctcaaactggttaattgttatatgaagattaccaaattatcatacattacttaaatcctccctatgaacgattaatttctaaactatagtttaaaaatttgaacaatttgtgaagatattgaaaattaataatatcataatcttttcttctccccattttacctttaggtgtttgactctccacacttgtcagttatggttggtggaaaggttagaagacgtttagatgctaaatctatcattgagttacttcgaggttttaatgctcccgtaggtacgtttctgttcaattttttttgtatgttttattttttttttcatatataaatataatttatgacaatctaactcaagatggcaaagtgggtttctgtaaatttaaattaatccacttatatctttatactctattgttataccacgagaataatatcaaaattaattagaaggtataataataataatttttctttgaagtatatagttcagttcatatctattttattttctttcacttatctgcattcgaacaatgtccacctaaacaagactgtataggttacacctccaagaaatgtcacgattgttatgtcaatgacagaaaagataaatgttaaaacataaatctatctcacacaataatttacttggaaaactacaaaatttgagaggaatcacaacccattagaaaaattaccatttgaaactttgtacttctctgttttctacacaataacccaatatatccctatacttactctctcactgatacctttatccttttctagtagagagtttagagctccatatttctaagaatacttgtacaatccatatttatgtgatatacattttgtgctcacatttctctcattccctccgccatgttttgctttttactttgcaaattacccagctactaaaatctcatatatctgcaagttcttttgctgtttttgattctggtgatgtaatgtgcacaatgcatttgtttcattcttattccatcaagttatacatgtaatggacacagtattctactattcatttcttgtccatgttggttaatttgtctttttcctctttctctttagctttagccatccattaggctatgctctgtgttcttcatttatcctgaaattccttctgtaatttgttgtttgtcgtgtttcaggtcactacagcataca

SEQ ID NO: 300921 - DNA, 4849 bp, Cannabis indica
atatatatatatattacttagtttccaatttcttcatagtttcctatttagtctccctagtctttttagtcttgtatataaatactagctattttattgaataaaatacgatggaattcaccatattttacacttggaaaattttattgtgctcaaatctagtttatgatttcttaagatttactttcatcattggcctttgcattaacaaattcttcttgtcttaagattttcaattttattgatatctctttctccatatatggtttgtgtgtttatatattcagattcaaactttacccaaacgtaatgcaactcaccatcaatctgcacttgtggaaactgctcatagtgacaacccaaaattttaaatttctttccaactttagtttcatatcatcttttgtctaattgtgtatcactgttatgtgtttttgcactttcttcccatctcaattaatggttgtcaaaattctaaataatgctatcaacagaaaaattctgaaagatttcatttttatttacttttccttcttttctttggaaactaagaggtcttaggctttacgaaatctacttcagaaattatatgccttcagaaataactgtgcagaactctttatggaagaaaaactctgttatatcatactacttgatttgattgtgggaatattggtggtgatatcttttttaatttcgagctaactaatttgtttaatctgttatttgaacattaaatgtggctcattgtcagttaattaatttcaggtcactcgtttgtcaaggaaaaatgtctgttttgttatgttcattgatgagattactctagaaacactttcttcagaaggtcagacaccagacagaatgggttttattggattatggaggattgtggtggtgaaaaacttgccatatgctgatatgcggagagttggaaaaatacctaaacttctacctcaccggctttttccatctgcaaggtgggaataatactatgtgaaagtttcttgatgcgtaataatatttcatatagctgctaatgactgcatttatttctaatgaaaaaaaaagtaaagatgcatacttgttcgtcccttattgtcatgtatgcatcactgctttgcatatgaaatatgttgtcatattttgaacatgaaattgacgcacaatcagatttatgttccgtgcagtgcctattagagaccgtagaatcagatatagctaattttatctcttacccagccatatattaaagcaaaactggaaaacctgtttgtctctaaaaagcagtatgaaaatggaacatgttgtcagtacatctttgttgatcgaatcccattctcattaatttccgatctcttttgaaccttttgacacaattttcctgattcccctgctggtaaattttaactttgtaccacctagtactgaattcaaatgggttttctgcgctgtatagagaattaatctgatggaagattaataaagtgaatacctttagggttgtcattgtatgatatgattccctttgtggtaccatatcaaaaggcagttgccttggtaatagacccatgacaaatacaaacaacaggattttatgtttcattttgctgatgttctttgtctttggtgtatttcaatattgctgcgctaaatagcaactcacttcctagtatttttgttttccttcttccttataaaaaaattgttcatctgtaatgttgagaagctctattttaaatttttcaaatcattgcaggtattctatttggttagacagcaaattacgtctccaacttgaccctctactaatattggaatacttcctgtggcgaaaggataaggagtacgcaatctccaatcactatgacagacattgtgtttgggaggaggttatgcaaaataagaaattgaacaagtacaaccataccatcatagatgaacaattcgaattttatcaagctgatggcttgactagatttaatgcctcagatccagaaaagcttctccccagcagtaatgatcttcctcagtagtcttctttttcttttttgtcaggtcctcaatgatcattagttgagtgtaattttcttcataattttcattacatttgttttttctcttgttattcacagatgtacctgaagggtcattcatcattcgagctcacaccccaatgtcaaatttgttctcttgtctatggtttaatgaggttgaacgatttactcctcgtgatcagctaagttttgcctatacattccagaagttaaaaaggatgaatcctggaaaaccgtttcatcttaatatgttcaaggtgggtaattcataatcaacatcaaccgatgacatccaaccacaaattaattgttcagaagaatattaaattgaaaaggacaatttcttatgcacacgtattaaattaaaccgatttatctggttttcaatgttttgcaggactgtgagagaagagccattgccaaactgtatcatcacaggtcagacgagaagcgaaacattcgtcggaaggaaactgagtaaataaatacatcctatattagccatttttttctttctgggaatctggtttctgtggctggaattcaatcaaactgttcttcagtgagtgctccttgaagctcagttgtagaatgttgggattttttagcaactcttttgtgcaaaccgaattgttttaaggcactgaagttttatggagtgagctgttttgggggatgaacatcattaccatgaggtgttttatctgaagagtaaatctactttatcatactcactcttgtattcattttctttcttttctttgttttgtatggaggcgaccgaagcaaacatatacctttgttgtaccgatattactgtcgctgcaaattatagtcttgtgcacttcatgttttgtattgctaatgtaacaaattttgatgggatattgagctgtgtattcattagatttgaaaattttattgatttcttggaattcatatcattttttttttaacaaaaggaaactttttattcaaaagaacaaaccaagtacaaaatactggccggaggcaacaaccaaccaccacaaaaaagaaaaagagcagctaccaattattcactacgctcaatacataacggtctttcctcttttgattggtacaaagaaattcaaaaactctagccttaaccatacactttatctccttgctaagagaagaagctgaattacaaacaacattaaaaagacaatcattcctatttctccacaactggtagagagtggttgagaagacagtgttcaagatcaacagcaagtcaggtttggctggcagaatcctcttttgcagatcactaatgttcttcggccatctcaagttacctgaccttaatccaaaaaatacaatttgagctcacaccagtgtcttctaaatcgttccaccacacacaaagaatagtgtgggctattaggataaattgtatactgtgttcttattaatttgtcaacacatgagcaagaacactttgagagagaaaacttttttctttttctctcttaatttcaaaattacagtgtagaatgatgtttagatttcttaaatcagacttctatttatactagttaaaatccgtgatttaaattatatttaattacttaaaaaataaatatctattacttaattcaaaaactgatatttatgaggaaatctctcaattacttgagaatatctcaacaaccttgaaatatctataaccacttcttaaattagatatttacctaattaaattaattaaataattaattaacccaacaaagacaaacctatagggataggcgcctacccttgttgtttaggacaagtgtcctgacaacttttgtctcaacaaatcttattttgaaaatttttatcttaacaactttttgtcttttctcctatttaattaatttttaattaattttaaaaaattatttatttattacaaaaaaataaataattactattttgccaattcaaactagatttttccgaatgacattatactactctttatctcaacccttggcagtgttttaaagtggcgattcagggaccatggacctattattctaagctctaataaactagattatttattgagtctcatcaaccaaataatcttcgtttattaatttcatgattactccactaaaaatatagaattaaactcttagtaattatagaattatatttactaagtattagtacagtgtccattgatataatcaatttcagtgattagccctccacgtattggttcataattagttttggtcaaattacctttttatccttctaatttcttgcttatcctttagtaccattaattcattagtagaagtataatttagatctcatctaaatttgtgcacaacattccagttctaaaattaacatttaaagtgaaccaatatttgattcgttaggaaagttaagattctataattgcaaatcatgttcccagccatccacattttagattccaaaaacagaagttgtgagaatcatcttctctgagaaacttttacgattgaatcaaaaaaactaataattcatgataactcaggatttaggccgatctactattgatcatcgttatgatatgaatcaagtctttacagtaaacagtatgttaataaagactactttattcatataagtacttgtcatatataatctctattatatataatactttcactttgatgtcatactacatccgtaattcgaactgagattacttgcactgaagagcagatatcaaagaaccgtactatcaactattaattaaaaatttcataactttaatatgt

SEQ ID NO: 300922 - DNA, 2739 bp, Cannabis indica
gcaacccatgcctaattgccttaaggaagacccaccatactcacatagaaagtacatgaaaatagtacattaaaaagaataagatcctaaaaatcttattaagaataaaatttccatcttcaacagcccacctatctaatctaataatgcataaagtgtaaaaatatatatcaatacatacattttatatatatgacaaaggatccacattattaccaactcatttccatttaatttgtcagcatttgcattttgcatttgattattttcaatttatgaaccctttttctttcttgcttatatacataatctaactggttggcaacagtggcagcaatagtccaaaatgactaataatacaacaaaattggtgtacatttttttaagttcaaatatatttgtggaaatttcccacactcctccaagttaggcttttgatttaaagtggatattattcttaagtattatatacatatatatgtaattaataaaatttctcaattagtggagtgggaatctgactggaaattatcaaagaaaaaaccttctctttttgctaaaacaggtatccttaacggtagcaaacctacccttaaacgaagcttaattaaaataataataaaaaaatatttattttatgtataaccttttaaatgtatatttttctaaagaacttagtatcttcctccattattaaaaatttctaaccccacatggttaaagaatctcttaaccaaatttaagaatgcaaagtccttattataatggaattaaggaagaaaagaaattctaatattaataattagatttggaagtgtatatattttggacacttggattaaagtacatgtatgcaaacctgtccttgtacttctactactgcctaatcgtgatatgtatatataaaataattctatatagaatgaaataaagagaaaaaaaaaaaagtgtattcttttgagctgttcaaaccaaaatcaatcttcttcatattcaagcaatgagaaaaatgattggtttgctatctcagtagaatatccaattgataaataaacaaattcagtatattgtcatgtttcattgttccaaaaaaattgtcacgaaagagatatatctctatatctataaattagcttatatttatgtgatgatataggtgatgtattcataccttaagacttacctacagattttggaacactcaagctctaattatctcataaaagtagaaataataaaaatatggatatatcttatataaatggcttgaactatggatattgttgggatattatgtcttggactagcccaaaaaagagtaattttatttaataattaataaaagtagtgtagaggtatatatgaaatgaataggtaagtattatggtatctgatgaaagttgacctttagtgggcatatgacaaaaacaggggtgaggggtgttgtattttgatgatgagaaatcatttgccctatagtggggtttggtttggcttccatgtgtaaatgctttatgatcatatgaatgtgtatccacatttatatatatacacaaacacatatattttctttcttccaatactccatgctttggtcccactcccacaccctttttgtccctttcactctttttcctcaattattttttgtttctccccttcctttcctttactatcattattattttgcttctctcttttgggtttttatttattaaaacatttgctttgatgtgttttttttccttaagttttttattttatgaatcatgggcacttttgctttttgtcaaagcatcacacgcaacccaatattgattgtacggccatgagagggaccttcttttgttttttggagtgggccaagcttagccaaggctgctaagttgggcatcactagaagaacaaaaacatgccctctgcaccccttgtagacaaggaatcttttggtgtggttttaaagcacatatttatgagagtgttgagcacaagcaaaggtatatttatttatttatttttaagatagaatttcccatatttctttggaagtaaaagtgtaaaactaaaaatgggtaatggtcaattttttctatattcaattgggtcgagtgtaaagggaaaaaagggctaaatgggtctttggcaaaaattcagaagaagactaagataggtcctttctaccattaaaattgagagaaaccaatccaatgtcaattagattttcaatattctagtgagaagagctgtccattttaaatatggtttacatgtagagaagacattttttttggtgtttgttcaaaataaagaaaaaaaaaaaacatcttttggtgtagttttaagcacaattacgagagtattgagcacaaacataaattttacaagcaaagttttgagttttccagatagaattctgatacttctttttaagtaaaactaagaaatgggttatggtcaaatttctctatatttaaatgggccaattgtgtggttcgaaattgaaaaaaaaaaaaaggcaaagtgggtttttggcaaaactatagaagtagactaagaaagatcccttcttgcattacatttgagaggaaccaatccattgtgtattagattttcaagaacctaattataagaggtgggcctttttaatatggtctacatgtgaatgagacacaggaacaataatatggtgaaaaacacagatcatatatttagaagttataaaagaaaaaaaaaaagaaa

SEQ ID NO: 300923 - DNA, 1314 bp, Cannabis indica
tgatgttatttaaatgttatttttatgttacttttatgtagttttcttgttgttttgatgttatttctataaaaaaccgtaaaaatacatataaaaaaaattaaacgtaaaaatagtagtttttttactaaaaaattaatgccttatataattatccctataatttatgcacctttgcaattaaaccattattcaccacacttaaacaagtaacttatagaataaatacttaaatttaatttttagtttacagataaatattaattaagtttaattttttttagttgattattaagtattaagtcaatagtcaattgtgaatccttaattagttaaaatcattaactttattttatattaaaaaatggcatgtgcatataacatgtcgttatatttaaaaatgatttcatacttaatcatcagatacttaaaaaaaagttataaaaatataatttattaccgtcacctatttatctgccaccaagagttaaatttaagtatttacgtaacaaattattctaattaaaccattttttatactacattaaattctgaaattcaataatttttccatgaaaaaggtttgtattatattgattataattatagcctatcgtactttgtatttatggatgttaattttaacttattaatcgaatttagtgttctatatatataaaaaaaaaacttcatatagcatattgcttatataaaaaaatcatgccaatctagggtgctcaacatcttaaattgtcatggttgttgtaatttagtgttaggttatttttatctagctatattttaatttacatgtgatatgtatctaaggtgttgcatatttaagtttctccatttagagttattctaaaattcctattacaatttcttaacttttgtgttctaaaacaaatgtgagatatttttttcgacgatgttcgttataattataacatcatccttttaatttttttttaaaattaatttatagtgtctataataagtttgtaagcactcgtagtaaattagaataccgaaaactctattttaagtacgataaactattcaatttacagagatgatattataactataacaattatctctataaaaaatattttgacatataattttaagcccaaaaattaattaggagattgtaataagaaaatataattataacacccctatattaattggtatggtgttagtttgacaaatttttccacaatataaatgtgacagtcagtagtcccgtgatccgtaaggggaaacaccgggtaagctgtgcaatctcacaccgcctggggaaggtca

SEQ ID NO: 300924 - DNA, 5512 bp, Cannabis indica
tttttttttttgtttttgaaacttggatccctgcctaaaactacaatatttggtaactaggaaactataacaatttctatgttatcgaggaggggagcaaaccacatgccctgaccatttgaggtacccttcttgggtaactaaattgttagatactgcgcccccaaccccaaaaaaaacataacttggatacaaaggccaacatttgcaaatattagaaaatatagaaaaaagggatcagtctcttacgttttaaaaaactgaatattttccaggctgagttccacccggaagtgataaggcctgatttgaaatgtcttccagcacacgtttcaattcagctttagcccttttaacagattgttccgtaggaccttcaatgaacaagtacaatttgcgttctcccggtcctgccactttaccgggtgggaagaactgccccctagtagtaatggcagctccagtccactccgatataggtcccaatgtttccttatgtgtgaccttccatcgagcattctgagggaaatcatttatctccagctctgcttcataatgttcaggcattgcatcagcttgaatctttgccaggttatgctgcaagttcattgcagcagctattgcggctgcccgtgctgcaccatcattgacgacaacaggcaacccaggtccaggcaccgctgctgctgttccaggtaaagacagaccaattacacctggcacagaaacaggtagtccaatatttggaagaagttgaccagcattaacaggggtaggcattgaatgggtagcagctttagaggctgcagcgagagctgatattttagcaagtgcagtctgttgtgaaatgtcgcctcctgccttgcggacaccttcatcttcgtcctcagaatctgacttgtcttcttcgaaaccatattctttggcctgtgctttcttagctgctttcctcacttcatcttcttcttcattaacttaaaaccacttcctccatagccagttccatgtgcttgttccagtccctgatttacttttgccatgaaaccctcagcaagagctttcaggtcgtcaggaacaacttgctcagagagttccaaagcttttacaagatcagagcatatttagaatcttcatcacaaataaatgtaatggcacaaccttttacgaccagctcggcctgtttcgaccaacacggtgaacatagtcctcatagtgatttggaacatcaaagttgatcaccagttcaagctccttcacatccaaccctctagcagcaacactggttgcaatcaacagattacaaacattgcttttaaagtcagaaatggttgactcacgatctgtttggtccttagccccatgaagagagaggcaaggataaccatgtttgagtagatccctgaacaaagcatcacacttttcctgagaatggacaaaaatcaaaattttccctttctcataccactcacctagtagctctaataaccttaaaaacctttcattttcaggcctcacttcaaccagttgcgcaatgtccttattaacaacactccttccacccacttgtatctctacaggtttggttaacactttacgtgctaagatttccacttgacgggggaaagtagcagagaaaagtacagtctgtctatctggtctaatattttgtacaattcgagtgatttgaggttcaaaacccatgtcaaacattcgatcagcttcgtccatgaccaaataagtgaccctgcgaagatttgtaattttcccaccacttgtgcaaagtatgtcaatcattcttccaggtgtacaaacaacaatttcagcaccccgcttcaatttactaatttgttgggcaacaccagagcctccatatacaggcacacatgtaaggcctagtgccttggtgaactttactatatcactgtgaatctgctgaacaagctcccttgtaggcgccattaaaagcccgataggcccatctcctgcaaccacaggaggctggtcctttatatgcctcagcattggaagcacaaatgccagtgttttacctgacccagttttcgcaatgccaatacagtctcgaccactcataattataggcagtgcctgagcttgaattgacattggcttttcataaccaagttttttaatcgtatccaatattttactcgtaagtccagtttggtgccaggtcttaactggttttggcacatacttaccatggatcttcaattctagaagagtacggtatgcggcaacatcttctgaagtcatcctcgagatttcttttgattcaatatagaaattctttctaaatggcttataatcaatttttgaatgatcaactagagaaagtttctcagctttggtcttcttaactctttttatgaactcatcgtcatcttcatcctctgcaggctccccatcatcatcaaggtccccataatctgagtcagaatcctcccctggaataattctgcccatagacttatttgaaccacccttcctacgttgctcaccattgctttgattatcctttttatccttgctcttcaactctgaactcttattaccatgaactgatgggtccgaaacactactgagtttctcaacttctggcaaaaccatggaattcataaaagcatctaatggatcaatttcatcatccccagaagccccatcaaccccattctgcgaaggtggaggagtagacccattttcagaatccattgccatttcatccccaacttgattattagtttgggtagctccgccatcaatgtccatagccatctgtactttctcagcagagggaagttcttcatcatcttcagattcaccctcaagggtccaagcctttccagacttaggttcatcaacaatttcctccccgtgtgtctctctttcagcttcctccttttttctttttaactcctgccactcctgaactctcctccttctcttctccatttcttcatccaatttaagttgttcattttccaactcctcttcacgagttgcttgctcttgcttatcagaatcatccccggaactcctcttcttcggactctcttcgcgcctactgctactgcgttcatgctctttctccttctcattttctctatctttctctttctccttctccttaactctatctttctccttgtccttgtaatcaccatcatctttccttcgacgtttcctttcgtggtctttaacatcatgactgctatcatcactatcaacttcccggcgctgcttttccctctcggtgctgcgtgttctcttctctctttctctttctctatccttgtcccttctctccctctccttctctctttctcgttctttctccttagcccgcttctccttttctctctctcgatgatcccttttcttgtctcgactcctctccctatcatcatcccgacttctcgtcctatccttgtccctctctttgtggtgcttagtagaatccctcttctccctctctctattatcatagctaatgtcagaatcagaactcttttctctctcagaacgacgagacgactcgcggtgttctctcttctccctgtgtctatctccgttcctctccttctcgcggtggctcttcctcgtatcctccgacccttctctcctagatttacgcttgccctcttccatagcttcttcctaaagaaataattcaaaaccctagcacataaacgaaaaacaatactacactatatcatccaaccaaaaaatcgaccaccaccatagatatagaacacacaccatggaatcagattgagtaaataagtaaatagaataatgacaactcaccgagatcctggagtggtgtggtgtgggttttgctgtaccaccgaaccctaaaaccccttttgttgttcctgaaattcgctcctcttcttcttcttcttcttcttctattttacaaaaccagaaaatatctctatctagggctcttacttacaaccccaactaactaatgcactcttcttccaaactacatgtcgtttcttgttaatattgtttttttttttttttgtacaatacgatttaaatattgaattaaaaatatgttccatgctttttgaatttttaaagttattaaaaatccatttgaattattgagatttttaaaattaataatttttgtctaattttaataaaaaaagtctaatatagatgaaagttgagagggtatcatttgatacatgtaaaagttcgagagacatgatttgatacatatcaaagtttaggaagcatgatttagtacatggacaatcaccgaattagtaaaactgaatgaaattggataaaaggctttaaatctaacaatcttaataatttaaggagtataatttagtacatataaaacttcacaggcaaaaaatgctaattaacctaaaaatattaaataaacctaagttataaacaataagactaacatagttattcaatttattattgtagaaggtgattctaacatagttattaaagctgcaaatgggttaaattcatgatggaaaattgagaacttatgtaactcattgtaggatgtaattttttaaaggtttctagatctagtaattttgttgctcacgagttagctaagtgagcgtttgatcaaaaatataattagtatgattgaggctttctcaatactaaataaaattgtttgtaattaccttatggtctaatttgcttaactatactatttacacttcttttcaaaaaaaaaaaaaaaaaaaaaaacaaaactaatcgtgtgtgttgtggaaaaagactttcaatttgttattgtgaaaggtgattctgacataattattaaaggtgtcaagcagttaaatcaaataggagaagttgagaactatgtatctcattgtagcagcgttatgaactcttttgtgggatgtaattttttgaaagtttataaatttggttgtaactggtataattgaagtttcttcaataccatataatgttgtttgtaatgaccttatggcctgcctaatttacttcatctatactatttacgatttttttcaaaggagcgagagagaaactaatcatatgtgcaattaaaatatgaatcgaatagttattggttgtgcttgacctagaaaaattcaaacaggttcaatttggttttgtaattgagtttaagatttaggttttattatttttttgtgaaattttaaataattgtaaatatattaaaaacatatctttatcaaatttgtacaaaaatacacattttttctttttttactattttcttaaacaattttttagtttagtaaaatttaagatccatgctaaacctaaaaattataggcaaaatgtggttatttctacaattttgaacgaagtaacccctctcgtttaaatcatctcacttatcattaagggtgcgtttggaaagccacattgtaattgaatttgtgtgtaattggaggtaattatacaatttggcatgtttctctgaccgtgtaattacactgta

SEQ ID NO: 300925 - DNA, 6454 bp, Cannabis indica
aaaaaagaagaaaaaaaaaactataaagttgatttaaaggaaattaacgcgtttggagagttggcatgtcagtcacaatcattatgtgggttcccaattttttttttttaaataagaaaaatatattttatattcccaccctttctaaacactaaatttaatgttaagaactctttccaatccaatcaaaatttataaaagttgataaaattaaaatatcatcttacatatgataacataaatattacattattaaaaaaaaaattacattcatgacaaaaaaaatacagtaaattaatcaaacttaaaatacacttgaaaatattaattaaattatattaattcttccagttatcatatatgtcctgaaagtgttcaattaatgtatttgaaacttaatgtgagcttccttattcttactttttttttttatgtttagcaaaaaattcttgaaggtgatgtgtatttagttttaattttttaatgtgtgtataaatttgtaatgttaatattgtataatatttaaaaactatatacataaatatttaataatgttttatttaaattataagtacaaaacaacaatttatgatattcaccttttaatctacacacaataaattaatttcttaaataattttaggattctctatttggactctctgctagagttacgattatcagcaccttattgtggtcatggcaggtcgtgatcgatcgcggaagagtagagctcagggaattggaacaagccccgaaaaagaaaaagatgtgaggcttaattttgtcagatcgagtgaagaaggtttgttccatggatgagttaataggcattgagccaatggcgttctacgaatatgatgcagagaggatgaaaaagattctgggaagtgaccctgacctaaaaatggaagacgtgaacatattctctcactaagggcatctctagaagcaattctgcaacaagaagacattcgtagggacttctccaacttcctggtgtcctcgaactagtgcgccaatgatgttagagaaggtaaagcccctactccccttgttccgcgtctagagaaattattcaaaatttgacttctaaatttactaatgctgagaaaattgagaagcggaagattaagatagagttagatgttatagaggaggaagttccattctggaattcatttgtggttggatatgttttaagggcaaaccctctactatcagtactagatgggttggctcgcagattatgggattcaaagggctttgatagggttggtttacttgctctaagaaaatcaaatttgattcaattgaagaaagtgatgaactgatgaaaaggggatgcattttctttgaaaggaaacctatggttctaaaaccatgggattcattgatgaatttcgaaagggaagatgtaaattgagtgcatggtttcagctaaaaaaatcttgaggtaaagtagtggagataacgctctctctttaaaattattagtcaattggggaatccgctcatggtagacccaattactaagaacatggagaagctaaactttactagagttttaattgaagtgtctttagaacaagaatttctgaaacttatagagtttgtgaatgaacatactcagaatgttacagtgactgccaactatgaatggaaactaattgtttgtaaacaatgttgatgaatgggccataaaacgattgattgtagaagaaaataagggaaggaacaagagtgggttgtcaagaaaatgaatactactacagagaattcaaagcctaaacaaccagacgtggatactgaaagttttctaccaattgttaagggttggaagtagaaagggaaagagaaaataattacaacggaagtgaataatagtttccaagtaatgggaactaaagagggagaatgttctaaggttttgaaattaagtgcgaacactggaggaggaggagatcctcctctatccaatggatagaataatagcttggaatgtcaaggggctcaatagcgaacaaaaatagaatgaggttgaattgttgatctctaatcaacaggttggtttagttgggcttcgtgagacgagggtgaatgctcaaaagtcgggagccttgtatgttcgtttgttttcaagtcggtgtttcacttcaaatatagcttggcacaagggggaaggattgttataggatggaatccattgatgttttctatctccatattatcaaatgctctatccaattaatccatttattagtaaaaccatttgataaaggagatgcgttctttgctacttttgttaatggaatgaatgatgaagaaggaagattgtcttgtggaaggacttaatggactgttatactcaagtttcttggttggtgcttggggattttaatgacatacttcccaaagaggagagaattagcatgaaagttcagtttagtaactcaatatcttttttagacttgttttgaaaatatgctctataagatgtcaagtttcatggaaactatatatggagtaataatcaacaaagggaggatcaaatctattataaaatagatcgagttatggctaaccaacagtggctcgatacttatactacagctgaagtaacctatatgagtgaaggtttatttgatcattatccagtacttttatcaatgtatccagacttgtgtcatgggaagaagcctttcaagtatttcaagatgtggagttcgacacctgattttttagagctagtgaaaagagattggtctttactagttttttggacaccgatgtactgtgtgatcgctaaattgaagaggctcaaggtaaagttaaaagaactaaacaaaaaaggtttcaatgatctccgcactgatgatttgtaggcactacaatacctccagacttgtaaggattagttgaagaccgatgtaacgccttgctagataggcatgtcactgtattttctatgcactcatttattaattaaagggtttattaaaaaacgtgattaattaaaactcttaaacaaacttgaacttttaataactaaatacaaaaagttacataattttgggatcctatttttattttacaatcatattcaaaatgctacatatatgaaagtgtcacccgacgactaacaaaatatgaactacattgtcccgtagatccgaacactccaggtctaatcatccagatatgtataatcttcatccaattgtagactcactggtactcagcctttacttcactcttacctacacatgtacacatatctgtgagttgacagacttagtaagagaagcaaaaaatataaatataaaattgaattgtaactaggcgcccatacacctaatcatgattctataatctgcgtccaatgtgtataaatctcaaacattcttgacagcagtatgattaaccataataccaggctatactcagtgctctagttgtactaatgtgatagcatcaatccatacttactaaattggcccaaatctccttacaatatttttgtcgtctctatgtgtactttcttcatagtagtgcaatataacctacaccattgtcatcattaatatcttgtttaaataatgtaagaatctttaaataatgtatatgcaccttcttacatacctgaacatcagctacatatgggatcaaaaagccagaaacatcaaaagttatagactcaacaacgaaatcatcatatgtgggattcgctacaagaagaaaacctaaaaatcctaaagcttttttcgtctgggtgatgacggtaacagtagaggtcccattgaagaactcctttgagattgtgtatatcacaatactacctttcactacatttggattaaaagcttcaggatagtgacactcatcaatataggcactgtcttgggaaatgacctatctgtcttcacaacatccttttccaataccagcttgtgtaagaaaaactcatcaccaaaagatggtcctaaatgaaacctaaaagcaaacggattgcaaaaacaatacccataattatgaactaacaaaaactggtattaaatctaccggataacccaacccctctaattttttggccattgccatgaagaatagaaccaaggtaggttttatttgtgctagtttaggctactcgtgcgggctaggggctgaaggagactacattggaagggcccgggcctttgttacctattgcttggaccataaaaactagaaactattattctgttgataggcttcgagaggtaaattatcttttcgtgtatttacttttagatttaatatatatacatatggtgatcttgaggatgtggtacgaagataataaaaaattattcttctgttgcgtacctaatttagtaccacaaaatcaacacatgggtagtagtgtcattcttggtaatcatcatatcgtacttgatttttgcattcaaacaagccaagtacttttctatcctactaaaatcagtaagtacaattcttgaggccaatctagaaagtttgtcaaactgagttgtatactcagttaccaacatcgattctccttgaaccaactgagtaaattctcttctcttggtgctatgcacaacatcattataatatttttcgttaaacaaatcttggaactcctcccaggtaattactgaaacatctcgattaagggataccatatcccaccataccagggtatcatcctagaattgaaaggtcacacaagtcacccaagcattgttggtgagtcctataaaattcaaaattttatttatggtggttagctactgctcgatcttcatcacatcagggcttcccaagaaaactagaggtccctgcttcatgaatctctcatataaaggctttaatttgttactggtgaaaaactattatgctggcaacaccgatgctacatcaacttgtacctgaggtggagacaccataggaggtccatgttgcctcaacctctgaatttcctcatcttgttgttgaattttggcttacatttctacaaacctttgctcccaacatgaaaagcttgtggtagattttcatgtccacctctgtaagtcatttcacggcctctactggtctcgaccatattgccctaacccctagtgtttcaatgagtctccattctataggacatgtatgcaaaaacacaagtcaagttagccaggaagcgatcataaccgtaaactaattatcgcaaacatgagaacgtaacatgctcttaatcagctagcaagctactaagatacttcctatctggctttcctattcataaaattaatttaaattacaaaaacatgtaaaggcttattggatagtgagtcgagcttatctttgatgatgagtatacatatcttgacgatctttgaaagataatttggtagctctgataccaaattataacgcatagattaggcacatcactatattttctaattactgtgcactcctttgctaatcaaaaagtttattaaaaaacgtgattaattaaaaccttttaaataaacttgaacttttaattaataaatactaaatacaaaaagttacataatttgggatctcatttttatttacaaccatattcaaaatgctacatatatgaaagtgtcgcccaccgactaacaaaatttgaaccatattgttctgaagaccctaacacttcaggtttaatcatcccgatatgtataatcttcttgactctagactcactactactcaatatttgctttgcccttacctatacatgtgtacataattgtgagttaactgactcaataagagaagcataaaacataaacataaaactgaaatgtaactaggcacccatacacctaattatgattctataacccgcatccaatgcgtataagtctcgaacgttcttgacaacagtcagcgaggaaagaattcccacttacatatatatatatttaaaaatgatgtctcaaatagaattaaaaaaatatatatcataaaaattattcaaaaaaaaacaaacataagtgaaataatgtgtataataaatggagttagtaaatataaagttggcaatcaaaaataagtggttaagtgtcatttttttaaagcagttaagtgtgattattaatatgcatcgctgtatttatgaaaaactgaaatgtctcatattgtaatcaataaaaaacttaaaacatgaagttattttaattgtaatagttaagattttaaaatttaaatatatacatatatcatatcaggacaggttggggcaaatatctattctcccaccctaaactcgacttgagtatgaacatttaaactcatattcgctctgctgctgccaaaatttgacccctgcccccgtcccacttaggggtggatacccgcagatacctaaacttgtaggtataattgccatatccctaattatatatatatagctgttgggttttatgcc

SEQ ID NO: 300926 - DNA, 4826 bp, Cannabis indica
ataaataaataaataaatatggaagcacacacactttatatctggcaagagatcatcccttctttaatttatttacgttttgttactttttttcttcctcgggggttttacaaatagatttttccaataatatacacgggtcaggtttaagtttttttaatagtaagttatagggaaaatttatagtgccctaaaaggttgtttatctatattttctgtctattttgtaatttatgagaactttttagttattattattatgtatgttataattttatagtagtatttgtaaattttaaaaaaattaagaatagtttatgatgttgaaaataaaatttatttggaattttctaaaaatttacaagtagtcttttataactacaacatacacaatcatgaaacaatattagattaaaaaaaaactctcctatatgccaaaataataaaaagtgatctaaaatttagaaggtgtcggtattataaaattatcttaaattatattcgggaaactaactgcatgtttgacatcatatctaaaaaaaaccgttgttttttttttttaaaaaaataattttttgtaaaacaattaagtgtgttaggccttgaaaatagtttttaaaaatcaaagttacaaaaaataagaattttgagaacaaaaactatttaaaaaaataattcacttttggtcaatatcttttttctattttatctcacatcattctactcatcattttctcatatatattattttctctctcatcactttctttctagggtggggccaggatccgggggtttggggtagggttcaaggttcgacctaaagtcggagctaggtccaagtctggggtcgggggttcaaggctagggtctgggtcggggttcaaggtccgggatcggaaccaggtccacgttcggagtctgaatttaggttcgggtctgggtctagggtccgggttcgagtctcgaatttgggatatgggtttgggtctgttttcggggtacaaggttcagagtctgatgtctggtgtttgggttggggcttggggtcgtggctggggccggggtctgggttcagggccgtttttacgttcagggtccgtgtctagatttaggaccggtgtccggggtttggggtttaaagtctgatgtccggtgtttgggtcgaggtctgagtctaggtctaggtccgtgttcggggttcgtgtacgtgaacaagttcgaatccgacgtctaggtctgggtcctaatcaggtcttgttcgtatcagaatctcaaagtaattatgtgtttttcaaaaattaaaataaaaattatttttagaaaatattaaccaaacacaacttgtgttgtgataacttcaaaaatgactttttgttatcatttctagaaatacttttttgaaaacaaaaagtagaaacaaccaaatatgctttaattttgctctctttttcgtatttctagctaagtatatgtggaatgaaaataatgtatcttacgtacaagtgagcaaagtctcctatttatagaattttatgatcaccatttgattttcaaatctcaccaactcgacgggtgttaccacacctaatttgagcgtattcagacatccaaaaatgctaaaaaattcgaggtgaataaaatgcatgggtgatatgagtcgtcacttaattagtaggtgactgtcacctactcttgatgatgcccaaaaatatcagctttggtaacatgcaatgcatgaccaaaatataccccaaaccctttcccatgccatttcttaacctcaagccattgttgccaataaaagtaacatccatacaaatattatggcccatgaaaatcaaattcaaaatggagaaaacaaaagaaaaattgaaaatatcaaatgaggataaaaagttcaatttattttaacgacaaaatgtaatctgtaatattgttatttgtagatttgatcaagtttgaactaaaattgaatactctaaatctcctaacagcaatatatgatcacccaaaggcattattctctttcctttctcattagcaaaactaagatgcatacatggatccactaatatccttgttcttgtagatctgtttgaaaaagtatgtacactgttaaatcccagtagctgtttctcaggagccccatcaataacctttggcaatctagagtataacatcacaacatggcttccatccatgtctcctgcattcatcacagagatttccacaaagaatttcaacgaattacaagactctatctcgtcaatgcttatgtaatcaagttggttttctccttggtgtagtatgtttttatcagatccagctttgaaagattctgataagcttattttgttgggaactgacaagaatttgtaagtgtaggtgctgtagctcaggccatgtccaaatgaatatacctggcttccagtgtagaatctgtaggttcttccaggatagccacgggaagaatttgctcgcattctcatatcgttcatggggacatcagtgaaggactccggataccaagtcataggaagccttccacctagaaattgtaagcttgatcaagtcttaagatatatggatgaaaaccggaatagaaaaatgtcatagtttgcttcacatacttcagcaactcattttttaaaaaactaaaattgagctgaaaatggttccctttgatgacaggtatcataaattttataaaccatacctggatttgcatctccaaagatgatttctgcgagtgctcttccaccagcttccccgggatatccaatccagagaatgctagcaatttgcgggtccttttcagcaaatgatacatcaagaggtccaccaccagtgagaactagaatcactggttttttactagcagcagccacatgggaaacaagagccatctgtttgccgggtaaaagaagactaactcggtcaagatcttctgtttcctgggataaatcgaggccaaggatgagaacaacaaaatcagcatcttttgcagcacttattgcttcatcaaagccagcatcagagtcacatgatgcgttatggcaaccagttacataatatgccttgtttacgaactcttgaaatccactaaagaggctctttgaggtgcagggaattcctagtgaacaaacaaaccactccttagcttaaagcctagaatttgattatattaatgatataaattcatctgtaaatcaatatcatatacagttaaaaagacctgtatagccaccacccaatttacttgaatcgtttgccaatggaccaataacagccaaggaataatcaatacccttctttaaaggtaggaacttcttatcatttttaagaagcacaataccctgcctagccgcttcaagggccaacttcttgtgctttgaggtacaaacatcttgaggtcccaactttccatacttccctttcaaaggattcccattaaacaatccaagacgtagttgaactgagaaaagattgtgaagtgctctgtctatgtcttcctcttgcacctttcctttttcgatggccgaaagggtatttagatacaagaatgttccacaatttatatccgttcctgcaaatagcagataggcaggttgatctgtaagtctttctatgagaaactagtcatttgcatttggaaaaatttaacaactttaatggaatataatttcgaaatagaaaaatgtacaagacctgctttaagaacatcagcaactgcatcttcacgatttttggtgtaatgctgatattcaaatactgtggccacagcatcacaatcagaagtaatatatctgtacttcatagcatcaaggttttgtacatatgaggctcattcaatcaagtgacttaaaattctaacattgcattgcatttatctattttattattagaggttagaactctgaaaatattattattaccctttaaagccccattcatccctagctatatccaagagatccttacgagcacaagcaggaaccccattaacttcattgtaagaacacattaaacagctagcttttccttgctgaacacagctcttgaaaggtggctgatacgtgtcctcaaaatcttggtccgtaatctattttgtagaaatacataatgaatccagttgagtttaacatacacaattcataaaaataatatatcgtaagctagaacaaaccaaaccggacgagttctgcaaatcatgtattaaaagagtatagtttaatctagaacaaagcaaacccagacgaaattattcaacactacatcaaaagaagatatctttagctaaaacgaatcaaaatttgttgaatttagaaaacatctagtcaaaagaagatatataaagctaaaacaaaccaaacccaaacccagttggcagacaaaaagtgttaccacggcattgaagttatatctactgaaaccttcccacttctccaaatcataagcagtcaaatgcttacaacaagcagagaccattagatcatcactcccaccatcatctttcaaagctctcttctccccaaattcttcaccaacagttgatttccctccctgaaaacccttcacaaattcaacagcataagccgaagcgaccacggggtcctccccaggggtctcctggcctctcccccatctggggtccctaaaaatgttaatagtgggtgcccaaaacgtcaacccagcttgcccaacattatacatcgcgcgagcctcgacccctatagccgatgcgattctgaaccagagggtccggttaaaagaagccaccgtcagaaggacttgggggaagctggtggcagacgaaacgacac

SEQ ID NO: 300927 - DNA, 5282 bp, Cannabis indica
agaaggtccaatctataatttttacaaaatacaggattcaaaatggtatttaccctgttttttatcctatatatagtcctatagtaggggtctttattagtagaagtattttccgtttttggtataactacaaaaattataattcataaatgttaaaagtattatttattagcgtaattaagtattaaggtctatcactgatcattgataatgtttttattttacaattagtataattaaatattaaattctatcactaattatttataacacgaaacatatagatcttatgagaataggttcaagatatagtgtattggtattgaaaattatttgaatattataaaaacttagtttagtatgaaaggactagaaatagtgttgaaaaaaggggtagtgtagtagtgtaagagaggagtgtgagcgtgggttgatgatagcgttgaaatgtgaggagtgagtgagtgagtccaaaagtgtacgtgatttgcggagagcaccgaaagctgcaccctttaaccttttgttttccaattaactcattaatttattttttggacccacaaattacatgtccactccacactactctcctacactctcatcacttactactcactgtacatttttgttttcatacaaattttggtctcaaaacacagccaaccaatgtacactctcacaaaacaggtcacaaaatacaaaaataatattagatgttgaacttaccacgtgctgtctagtgtagcattagtttttggtttgggttaagggttcgaatttcactcataatttcttatgggaaagatgatgtttggccttttggaagattagcttgttgtgactgtatctttcttaataaaataaaaactcttaggtgtatacataccgatgacccaaataaaagagaatgagattaatgccctataacttacacgtggttcttgaaattgtttgcaaaaaagtaaagaaagaatcggcatgttggatttagaagaagtataaccaaaatatgaacaacagttctagtcttttagaacaatagaaaaaataaaatatgtcaatagagtcatgattacacaacaatgacatccctaataataattccaaataataagaatcaaaagaaacctttccaataagagagttatatgagagaatctaagaccaattaagttagagaaactaagagccttgtattgcctcatccgcacaattcaagagatagattgaaagaacaagaaagtctaggcttggcttgagcaaggggagcagtatgtacaatactgccggcggtgtaaccaattcttggaccagccaaagtagcaacgatagcgactctggcacaggactcttcctttggaggtgagccttcaaaggtcatgaaaatgacttcatcgaggaggaagggttcgagagtgcgggaatcttcatgttcctcggtgttcttcttgcccttggtcaaaggaagcttttcgacatattgtaaattatttagaattttttaagacaacacgttggggaatattttcgctctaagttaatgtccatgctctcttcgacttcccctgatgccccaaatttttcagacttgatatccccttgtgtatcgatggaggttaatcaagcgttggttaagattcctacggagcaagagatcaaggatgtggtctgggctatgcctccccttaaggccccggggcctgatgggatgcctggtaagttctttaaagatcattgggacacggtgggaaaagatgttgtggctgcggtttcttgcttcttcgagacgggagagttcgtcaagaatctaaatcagacctttgttgttctgattccgaagaaaatgggtgctaactgctttgatgatttccgccctattagcctttgcaattttacttacaagatcatctccaagttgttggcaaatcggctgcgccctctcctcaaggatttaatttccccctttcaatcggcttttgtgcctggaagatggattgctgagaatagtataatggctcatgaagttttagattccttcaagaaactcaagggccgggaggggtttgttggtctgaaactggatatgtctaaagcctatgactgaattgaatggggctttctggagcgcactctacaagctttcggttttgatgccagatttatcggttggattatgtactgtgtgagttcggtctcgtggtctatcttgttgaatgggggccctttgaagcaatttaagccgtcccgtggcctccgccagggagatcctctatcgccttacttgttcatcctttgcagcgaggttctctctcggattctcttggcaaaggaagctgagggtctaatcagtggttttaaggtgagccgcggcagcccctcgatatcccaccttatgtatgttgatgacacttttgtgttttgtaaggcgactgtcgaggaagtgaacaccgttcttgattgtatcaatgagtacggggcgtggtcggggcaacggttgaatgtgcagaaatcagcctatgtcttctcggataatacggcccgggatacgcagcttgagattgtggagaggcttgggtttcgtaagctgggctcggaggataagttcctgggtaacccgattctgtggactaaaagtaaaatgagagatttcaagtatttaaaggataagatccttgctaagattgaagggtggcgatgtaaacttttgtcccaagcgggaagagctacccttatcagatcagtggcccaaagtgtccctatgtactcgatgtcatctttcctcctccctaagggtctctgtagagagcttgatcaagcgattcgcaaattctggtggacaggaggaggtgacaaagatcgctatttggcccttgtggagtgggatgctttatgtctcccgatggaccgaggaggtcttaattttaagaagtttgaggatattaacttggcccttctggcgaaacttgggtggaaacttgcttcaggcgatacctctctctagtgtaccattttcaaggaaaaatattggggtagaagtggtcaatccttttggaccgccttgctgcctggtaacgcttctttcggagctcgtggtattttggctacaagggatcttattaggaaggagtcttgcttcattattgccaatggtaattcggtggacctgtggaattccccttggatcccttggttagagtggaactctttcagagctgcctttaatccaatgattgtgcctacgttgcttaaagtgtcttccttgctcaatgacgagggagaatgggaccctctgctttcccacaggtggttggttcctagtgtggctagctctcttcatctgattaagagtctcccaagctctcagcatgatcttctggtgtggaaggatgcaaccgatggaatgttctcccctaaggttgcttatcagtccattataaaacagagaggtaacaactttgatgtgatttggaatcgtatttggaagctaaaaattactgagaggttgaagatgtttctgtggaagttgggtagggatgcccttccttttggcagccgattgcaaatgatttttggtaacccggtaaattgtgtgttgtgtggtgagaatgtggactcctggttgcatctcttctgccattgcccgctagctaaggctacttgatttggtagccaatgggcgatccgaggtgagaatctgaacttctcttgtcctagagattttatcctttggttgcttgatcctggctttttaggaagtgctagcatagaggatagagaggccttttccaggtttggaatttgtctgtgtgatgagctatggaatgctagaaacaaagcctatcatgaacaggagtttccgacttgcttgggagtgttagcgaaagttaactcagcgtgttcggctatgagaagggcctgggaggaacaggcccggatcgatgtccaggtgagttgggactctgatagggatcgcctcaatggaagaagaactgtctatgttgatgcggcttgcaaagacttgcgggcgatagcgggtatagtgttgaaggaggcagacggaagtttctccgctgctcttacggtacagctggctgtttcaaatcctcttgaggcgaaaactttagccttgtaccatgctgtcctgtggtgtgtttcccaaaactggcgccaagttgttttcgtctccgattgccaatcgctgatgaagggaatccacagtcgtgcagcccctaattggcgtctggcgtcgtctttttggctgctgctacatgctatggacatgctccctctggccgaatttgtttggctcccacgtactctgaatcaggtggctcataatgtatgccaatgggcttttaattttcctttttctggtgtgctttctgctgaggacttggcccctcttgtggccatgtaactgctggtttttgctctggtttagagccttttatatatgagttccttcagcaaaaaaaaaattataaaaaaaaaaatagattactgaaataaatgtagggatgtaacatatttttcgatatagtattgatataaatgaaaaaaccaaatttatgaatggtactgaggccatgtgttgtactttgtgttcatgtgttggccaatcacgcaggcttttaaaatttttgaatttgggctttccttccttatttttgaaacaatatcaaaatgagaaatttagtaatattttttaatcaatattttgttttctaaattaaaaagatgaaaatattttctaaacttatgctctataaagcggtttttgctttttaattttttaattgagaattaaaatttaaaataaaaaaaataactttcaaaatttttaaatatttttttttcttaattaatattttagactcgaaactccaacctagactttggaacttggaccccgaccccaatccagacaaacccgaacctagatcgaaacccgaactagaccccgaccttggactaagacctgaatcgaacccggacccgagatgttggtgccggtatcggacctggactaggcgtcggtctcagattggaccctgaacctaaattaaataaaattaacaaataaaaatgaaatttacacaacacacttttgtttttaaaattgaaaaataaaagtggttgtagaatacatttttactttcaaaaataaaaattttatttttatttttgtgattaaaaaatttaaaaataaaaatattaccatatgttatatttataaatctttatatattaaaagtgtctatctaacggcatttcttggt

SEQ ID NO: 300928 - DNA, 2186 bp, Cannabis indica
ttaatcacataatcttgattactttccattgtgctgacgacacaataaacaagaatataaatgtgataagggtttggatgaatttataaatcaaataaataagtaaatgataacatgaaccaaatgacactcaaatgagtgatgaaaataattttgtttctttattgatattgaataatagagattacatggaaatagatttttatttagggcataaaatccaacagaatggcagctggaaaaggagacatttcctttggcgagagcaaggtgctagtagctcactggaaaattcaacggtgccaagataggcggggtgcttggaggagaaggataggatcgtacacgaaggtacgttgcatggtgcatccgctaccatgcaaggtagtgggaatacgaatattggtacaaaggacagtgaggtgtcaaagaatgatgaggtgttggtggtccctgctaacgatattactggtaatattggcacacatgggaatttggatttaaatatttcctctaaaaatgttgttacagatttgcctactcctaattttgccttggtcgtgggcccaaatgatgatactgagcttatcccaaatattgggccctccgtggttcaatgtttggatattccccatatttggtcttgccgctcccagaggccacaccatttccctgagctcataaattttaaatggcccagtaatgattctcaactacaaaagatatattgtgaccttttgggccctgatcatactaatctttacaaggcccaaccatctctaatttctaaccctccaagtctttctgatttgattgtccatttactgggttcaaaaaaaaaggaaggcccatacttggtataatccaatccttgagagatacgaagactcaccttttactgatgatgtcaatattgctttggattcgctgaacaacgaatttacatctaagaagctagataatgtgaatggggaggagattacggttgaagctttttagccaagctcgagtaaggatcatgaggagtcgggtgctaagggtagaaggaagaagcgtgcgtgtttgggtggtagcagatcgataagtccacgtaattcaggggtgaaaactagaagaagtaagaagcaggttgacgatgacaatggggctaactcaggtaatctcaatcaattattggctcaatgtattgagttaccaattatgtttgtgaaaattttggaaatggcgaggaggcagccagtttcatgcccccacctgtgccatgaggtgcctatcttggaattgtcgcggtcttcgcagaccggcagtggaaagagccttgagaggcttctctcatggcgatgggatagatgtgatttttcttgtgaaaactaaagtggatgagttgtcgatggttagaattacttgccatcttggttttacaaatgttagtcgtattccttcacaaagtattgttggtggcttctgtgtcgcttggagaaatgatttctccctacagattcaaaacattttcagttctgggtttgaatgcttgattgatcctgggaacagaggtaagccatggactctgttctgcatttacgtcgacactccttatggtaatgagaagcacgccttttggtactggttttcaggtttagtgcaaaggtgtaatacaccatgggtggtttttggagatctcaatgtattcttgaatgctcaagagaaagagaggggtcatttgtttgacttctctgagggggcttttctccaaaatttcttggctgagactgggggcgtggatctgggttacattgggccttgtttcacttggatgaaggctcgaaactctctacatactgtcaagaaaagattggatagagcggttgcttgcacttattggtgtattcatttctgtcaggcgggagtcacataccatcctatttttgcctcagattatgcacctttaatcctggatacaagctttaagcttctcttaaggcaaagtctttgtcaacatatcagaaccattctcactagtatgtaccttttctaagttcaaatctttcatctcaagcacatcttgaatccaatgatatctaacatcaatatgcttgatcttgaagggaatgttgaactcttggagaggtgaatggcactctgactgtcacagtaaacaatgtatctttcttgttgcaagcccaact

SEQ ID NO: 300929 - DNA, 2517 bp, Cannabis indica
gataaaagtccttaaatttaacaatcttaatagttcaaggggaatttttaacggccaaaaaaagttcaggaggctaatagatttagtacatgtcaaagttcggggggaaaaattgctaattaagccttatattaatgtttacagtttatcttttggtaaaatgtttgttagaacaaaaaatggtaacaatgacatattcctttcccttgcaaaatcaccgagcagcaataggtgtgtttgtgcatgcacgcagatacaaatgtaaatggggaaagaaataggagagagataaggacctgagcagaagagattacttctggtgaaaagcggacataacgatggctaccataaactgcagaactaacatcaaatccactgccaactttcccctgtgcaatgcaatgagcagtttgagctattatatgcacctcatccagatctgaactgcacttcacgtgagcaagatcaacagctcccaggtagtgaagcaaagcagcaaccactgaagatgtcatagcagcagatgaacccaatccagtttttgcaacttctggcttgctattttcaccactggattcctcagaattgaaagtaattgatgcaaaaggaggaagagcagccaatgattcaggcaacaaaggaagtccaagtgcttcaatctacagccaacaaacctcattcacatcttcaaatagtttcataaaataatttagagaaaaagcagcctaatacgttttagcagcatatagaaatttgcaagcttcaaaggttatatattatacaccatgatttttcataaacgtgtaaattatggatttgacaattccaagaatgttttcattaaccatatcaagcacttgatataagaaaaccatgtaatatatagaacacggacaaggtaattacctgattccggtatgaataaaagtcattgctacctaaaatggtgatatcaagaccttcaagaaaaatcaagatgagatatcagaatatggatgttcttaaccatccagttgggaaaaaggtaagaccatgggggaaaagaaaggaagaactaccttgcagtagtagtttttgtaacacttccttcctgtccttgtcagctatagcatatgcagcagctacagagtactgcactgcttgctccacaaaagggttccccgactccctgaatttaactatgggatagtgagtgtcatcttgatgatttaattaacaatctaatgttagttcaaagctaattttattagtggcacttagtaagaaagcagagtgagggatcagtgttcaaagttgacatctttgaaccaaaccagatgcagcttcctctgtcatcttataactatagatgtcaatgatatatatatatatagccatgtctagaatgaagaaaaaaaaaaaaactgattaagcaaatcaaatacaaacataatatcagccactataaacttgccttgaaacgctctgaagagtcagatttttcagtgacaacttatacatgctttctctattaagctgaggagatgtcactttcacatctgtccatgcctggaaaaaggaaaaaaggccatcaatttaacattcttgagcaaagggaagccatacacagtaagaaccaatatcatatcaaggctagttctataggagaactcaggctgccagttaatcaaaaaacgcaataatgtaaaattcaacatatggatttattattcagtatcattcacagcagaaaacataagaagtagattgtggatcaattgctacagttaatcaatattaaactcacccaaaaacaactatcgggcttgatttcttcgagaaggggtttaacaatggcgtaaaaacgtgcgcttgtactgagaacaagccctggattcggtctctccaaaataaggtatcccccagtcatcaaaaccttgccaggagcagaaacaaccctgcacccaaagaaatatatatatattttcttttaatgatttgaatctaaattaaattaagaaggcaaatggaggagacaaaaaagcttacaccgccattgagggaactgcaaatctgagaagcaaaaatggtgaaacggagaagagagttttagagttttattatgattgtttgtatgaggtaacagattgggagagtgagtaggtaatgaagaagacaatgaacagcacagtctcttagattacttaaaatgttgtcagttgtccagttttgacattgggagatttttgacccttccaagttccagcaaccaactccaccattgaccctacaagtacaaataaaatataagagaaatttgcggcaacccccacattttcaattgttactactggtattcattaaactgtcacagcacagactgcctgtaccataccacatcgtacaaaaaatgtagtttgaaattttgtgcggcacaattataatttgtaatcacacaatatagtgtaatttacagttttaaatttaataatcgagttcaaaccacactgcattatatattataaaaatattaatttt

SEQ ID NO: 300930 - DNA, 3905 bp, Cannabis indica
aggcaaaaatcctaattagcccacacaaaatgtgcactaaaacattacactagagaaagggtcaagaaaatcctaacttttaacactaatcaaggaagggtttcgttatctctaaaaaaaaaggggaagggtttcttaaaaaaaaaaaggtttctatcattttgagttctagtgttttgacttctacaatgaaccttttgtttatcttttggtcacgtattatgtcaaatagttaaaaatggtctccttaattcgactttggttagaatatttttgtcatcatacttcatttacgtgatcactagcttagaaaatgtgtaaattaatctagaacacaagaaaccaaagtagtattgacctaacaagaaaagtacaagcatctttccttattaccaaactaactttgaagaaatccataaccctttcttcacaaactctacacctcttgtcaactacctcttgtcaactatgtccttcaatcccaccacagctaacaggcatatgcatgatgtgtgaaactttctaattctaagaaattcaactaatggtagcaacagcgctttttctaagacaatgactaaaataagatccagtcaaagtttaagaggttttactatataaaactttcatttataccaaataatacatgcatttcttatagcaaatgcaatagaagagagtgaaatactttgaggtgtgactttggaaccaggaccatcattatagttcccagctttccaaaattgacgacaaattggcgcttgagaccttgatagggttgaagtatcattcgccgaagattgcccttgattggtaatgttatgatcagccttcagagactttacactcccattttcttcgtttccttgtatagaagatttagttttcaacatttgatgcttgactagttcaactttactacagttcttcagttgtaacgccctcccaaccaaatcagcttctaacttaacagtcttcaccaccacctcttcaggttcatcgtcgctagataagtccacaatgtctactaaagtcatcctgagggctaaagaagataaacattcacacaactgagtaaatatgaacaagaaatggggggaaaacaactaaagaaaagaaagcgtcattgtctactaaagtaatcctaagggctaaagaagataaacattcacacaattgagtaaatatgaacaagaaacggggaaaaaaaactaaagaaaagaaagtgtcaacatgacaaggacatcaaaaccacccaaccttgctaaaagagatgatgccaaataataagaaattgttagctcaatatatgatagaattctaatgctagcaaagctttttgtagttttagaatggggatgacctaaaaacataattattgatattatttatatgcattatgtttcagtttgcagatgatactttgtactttaatgacccctctcttgggtatctatcccattttgtctagcctcacaaaaactttcagtttgatattggggttaaagttgaatatgggaaagggtgttttagtagtgaatgtaaaggttatgcttaacactagaagatccttcaggttgcgagcagggtctttcattatcatgtatttgggatagaaggaacaagatgctccaagcataccaaacaacataagtgtgattaagcaaaaagagtgtccttcaagtacgtccaacacacctcagatggaggagcgttttaaagcactggagcgaatggtgagacttgccagaaacattgaatgaccttgttaaagattgtcaacagtcaatggaagcattgaaattgagcctcaccatctgaatggttggcaatgcacttgcaactaaacctataggcatgacatttacaagatcaaagatgttggacgctaaagagttggaaacaaatttatttgatataaagtactacttcatattcgtcaaggccaattctgaagatggtaaggttgtgatggatgttatgtgcatctgaaccaacatagcgttcaacctttcaaatttataatggtctcaagtttctccacgtaagacatcccatgcaaagagaaatatcacccaaccttcaaaactcacacattgagattttcaccatcgaatgaagatagttcaattttagtgattgaatacctagtgaaaggcgagttagcttcacaacccaaaaacatcccacttgaggacaagactctcgccttacagtaacaccgaaaaaccttccctggcgaaaaaaatagtcaaatttacttaccaaggtcacaattctatgctccaatccaagtaatttctttatctcgttgttcatcgagcccatttctcaaataatgtagagatcacatcccccacaaattcaattgcccctgtcatcactctgataccaattgatatgttcacatatatcaaacaataacaataggtttaatgggaagaaaaccaaattgtgtttaatagagttaaaaaaacaatgatacccaaagattcaagagagacatggctttttccttgaaccaaaactcaatgcacaataagattaaatatagcctactcttactctttattctcctaaaccttccatccaaaacaagaatcccaaagaaacctaattcaaagccattacaattttctaaaaccatcctattttccaaaattcttccaacttagattacttatgtcatatgtaggagtacctaatcgaaagtctattaactttttcctttggagaagataaacacaaatgagatacttcataaaaaatgatcgtacatagatttatctccatattgcattctttgtaggtcttagcaaaacacaagatcaacattttatccattactctttcttaacaaagatctggtcttcgtttctaatgatgtcaatgttcaatgagtatgaccttcccattggcaagattttttcttagattatagacaaaattagtaaggattaaaaaaatctagattgttgccacaaaggcaacttgttgaacaataaggcttgagaggaatatgaacaattaagaaaaaggttgaaatttagttctttaaaaccaaaaatttcggtattttccttatctgaccttatagagtggaatatttggttgtaatattagatgatccacagtcatccttctttctagtaggtgatattacaatcttctgtaaaccttttggtttcttctacttaatacaatttttgtttcgtatcaaaataaatatatttatgttttatttgtgttttagcctttgaccattatttactttattttgttgtatcaagtgcagggaaaaaataatgacaattaaaaaaaaaaaaatttaattctatcagcttcgaagtgaaaaagagtataatgacttcaaaagagtaaacccaaatgaggcttatgggtcttctgggttgaggggaatgggtaagagaagaaaaaatatgggttagcttgaagaatattatcttttctattcatgattagggttgaagttgtagaaggggcaactcaatcagtcagtgctgacaatggcagagagctttgagaagggaaaagaggttgaacagagaattgtataacagtgaaatcaatatgacatacatattcaactaagcaattttgactttattcagactaacttgaatataaatcgaacatttttttgtctaacaaagagaaatcacataataaaagactgccctttactataaaaacactaattattcaacctaaaacgttttacagaaaagcattcacagaaagaactttagttaaagacgatggcttcttgtgtagagatcttaccgtagatagactctcaaaaggcaaagatttcaggaaaggcaaactggaaaagtttcgaacaagaggattcgaaacctcgagctcccgcctgaatcgaaaaa

SEQ ID NO: 300931 - DNA, 4589 bp, Cannabis indica
cttcaatataaataaaaaatactttagtatagtaaataataaataaaaaatatttcagtatgttatttctttcgttttttttttttgtttttttttttttttttcatacgtttaaagtaatttttcaactacaccaataattatttagtctcaaaaaattatactattacacattgtcgaaattactattgagactaagggactatagcccttccaaaaaattcttttacatacattttcatataaatgttaacatataaaaaattaattatttgtagtaattaataattatcccccccacaaattatttttgtgtacaatttgctctccaacatataaatcttcccttcaccactgccattgcgatataatttttaagagaataatttaaatatatgagaagcatatatttttttcgtcattgttggataaaataaccaaaatcaaaaataacattttagtttcttctatatttagttaactaataagtaattatttttaaacttcaacaaaattcagtaacttcatatgttactaaaaaaagtattttgtttttatatattttttaaaaaagatattataatatacataacactttgttttaatttcaaatcttgtcttttgatgagaatgtttctctaaatcgtttttgtcatattgaatttgtctatgatcatggttctagtagttattcggtgaaggagttagaggatctctacactaatatagatattgaaggagaagatgatgttgttactgcgtttgatgatggctctaatttatggaagagttctgctaaaagttcttcattttgcttagcgtgccttggcagattgtttagtgacccgtattcaacttcaaatcaaacatgttcctatcgaaactcactgcttgttctgtaataatgccgctgaaaccacctaccaggctaccacttgattcttggttgccccttttcaaaatcctgttggaatagatcagcagtgacccttcctccatcaacttgcactagttttttgactggtttactgctacgtggtctcgacaaaaaggggaagccattgaagaaatactgatggttagttggtccatctcgtttggaataatcgtacatgttcgtccacggaagttgtttctacggcacatcaaactcttggtcaattaatggaagtttgctcaaagctgttgctttgaaccgctgcatctgaattcaaattgcagcatcaacatcgacttttggacagaaccagcagacggaatgatcaagatcaatgtggacagagcaacgttcgaagccaataattcttttgggacgggttttattgctcgtgattctaaaggagttgtcattttagcttcatcaacttattcgactggctcctcaagtgctccctttgctgaaatgatcagcatcaaagaagccttaagttgaaaaaaggcttccaacttgttgaatactgttatcgagacggactgccttactgttgttcaagctttgcaaaatctggtggatatgccatcgttgtttggaaccattgtaaaagattacaaagttttattgtcttcttttattaatgttactatttgtcatgttaagcgatctgctaacaaggccgcccactgtttggctcgtggctcttgttattggtctgatcgtaatttttcggagagtactcttcctagtactctcaagacttttgtgattgtggatttgaattaataatattatccatttccattcaaaaaaaagaaaaaaaaagaaattataaattaattttaataacttccttaaataacttataatgaaactatgtagtatttaaatatcatatgaattacattacaaaaaaaatagaacaacactaatcttgctaataagctttataataactttttgtactgtattgtaatttatttatttcttaattacatttaacattaacacaaaagttgttagaaaaaaaaagtaacacaaacatatcttagacaacaaaataatacaagataatctaaaaatctataagtgaaggtatgattttaaagttaaatatatatcttaaatatataaaataagtaaccaaatttcaaatagctaaatatgtataggtttaagaagaaataatatctaagtgatactttatttacatcaaaactaataaaattgtttttttaaaacaagattacaaaaaatttgggaagggtgacattccctttttttaggggactttacactatatactaaaatttttaatttttttactttattattgtggagcgaatttttttttcgaaaatactgtgtaagttttatattgtttactgtatcaagttttcaaggttgttctacggttgttttttcagttgttctactattgttataattgttctgttttgttgttttacggttgttttataaaaagacagtatgtttgtaaaaaattccgtgtcacagtaaaattataaatttttatttaaaatctaatatttttgtaaaaacctatttttctatgaattattttgaatccattaatattgttgacttgcccttcggtattttcataaatagaattaatgaaagtatttttctaaataaaattaattttatgtatagaattgaaaaaaaatacttttatttttaacaatttttgtgaaaggaaaggtgtatctttaacttgaaccctgagtcaaatggcaacaaaaaaaattcataggcacaataatataaaggcaaaagttctaaataacttgattagtaggctaataatttttgatttcatcatgattcatgtgtggagatgagactatttaattttccatgaatatatttttatgaatacattttttttattaatagatttatgaatacattcttatatgatataccacagagaatccataaatgcagcaaaaaaattgtggttgctaagtcttttccagtttgcttgctagtcttttccagtttgcttgctgtctagaaaatattaatgttgaacccattataattcaatgaaacacatgttcaccattttaatataataaaaaataatttatagtataaatatttaaatttaattttttattgtagataaatatttaagtttaatgtttaacggtaatgatatctacgttatattttgaaaacttctgtagatactcattaagtgtaaagttattatctatgtgttatttttttattggtatatttaaattgatttttaaataaaaaaatcattaatttgaatcaatcagggactattatgtgatctttaacttgacacttaacggtcagatactgatacttacgaaaattttagaatataacaagtattaataccatcaaaaattaaacttattcatctataactgacaattaaatttaaatatttatggtacatattaatctataataaattgtactggctcttaagtcctaacttcatttattattattatatgtctaactaacattaataattaatatattatatatggcagcgttggagtagcctttaccataaaatgcatctatgtaataagaaataataataaaaataaaaagaatgagtatctttttcttccacatacaatttattttgtccttatatataatttataattttccatatataatttctttgtgtccacatataagtaaaagctataaatttttatatgtataacacactctcactcaattaaactattaaatctttacaagtattaattattgttgtgggaaaaaattgcaagcccaaataattataaaaagccaaaaggtctattctaaaaaaaaaaatactatatattctattaaagatatatcacataaaatgttatatcctaaatagataacttatatatctgagatggaatgagataccacggatgagataatatatcccggataggataagatattttaaataggatgacatatctcagatagaatgacatatcatagctcaaataggatgagatctcacagatgagataatatatctcggatgggatgacatatctcggatgggataacatatcttagataggatgacatgtctaggatgagatgacatatcttggatgggatgagataccatggatgagatcatatctcagattgtatgacatatctcatatgagataagatacagcgaatgagatgacatatctcagatggaatgagatattacatatgagatgacttagctaggaagggatgacttatctcaaatgagtgacatatctcggatgagatgatgacatatctcgaatgggatgacatgtctcggatgaaatgagatatcacaaataagatgacattgttagactatattatataatatatgaaatatagcatatatataaacgatatgcaatgcagaaaaactataaacatatcgaaatgtatatgcaatgaaagatcaaaaaatacctccagccattgatctttgaacttcaatctctgcgatagctttagtattggagttcagactttctcactctctcaactctctttagatggaatttggtgaataatcagaatgagtgaggagctcggggaccaagaccctatatttataggtgagata

SEQ ID NO: 300932 - DNA, 1350 bp, Cannabis indica
tttacaaagtttctctcaaacttttccctctttaactctctgtctttctttctttctttctcgatctctttcctctctctctctaactgagatgcaagattgatcacatactactctcttctaaagcatcttttcattttatcgaggtagagaactattagatgcaagtgaatgagtctgttcttaagttgggaagttagttgtaactaattttaatattgttgtacatttctggttttgttatgtaattgtaataagtagttgatagtgctgaaagggactacttatatgggaataacaacaatttcggcctaaatttttatatgggcagtcgtagattagttttcctttgtctctaagggtccaagcttgagttcgtttctcaatcaccaacctgtgtcaactcccagtaagttcctacagtgcttgaacttgctaatagtcacaatcttagtccccatatctgttgggttatcctctgtggggaccttctcaatctgtatctccccttgtgtcacattgtccctaataaagttagtttatctctacatgtttagttctgtcatggaacactgggcttctacatagatgaacacaactctaacaatctgagtagactctaggtacctctttcagtaattaatttcttctaataatcctttcatccatatagcttcctttattgcctctatagttgatatatactgagattctgtagttgacaaaagaaactacaagttagagtttctaactcacacagtttcccccaagcacgataatgtaagatgatgtagactttctactatccctacctccagcatcactatagccttcaatagcggtgttgttcttctgttgtttgtaggctaggccaatcttagttgttctagctaggtatctaaaaacccatttcattgttagccaatgaattttctcaggattagacatgtacttgctcaaggtactaatagcaaaagccaagtctggtcttgtataaaccattaggtacattattattccaactaaacttgagtagaagggaccttcctcatggctttattttctacttctatcttaggacattgatccttaattagtctttactagctagtaatagattgagaagttgtttttgatccattcatagagaattcctctatgatttttttaatatagttttcttgggctaagaacacttccccaagcttctggtccctctttgtagtaattcttaggtcttagaagctatcgccaggtctttcatctcaagttcagtctttagtaaccttatcattccatcaaccttagacctttccttaaagataattaacatgccatctacatataaca

SEQ ID NO: 300933 - DNA, 4707 bp, Cannabis indica
taccagctcatttcttgcttgataggaatatcccacagacatcgatccttgatataaataaaattgacccatctcacccataaaatatcttgtttgctagcgatagccaaaaggtatttggccattaaagtcatattccattttctcccttcacaaaatccaacaccaccaagctttttttggaagacaaattttctcccaagaagggaggtgaagtttactcttattggcaacttttctccataaaaagtcacgacaactcttatcaatagcagtagtaactttgtgaggtaagataaacaggctcattcaaaagtttctgatgcctaagaggactgaatgaatcaattgagctctaccagcaaaagacagatttctactatatagcccaacagttaagtttactactgagcttatctaaaatcacaccacagtccgataatttccatcttgtcagtctcaaaaaaacaccaagatatttaagagggaatttaccttcagccatatggaccttctcgaggatattagctttgcaatcatcattgattcctccaaagtatatatgggacttcgagttgtttgcagacagacccgtggtatcataaaatctttggaaagcatcaaacataaaattcacagatgtcatattacccttgcaaaatataagaaggtcatctacaaaacataaattcatcagtctgagattcttacacatcaaatgaaatctgaaccccttattattagaactttgagccaatttcctggtgaggtattccatgatcagcacaaagagtataaataggggttcaccccgttgtaataaataactaagaaattctcattcactttctctttctttcttcttcttcttcttcttttttctcatttattttatattattttataacactataaaaatattaaaaatactgtaaatttgtattttataaatttatgaaataataccttttagatttaatgccatatttttgtaagactaagttttttttttttgagataattttgtaagactatgttaagagagctaaaattttataaaatgaataattatataatgaactatttttataatttttattaaaatattttacggtattttataaaaagaaatacaaaaataataagaaaattatataaattaataagaaaataacatctaaacaacaacaaaaaataaatacaaataataaaaaaattaacaacaaattaataagagtggaacataaaaaatatatcaaaagacattattttctataaataaaattataaaaatcgctgtatttttgtaattttttgtgttatttttgtataattgtgaaatccctcaagaaaaatacccgaacccttaataaagcccaatttattcactgggccagtggtccgttatataaataaagctctcccgattataacaaggaacgcctccaatgctgcttctggtagcttcttcttcctccttctactcctaaatcgcattgagaacactctactgttcagttccttccaggtccaatcatcgcagctattgcacactcaaactgatctgatacttcctctgttccgagctctctacttcaatcttcaacaatggcgaccgtgatgcagaagatcaaggatatcgaagatgaggtgtgttttcttattcaattgaaattttgaacccagagtgattagatgaaatcaaaatcaaaatttcaaaaatttatccatattatgttctcacagtaatgtgaactttttatttatttatttattttatctataggtttctaagtggtggtttacctttaattctttgtttctgtaaatttgttcatggggaaaagactactcttattattatttttttctagtttctattattgtatgtattggcttaaagcttctattagtctatgctgtttgtagtttgtaagtccatacgaaattattggaaagaaatagcttcacttgttttttctccaattctaagattgtatgatggtttgggcttttctagaatgatgggttttagataaataatgggcaaaagtttatgtctggttcgtgttgccatttagtgcctactctgtttcatactaaaagaaatgtatctataagttttcggtgctgaattttagctggatgtatttaactgagagagattctgatgatttgaaattttgagctaataatatataattcccttgtttatgcagatggcaaggactcaaaagaataaagcaactgctcatcacttgggtttgctcaaggtaatttttgtttttgttttgaactaaagagaacgtcaaagtttcttcttaatttcattttatttgatcagttgtatgtgttattctttcacttgtgttgatttttgtgaaaatttgttgtattgctttgtccaaatgagttactgtcctgtatgttgttgtccgttatttgataggctaaacttgccaagttaaggagagatctccttacacctacgacgaaaggagctggtggtgctggtgaaggatttgatgttaccaaaagtggagatgcaagagttggcttggtgggttttccatcagttgggaaatctactctattgaataaattaacagggaccttttcagaggtatgcaactctcttctcttgtttctctctgagtgcaactgcaaattaaattaagtctcaagtatattatcatgttcttgcatggaaataggtgctatagttatattttctagtttgaaattttggtaattgtttaaagatacaccatatttgatcaaaagtttattaataaaaaattaagaaatgttagttttagggtgcatacacgaaaaacaaaaagattgagaattagtttgcaaaataattaaataaaaggagggagatcaagctgtcaaacattgtaaaagttggggatgaagtaattatttttggtctatttttaccacactactcttttaaattttgaattttggttaggataattaataacaaaagcctcccttcgctaaacaaaacaatcattttctcaaatcttcacaagttttatatatgaaaactagatttgatttttgacttagggttttttcattgttttctgttttaatgttgactagaattgatgttctgtaaacattaagttaggggaagaatttttgctattttcaaaatacaagaatggatcaactaattttagccagacttagagaatattttgtttttagccctattggtaataatgtttcctgttttgtttagaaaaataagcatttcaggattaaatttatcaagttcccaaagttttatgctgagtttcatgaacacatttcctctctgacattaataataaatttaaaagaatctcaacttgaattttgttgaaattttaagcaggtagaacgtacacataaaaaataaataaataaataaaaaaggaagaaaaattaaagatgtgactgttctgttaagactaaactccaaatttggttattgtttaccggactttctaggaatctaataagttatttactgtgaaattaatttattattttcagtattctttgtatgttcatgtgtgttcagtctttgatgtatcttcaaagtttcatgatactttatgtttacaggttgcttcctatgaattcactaccttaacttgcatcccaggtgtgattgggtaccgaggtgctaaaattcaggtagtgggctttttgcatttttactcatttagtttagagccacttagctgttccgggttttcttttcgtatattccctggaacttttagctgctatgaatgtgattaaagtatgttctagaatatgaaattaatttacttacatattaaaaagagcatagtaactaaaatgggctaacttatctacaaactgccagctgtgttgatgtaatttttgtaagtgccattgtgatttgtctggtagaaatgctaggatcaatgctttagtttcggactcacttcttttcttctttgtgtttcttttccttttattccctggaacttttagctgctgggattaaaatttgttctagaatatgaaattaatttattgtatgtattaaaaaagagcatagtaactgaaatgggctaacttaccaacaaactggtcgctgtgtttatgtatttttcttttaagtgccattgtggcttgtctggtggaatgctaggatcaatgctttaattttttactcgcttatttctttctttgtatagttctttgttctttttccaacattttatcatttaactcttgtgctttaatgggcagcttttggatcttccgggaattattgagggtgcaaaggatggaaagggtagaggaaggcaggtaaacatgatttttttttctccctacaatttgcttattggcaagaattgtttcacagcttatcattgtttctgtttttgttaatagtaatttgatgtctaatgttcagtttattggatattaatttgtttttattcatatggaactgatgctgaatgaataaggacattatatctaattcacttcacttgtataaaatggttgtttgtgtcgtgagactggtaatatttttgtaaattgtgatagaggtttaactgggaggcacaatcaaggatttttttcttcttctaaatgtattactttatacattagaatcaataaaaagtatgtgctggtcgagattcatcttccttcctgttt

SEQ ID NO: 300934 - DNA, 2573 bp, Cannabis indica
atcgtagggttgaagctcaaaaatcaatggctgaagaaatttttaatctttcattgcatatgtttatagtttatttttcgcaacacatatcatatacatatgctttttttcatatactataatatagtgtaacactatgtgcatatatataacagtatatataattagcagagagattattgtatataatatatctatgatatctatgagcagaattcaatggagaagagagataaatttgttgtgcatgaatatatttataatgaatatatttatagtgtacaaaacatatgtatggtaaataaataagacaaacctacaacctttactagctagaactagttagtacgggtgagtggcccaaagtagcaagtagaaggaaacgagcttaatatcaaatatatcctttaatataataataataataataagtacactacttgtaatacaatgaagacaacttctgatgagaaaagtggaccaaattttcggagacgaaacagtatatataatattaaaagtcatagatatagatacataggatagctatcgctgaaaaaaaaaatctagcagagcttttcttctttttcttttgaagagatagaggagagctgcagttgatatataatatttaaaaacactattgagaacgagagatatattaattaggtagcctatagcttagagtttgaagtttgaatattggtgttgatcgatattttcaaaagaatataaaaaaagccacatacgtacgtcacagttccaatgatcagacctagctacaaagaacaatacttctagtattaataacctctatacgatttataaaataataataataataataaactacgtgcgtaagtgtacgtacaatactcacagtaacagattaactaattattagttgatgaacaagataatgatctaatgaaaaattatgtgataaagaccctctcaaaaaaaaaaaaaaaaaatagatatgaaaggtaaattggggttctcatggttaaatgtaaagcatgcatggaccaaaaaatacatttgagatgtgtgttattcttgcaccctataccatttataccccagccattttaaaaattaatttctctctctaactctttgattctttatcttcttctctcatttgcccaaaaaccttgaaactccaaaaaccgtcgacttgaaccctccaccactgagaaccctccatcaccacatagagatagtaagcgattgaccactgcgagaccccatcaccaccaaaatgttgagaaccgtacttcatcactgtattttataactgtcagtttctgtttttctattatgttagctgggttcaagggtagttttatcttttatctttgtttactcttttcatgtataaaaggttgtatctactcaattttcaatcaatgagaatcagttgtttcttttcgtttgtttgttattctgttccgtcacatggtatcagagctatagctctgaatctcattcatcatcttcttcgttggttcattgatgacttcatcgccaatcatatcatctgcaacaagccagtcaatactgtctggagctacaccatcatcgtttatacctattgtattctcccacaagctggctacaaaatttgatcacgacaactttcttctttagaaacttcaagttccttctgccattaaaggtcacaaactccaacgatacatctaaaaaactactgttcctccagcaagattcctctctgacgatgatcgtgctgctgaaattgtcaatcctgccttcgttgattgggaacaacaggatcaattactattttcttggcttctctcatcaatgactaaacccatcctcacacgtgttgtgaacagtgaaaccctctgctacactttggttagttctgaaatgtactttgcatctcatacagaagccaagatcgatcaatataccactaagttgcagaatttcaagaaatgagctcttactctcaatgagtacctactcaagatttgttctcttattgataaaattaattctattggacttactacttcaaataaaaacatgttgctaccattttttgaggacttccatcctttgattatgacacttttgttatttttgtaaattctcgagctgaacctctctaatttactactcttgaagctctactcttggctcaagaacatcaaattgaacgcaaacataaagatcttgactctgcttctgtgaatcatgctaatttttatctcaaggaaattcgtcaaatcaataaaataaagatcactggaacccttatgctactggtggaaggtcaaacaacaatggatatcatcctggcaataacaaccactctggtggaaatggcttctcctctcgaccacctgctcctggaggaagaggcaactttcattcttttggaactgcaccaaataataattcaaggagagtaaccaatttgaatagtaagcctgttggaaatattttaccaggatctagatttactaccatgtatgtttcattaacatcctaatatgaattctaaaacaatgaaattaacacataagagtttaagaaaa

SEQ ID NO: 300935 - DNA, 6110 bp, Cannabis indica
tgtcaattcaagaaatgatcaatgctcagttgttgagattgaaactcttttgtcatctctgagcatcgaatggtgaatcatattaaggatcttgattctatcaatcttgctactaactgtggttttcgattcaaaccacaaagttctcccaatgcttctaacaatgcagaatcaataagatcatttttctgcttccaattcaaccttcaatgatcaaggacgtggtacttagaatccctatgctatttcacctaggtcaatgcaacaaggttaatccttcaccaactctccttctgctcccgatcataattctttctcaactttctcatctgtcactttaggaaaacgacctgtgtgtaaattgtgttcaaaagctggccatcttgcttcacgtttttatcaacgtttcaattgtgtttcaaatagtattgagctcagaagcgatattctaaggaaagctcgtaccactccttaattatcatattttggtactattaaggtgtactaagacttgaaattctacctatggtgtagaatgccaaagggtgtggtggacaatatatattcagatgcttaatttgtaaatgaattaggattaagcattagaaattagtaaggtttttatgatttgttaaatttctcaagtaacatgaaaagagattgctaagaatcatgagtatgtctgatttcgtatgtactactttattacaagagcttgtaaggaaaggtataagggagatagtatgactgtacgtgactctaaagtccatcattttggataggaaaccgaaattcatctttatgtttgaacaatgtctatagagggccattattatgtagttgaagtttagtatagcttcctacctttacacagatggctagtcaagaggggcaattttagtactaaaatatatattgcaagcttacgtgatgaatcacaagaacttatagaacaaatatctgttttgattaagttttcatacaacaaacagttattaaagtgtgacagggatggttccatataagatgctaaatagaatgaagtgtcattcttgttttgaaacaggaaatatctagagctgaggtcaattaagcagactaaatcccaagtacaaaaagctaccacaattaagtttgattttcaagaaataagtaaattttgagatgagataaagagagtgggaagggggtcggtttggggctgagcaaaaacaagaaaaatgattttcaatttcaataaaatttcctttttgctaaacataattcaaataagaaaaattacaaaaatgttcctaaggctacattccacatatacatgcattataaggttaaaaatgtcattagtcacacaccacattatccaaataatcctctaaatattcatataataataaaatgtcgatataaaatcctgaaagtgtatttcagccccaaacctggttcggcccgaaatactcgattgtgactataccgcgccgacctgtcaaaaatctcttgaaaaaagacacaacaagtatactacataataatatagtccataagcacgcaattaaattaaatttgttgttttacccttctcgggtcaaaattactaaaatgtccttggctcaccaacgaggtcttaacatgtcatatatcaaattaattcacatataataaattatataataatataattcgacaataaatacacatttaactagtaaggattcgctgatccatttttctaatctcaggacattacatcacatttgtagcaccaacactaggaaattctataaacttgagttttatgatgtaacatttcgtgatctaatattaaggtattgctaagctagctagctaaggcttccttaaggtttttccaccgaatttgcatttaaacttgttctagacatttcctacttaggactttttccactgtattggcctttctagggtaatataagttaggtaatcccaatcttgagctaattttaagcactgcttctaatccacattccaatctttttgagtaactaaatattttaatagctaaatattttaagttttcattgaagaaatagttttgccaattcttaagtacaaaatctcaattcacaagttccagataataatttgagtgacactacttatactcctttaactagcaaggagaataagcagtaacgctaaaaacttacattaaactgcactttatatcctgtccaaatgcctcacaatagactatgaacttatctcaattcatcaacttggactttagcaattggaaaccagctttacatttatctgtccatatagatcgctactttatcttaattaactctattaaaagcgttgagatcttggaataacctttccatattataataccataactaatccaaacctagaaaacttcaattcgaataactgtctctgaccttagtcaaatcctgatcgattcaaccttaccccgtgtcgatcatgatctcatataaaaccatccatagatgttgcccatactttcttttttataaaggtgccctaggatatcattaacatgtactatgatgtatgttttgagaaaattcttaattatcctaatcattagatccataacaacagcgtggattagttcaaaagacatctagaaattcatgataagtacctagtacgaaaagtagtagttaaaattctttcccctcagattctcaaccaatgataacctgagcaagggtcattcataaggaaaattatctttccctgaaactgattgaagcattcatatataactccctaacagagtgtatttattcttgattgataacttgcttaatcctctatagttaacattcatataaaaagatctatcttccttcttaataattaacacttgggcttcctaaggtgatatactaggtcaggtaaatcctaagttcatcatcccctaaagttgccaatttactttcttaagtcttgttggagccattatgtatggtgcctcagaaccacctctactctaaatgccaaacaacaacaaaaacatatttgttgtggtgataagttaggaaaatatattctgagaatacatccaagaacttttcaccactttaatatccataggctgaattgtctcggccaggtggtatttaataccatcgctactaattctacgcattcatcccatgatgagtctttatattttatcatcgtggaaactagagtctaaaaaccctctgccaatatcataataaaaagaaaacataaccttcaggttaaaaagttaacatttctacttacaatccatactaacggcttactacaacgataaccccattctaagtaacatcttaaactctgatatacccaaatctatgagaccagagttcaactttctattctcaactctaatcaactgcctaagccaccctttggagataactaattttttgccaagtaatagagtttcaaatccctatttcatatttatctcaggatctatccaatttattgattacccttactaccacatgttaatgtgtagtttcaaaatcaattatcgcagaattaaataaaatagttgataagaaattgacatgaccccactaagggactatcttctacattagtttgggtcgtgacaaactctcaaacatggaggggatttggcctcttgttctggttccttcttctatagccgtggacaatttttcttgtaaagtcctacttggccacaataaaaatatttccaatgcttacactctcccagatgatgtttcttgcattggaagcactctggataagtataataacttcaatggttactctgatagccactccgtccttgtttcccctaaaacttctttccctgactcgaacccactgatatagatgcaacttttctcttcaggttaaccaaggaaccagtaccacttccttcacgattagaagcaaacaatacagtatccctaccaacaaccaaagttcctcaggattcctgaaccaattctgtagtgcatgttgttggaggagtattcatctcatctaggtttcccaaaataactgaaggtccttgcatcttatattttccaccagacagttctatttggttactagcaataaacttttctgttggcaactctaggatttacgtaatcgggacatggggtgaaggcacaacaagagatccatgttgcctcatcaccataatctcctcctcaagttgttgaatcctagcctccatcttcacgaaccttggctcttaatctaacagagactgaggtggattttaataaccacctctgtaagttcttcctcggccaactcgaccttggaaactaaggggatcccattctcgccatctgcaccgatctaatcaagcttagcccaactgcatgattcttgccatatgtccattttataggacaaacctgtacatttatgagttagctcggtcaggtagtgatcgcaaataaaatctacctatgtcttacatgggaacttaatatgctcctatttagctataatctactaacctataccatgatttttaaatcatgcataataaataaaactgctaaaacaagtaagaacttactaaactatcagtcaagcttatctttcatgatgattttacatatcttgacgatcttcagagaataatttagcgactctattaccaaaattgtaacaccttacttaattaggcatgttaccatattttctaagtattgtgcacgcctttactaatcaaagagttcgtgaatatttaaaactttctcaaataacttaactttaataaataaacataataatttagataatttgggatcctattttaaaagttacatacgtttacaaaatatttatacttttaaagttgtcttctagagttaataaagaagagccttaattatccaaaagaccttgaacactccagataaccatcttgatatgtacaatcttcatccttagctttagactcacactggttcagttctagctcttacctacacatacacgtaatgattgtgagtcgacagattcaacaagaaaagcataatcataaacataaacatatatccaaattgtaaccaggcacccatacacctaattacaatctgataattgggtgaggaatattctgaacaaagtatatgagtaactaggaatctagcctatactcagtactctagtcgtactgatgtggtagcagttagttcatactatttgatagactatatagcatatatttgttggcgtctctgtgcaactctatgtacacctcagtaataccctgatatgctaatctaatggatattgatttgcctaataaatatatttgtatctagtgcaactctatgtacgcctcattgatacattgatatgttattctgatagcaagtaacatgcacacaaaacatgtatccatatagcaactattatactaatcttatcttgattttgaatgcaagtgtgtcgatcgacctagatagaaaattatgctctaaacggaggccttctgtcacaatgtaaaattgataagtacttactctagaaaacttctctagtgctaaaaaaacctaggttttttctactaaactatgtggtgatcgacaccctaaaataaaaataaataaatttttctctagtttatataccatattgtggagctcgtcataagctttaacatagtatataaagcatctaaatcaaacaccagagtgcaaagctttggctaaaaataaaaaaatcaacctttcctaataccgtttaaccagaatttcagttggtacaaccctgaatgaactgaaatttcaattgtctaggcagaaaaacacaaaaatttccaatcttccaaccccgataacttggtccaatcaatcccaaatactatcaaaattttgcgaatatcaacatgtcacataaggaacctattacatagcttaaacacaaaaattatactacgaatcaaaattttccattgttgaggaagctttgagttcaataactcaaacttactcaactcacaccacaacgactataagactctcaatcaatacttcaacactccaaaatcaatctataaaacaatcctttaacattaaaaacacaaacagaagctatat

SEQ ID NO: 300936 - DNA, 2505 bp, Cannabis indica
atttaattaagtgtactaggtttaaacctaatatggttagtagtggggacacactgaggtgtaatcctttatatcttgtctccccaatcaaatgtcaaatctctccacatacaatattaatataatgtcaaatatatatttattgctatttggtaacttaatgagactaagactatattaatgatgtgtggtattttatagttagttagtaattattattatttattaaattaaaatatgtaagagaattgatattaaatgtgcaaataataataatatatcacctatgatacttgacactttaaggtgtcttataacatttttcatttgctagctatttcattaatttagacttatgtgacttaatacacttatctttaaaagactttttatgcatatgtttaatactaagttgatgtaattttacacatatgtttagtttcttttttcttttaattagataatgaattttaatttttaatttttatattaaataaagatgtaatttatttaaataaataatattattatattagaaaattaaatatttgatataaaattttaaataaagacaatatataatagcaaccaagtattttcattctactttttgataactaaaattaaatgaactctatattcaataactctattatcactttttgtttattattttcaaactttaacttttgtgtaatgtgaactcaaattcttacataattagttaataaaataaatctcacttaaaatataaatttccttatttgattcattctttatagaaactaatacggtatcactattgaattcattctataaaaactaattgcaacaaattttgagtatattaaatagttcacgaacaaatcctcatattatgtggttaaaaatatatatagtattttatgtatttaaatatagattaaatatctttacaaaaacaaaaagaaaaagatgatgttggtatcaatccaagtcccacattagaagaataagcaagaattgtcttggatatatgtgttttatctacttcattagtatgagaccttttgggaaggtacccgaaaataaaattgtgagagcttgacccaaagcggacaatatcatataaaatctgaaacattcggtatttatgccgcaatttaacctattataattaattcattacattattattactattactattaccatttcattacaccaaaccaaacactcggaccaataaccctatcccatgttaccaaagatagagcctccaccacttgggccacatttattaatctatattattattcatcattttcttcattttgatgattcaaaaaggcactggtttcacaaaaagcatttggatattttttttaatctttttcaaacaaattaagtagtcgttatagtccattccgaacacagtaatgagttggtagatatatatcaatcaactatagtagactcgtgtctaatttccattggtttaaattacttgttttttatttacataggtttgacgtgtcgattttgtatatgttactacaaaaaattttacttttaatcacaacaaaatttgtgactaaaagtaaaaaagttgtgactaattataaaatattcttatgttgtgactaaaagtattatagttacaaaaattacaatttatattgtgactaaatgtatttttaatcacaatacttgttgtgactaaaattaaattagtgacaacttgtaactaaatgctaataagtaatattttgttgtgactaaaaatcacatttaattacaaaaaatatatgttgtgactaaaagattgtcactaatagtagctattttttgtagtgtgtattagtttctaatagtatagttgtattaatagtattgctatttgtctaacactttttataaaagacactttaattagttagtgatgttttttacaaaagattttcttaagttatataagattggatacttaattacaccaatatcagtatgacattgaagagggtgttagacaccagtagtgtcttctaacaattctcattgtattaatactcttgggtgattatttttttttttttttgacgcgtactcttgggtgatatttgattgagaggaatgaaaacatatatgaataagaatgcatatgagaataggaataggaataagatgtaatcaaatttaaaatgcatacaaaaattgataaaaaattaatttttttttctcatattgcattagaatgatttttcttttcattttaaaataaaaaagtcatttcataaaatgatacgttggaatgacattccaataccttaatgacatgtttacttaaagggaatatgaatcaatcatatggtattgattcacatacaatcgtttactaaattttaaaaaaggataaagtatcccacacaaattagaaagataataaagagaaatgttctcctcccatcaatatatcaatataaaggagaagaatgaggcgacatgtcactctaaaatctctccaaa

SEQ ID NO: 300937 - DNA, 2180 bp, Cannabis indica
ctagtaaaatatttccaacacgtacttacaccacctctttgccaagcagatattacagaatcctacttgtaaaggagcaagctttgggcaacaagtggcctctacttttaaaggttgaacctttggatgacacgtgtccatatggtacaaaatgatccccattgtccagctgattcatgcacgggcataatgtttcccataggacccaacaattaactctaatgttgcatgtaatttaccccagtagtgggattttagtagaaaccttaggcgggtcgtgggttgtcaatacctgccacttagcctataaataccccttaattctcatacaaatagaggatcataatttacatagctaaaacattaacaatattattttgggtcttcttcttcttcaagaaaaacttaagagtaagaacttagggttgttaacacaacaaactcgccctagaggctaatagactcactcatggactaagggttattaatagctaaactacatgaaaaaccttcatctctttatttttgaaattaattttttctttagctcctaaatatttagtttctaaaaatctcagtaaatattttggtgcattcattaagagttgaagaaagacgtaaactactgctgctgccacgattttcacacaaaacatgcttcctaagaagaatcttcaaggtggcctcgagatggaaatagaggaatttaaacccctctcaccaagcatgcccaaccgagcgatgcgagaggcagagatacgtccaacacaaacgatcgagaggatgacccacccaaccaacatgatcacgtcgatgatgacaggaatgctgagaataatgaagaggaagaagacgatgatggttacatcaaagatgagtactacaaagacgggtactataatgagaaaaacacccaagtaacttgagtgtctaacaaggttctcgagatcagacaaaagttagcccatcaagagaagttttcccataagatggagaaaatgatggttcaccttcgagccaagtttggagatctggatgaggaagattctaatgatgacccctcattggaataaatcaaaagaaacactagggaaaaccctaccaaagctagaacctctgctcctacacaggacaaggggaaggcaaaggtaagtgaccctaagaacctgcatgctcctgcacctcctcaaaaaaatgcaaattaagacaacaagccttgttaggcacagaaggcaactgaaacctccaggctctgacgtcctttagccaagaaaggccttgtaatgccaaaagggagcggtataaaagtaccaaggctcaagggaaggaaaaatgccctagctattcagtaaactaggacagtgagatagagggacaatattttgacgatagctggtccacggtggattgcagaaggcatttagatgccaagtacgagaaggaaaaaggcgagaaggtgaggccacgtggtaatgacctcaggaaccacttgaacgataaagtctgtagaaatggtgaatcatttccctaggcaagacccttggaaatggtgatttagggatttagttactcgattggagtgactttagggtactctaattttcatgttttatcaatatctagggtatgtccatgctgtttatcaatcgggaaacatctagttttgattttaagtgcctgaaagggttttagcgagacacttaccaattttatgtgattgtgacttagggtcactaatcatcgaggaatagttttcacttaggttggctagcacaattgattttagagttgaggtaagattagtataacacacacatacacactattgacttaaaatttggtcaactagaagtggagccttatttatgatagacaatcaccacatgtaaataagaacaataaataataacgatggcatagagatttatagaggtttggcccccttttttggtgggtaatgacctactcttcttttagttgtattgattctagagataattctatgcagatcataggtgaaaaccttatgaattctagctatgactccctttgaatgttacaatagtgagaacaaggtagtacagatcaagaactgatgagttctagtgaaggacttaagaatatatgacttagtgtccaggtggcacggatgaagtatgatacttgagagagagagagag

SEQ ID NO: 300938 - DNA, 3369 bp, Cannabis indica
acaattttttagctcggtagaaactttcttaaatctcaatttaaaaagatattatggcagcaagttgttagaaagaaaatattgtatcaaaagaaatatttggctatgttatgtacataagtaatggaaaaagatacagatttttgggaagattgttggcttggagaaaaactataaggaaaggtttgaagcatccttagtcagatcacaataacataatgagtcaattttaatcttttctaaatcagattctttgtggtctgagtactaattgttagggatcttcagtttttttttatgaaaaacttttaagttattaatgtccttgtagcttcagattagagtgtgttgtacaattgtaaaaataattggatcatttgttgatttttaaaattatttcggacaagaattgtcaccatccttataaaataaataaagatacaatattccattttttattttcattttttttttacaaagatttattagtaattacaagtacaaacatgaccttggagagttcttgcgtttagttatattttaagcaaactccactacaatttgatagtgacattactgctggttccagacatgcacaatatgcttgacacagtctataatctaaatcttataacaccaagaaaacaagaaacgcatcaagatcttaccaacaagttttacatctgtgttctccaccaaccattttgctccatccctcataaatcccacgtagcttgtgtcgaactcctttttaaacataagtcgtctgaaatattaacaatttgtaaaatcatcacagaagaaaatttgcctttcttgtactttaacatttacacataattgaacaaactacaatgattaatgaatcttaccttattttgtaactatttaataactagacctcgattatctttaattcaaattttgggttaatacagctatatgtaggatgaaacaatcactatgtcattaactgaaaacaatacatgagtttcaagtgctataaaacaatattgtaaccaaaaacttacttgtctgtatttaacgttctgaaaagcacacggcgaactcctttgggaatatttaacgacttcataacttcggctgaagcataaaatattttaaacattgtgaaattatttgaaatacctgactataagaatacaattgtgcataaagaaaccagagataggtagcaaagctcaacaaaagatttatttttaacattttgagattattagtgcatcaagtacacgtaccagttatattcttgtcccttggaacatcaaccaacaacctggacctattggaacaaaaatatatgtcaaaatgaaataacaagtcaagcaacataataacttatttattaccatttttattttcttcaaaaactacaactgaatttagtgaaaaatgagtggagtgatgggaagagaaagacaacacaagccaaaaactggaaataaacaatcagaagatgtagtttttagtcaattaaaacagagaatcccagaagctcttgacaagttaacatgaatgaataaccaaagtccgaaaagctgttggtgtatttcaatgcttgcagtttaacaatttgtactatgtccgtactacttggagtctaggacaagtgaactgctgtaaaatcctaatttgaagatccctgtacaggaagatatgacaccatagactataggaaagaaaacaaaaaagaaccaccttgactacttattcaatgactaatcatagacaagctagcaatatatgtgacctccattaccatagaacataaacaatctaaagtccaggctagttcaaatacagtaacaatctgtactagtaaagcatttctatccatatgaattctatatagagcacacaaaagtttgaacaactttcatattcttcaattcaagctccagtttcacctaatttctttccaaattattatgcaatacaaatcgtgacacatttacagtaccaattaaatatcagagaaaatccctctttccttttcaatcaaccaactaaaaatggacacaaaattttaaacttttgaatataaatttcatgaatcaacttcattacaactagtcaaaactcaaccactaatatagttttacccattaaaattcaacagaaacacaaacctaaacttcgatcaactaacttaccattaagaacttccaaatcaagagtgtcaacgtcgaatccagcatcgaagtagtgatcgtaaacgtgtccgggagcatcgacgtgggtcccagtatgaacaggaagcttcatctcggagttgttggcgatagaaccattcttcatgctcttggcaagccagacgaactggccaactccctcacttgactcaaacgccggcatgtcagtgctaaatcgatgactgatatcgaagattcttccatccccgtatacttcccggcgagtaggggtaagagaaatctgggcgtcggagagcgagcaatcaccggaattggtgccggggacagcgggataggcgtcggtggtggcaaaggagagagttggtatagtgagcgcataggcgcagagtagcaggagaagatgagcggcttccatggtaatgagtaaccgaatggagatgagaagagtcaataattgaaatattttaatttatattaaaaattactatttagcaattgactaagagtatcacactaaatttacaccattattaaatttaatgtaataaatattacaccaacctaaccaccaaaaataataattgaagaattgttaaaaaatattattagtgtttagtactctcttatgtgttaatatcattattagtgtaattaagtatcgagtttcatatagtttaatataataattttttatggagtatcactaaccaatcgcaaaacgatacatctagaaggtgttaatctagaaggtgttaagcataggtgttatgtatataccaatgagactctttatattttgcattgatcattttttatttaattattttagtcttgaagataattaagtgtatgtgtggaaagatatataactggtgtgctctatcatgcttttgttttagttgtttatttttatttgtttttgtaaacatagtcaagaatgataagatattttattatgtgattttcttgatatacatgcatgtgtcttgttttaggtgtttatttcatatcatgtactaaagtgatgaagtatattttaattaatatttgaatataattggatagagtaataggagatgggtttaagggtttagaagggaaatttgattttctatcttaaaaattttcaaattcccttttgaaccaatacattttacactataaaaatatgactctttttcaaaactccaaaaat

SEQ ID NO: 300939 - DNA, 5994 bp, Cannabis indica
atcgcggtttaataattcaaaaccgcaaaccgcaccgcaccgcgcggtttgagaaaaattcaaaccgcaaccgcaccgcgaagaatttcaaaccgcattttttttgcggtgcggtgtggtgcgggcggtttgagcggtttgatgtacacccctaatatgcacttgcataactttaattttcgcaataagtttttagtgtcattattagggactgaaaattatcaatatgagtctaattaatttttattataatttgatctttgttttctcttgtttctaacttgttttgttgctcgactttttgtcaatttcaagtgaatttgttatatgtatatcagaagatgagtagatagccttgttcctttgaatcttgagatacagaaatcttgtaaatagaatagaaagaacaagaggttagtcgaaaaatctatggagatggcgcagaatgatggaaatgacaggaatgttctaatttctaaagtcgtagaagggggtcaggctcaaaatcatgctaaaagaagcctaagagactatgtactgtcctctcatgggggtacaaaactgtataagaccaccagctattgaagtcaacaattttgacatcaagccagcaattttacaaatggtgtagtccactcttcaatttagtggtttgcctactgaagatcatcgaactcacttaactaatttcctagagttgtgtggtactttcaaatacaatagactgattgatgatgcaattaaacttagacttttcacattctttctgggggaaagagcaaaaatttggcttaattttctacgacccaactctattgttacttggtaatatttggtacaaaagttcttatcaaatttcttccctccttcaaaagttgctaaattgaggggagactttaataacttttgtcagaatgatggaaaatcattgtatgatgcttgagaatatttgaaggatctgttgaggaagttgtcccattatggtattgagcattggatgttggtattgaacttttatcatggtttgtccaactattagaactattatttatattgtcgctggtgacacatttttgagcaagagtactactagagcttatgaattactagaaaagatggctatattcaattatcagtggtctgatgaaagaacatctgcaaagcaaaaaaaaaatagctagtattcatgaatttgatgcgatcactgcttcaactgttcaagtagctaccttgactaaatagttgtagcagagaattatccttgttaatgctatccaagcaccaaatgattatgaaatttgtggaggtccttatactttttataagtgtacttctagtgacaataacattttgatggatcccgctcaagttcaagccatagtcaattttttaaaggtagttcaacaatcctttctccacttcattcaataatgggtggataaatcattcaaatttctcctggagaaacaattaggggcaacagcctcaattctagaattagcttcaatagaacatgcctcaacaagaagcaaattaaccaaggaatcaagatttttttaccagcagcttaatccacacactccccctgctccaaccaatgatttacaagcttctttgttgactctcaatacacaaattgagttcatgattgagacaagagcatacattcaaaatcttgagacacaaatgggatagttggtcaatattcttcataacaaaactcaaagaaattttccaagtcgtacagaggtgaatcttaaagaaaattatagtgcaatcactctaaggagtgataaaagagttagaagggcaagtgaacaagcttattcctgcaccaaaatttgaggttgaacatgagggtttagtggaagaaaaggttactgaaaatctttagaagaagcaaaaaccatccagtcatgagcaccacgtcaagattccatatcctctttgctccaaaagaagacacttgtcaaagagaaaaatactggacgattatgaggcagtggcatttattgaggagtgcagtgcaatattacaatagaaactaccgccaaagctcaaggatcctagtggtctcaacattccatgcttgatatcaagctcggttgaaacatcaactttgtgtgatttaggggtcggtgtaaatgttatgccttgatggattttttgcaagctaaattcgggagaagctcactccataattgtctccttacaaaaggtggatcactctattaagcatcctcgcagagtgattgagaatatcttagtaaggttgttaaattatcattttctctgctgattttcttatagttgatatggagaaagaaagactctcattattttaggaagatcattcttagccactgggagaaagggaaataaatttataagtctaggataagaaaataagctttaatgtatttactgcaacaaatattctaacttgttgtacagttgaggtggtgaattattgtcaaggcttaacaggtaaaaagaagaagaaatttaaagaacgattctgttctacttggtgtcatatgaaaatattttcataagcgaagttagaggagtttgatgactttggagatactttaatattctcaatagtaaaagaagagtttttatagatgatactttgactttgaaagacaaaagtggtagacttgaccatagttgagttgtgaaaatgagtcagtgtccaactagagatactaaagtaagcgtttttaggaggcaacaaatgcaattatttagaatttgttataattttttgactagcaattgtggtaaaattgttagaatatgctagaatttgcattttgtttaccttttgagtcgaaatctttgatgacacaagttttaggaaatgatttgaaatgaattttgttagaacaattaggcctttcaagcttaccaattttattttatctctagtttactcatttgtgctgtaacatgttatttgttgtttaacaatattttttagccaaaagtgtacctactattatttttccttgacccttaaaatatgtcatatgttaagaaaaaagtttgggggaaaagttttgttgggtgattatttttgtatatacgaataaataatgtattgatgactaagagaataatgtacaaaattacagcatcactaagcatttaccttgtatttgttggaatatgatagaacttacatttatctagataaataatgtatcagtggttgagagaataatgtacaaagttgcatttgttggttgaaggtatttaaattattcatgtttttcaaaataaataataaaaaaagtcaataatgtgatgtttttgtgctaattgtgagttctttcaattataattttgtaaattggagatgggactattttgtaagtgggaagtttgatttttgttctaattttcgtatagtgtaattgagcctgaatgattttttatctacttactacctaagtctaaagttataacatttaaagtccttttgattctaaacttgtgttgctgacattagtagagaaaggtataaatgcaagcctattgattattttgattgtataatgatggcttgagttgagcacttataatagaatccattaattgtagtcatttgtaagctatgtttttatttttcctatttgagcattaaagttaaattgtgaagcagttaataagttgaaattgtgtttacaaagtgccttgagattttttaagtaatatggcaaagaagtttagagaataataatgatttatctagtttgcttctgttttctttatttagtttgtttagatctttgctcaaggaagagaaaatattaaatttagggaattcgttttgatttttgttaagaattacaatgttgaactaaacatttttctaagatttttaatgtactaggaattttattattttttatgaggatttcatgattctctcttcccttttatttcaaattatttgatctgttctgaatgcttgtaaatgtttgatcatcatttacataatttatgattttgattcaaaagttggaaagtgaaaattaattatgctatgatattgactaatcacaatttacatattagatgaaactacttatataaattatgtagttttaggattactctattgatcaatgtcttttgtgtgttaaaatttatcacagaaatatagaaaattcatatgtaaattgagttgcaattttttgaaaaagagtaagaaacattcttgtaaatccgctattaatttctttcatattgctattttatgtttattgatttgtcatttctataattttgaaagcaatttattgttagccaaatagaattcgtaaactgatttgttagtaaacagtaatataaattctgtagaaacgatctttatttttactttgttacttggtacaattacgtatacttgcgtattaatttttaccaacaattttttaattaaaaaaagaagagtaattatataattgaaagagcaactaatatgctacacttagtttgatataaaccacatgtatataataaaaataaaaataattaaattaaaaattatgtctatatcattgattaaataaatcaaaatattagagcttaataaaaattgattaacaaaatgatagatggatggacaatactttagctttagaaaaactcatagcattttccatcatcaatctataattatatgtattatataattaaaaataatatattaaatacctttgtatctcaatgtcttgagcatagctgaaattaaagaaagggttgtggaatcatcatccacgactaaaatatgaatatccgttagagggcgaagaaaattgtcgacactgctaatcctattacaatccatgattttgaactaatagcgttgaaaacactcatagagatggttgtaacttgtatatgtatagcctgtaaatatttcatacttactcttatttaagaaatatttgtatattattaaatatataacaatattatttgtgtatggatatcctaccttaaaagaaaaaacaaaataatatctagcttgatattctttgcctgttttttccttttttttaatataaaaaagaatagtaataatatcattttaaagtttcactttaacttaatagcaaagatatagaccaaaaaaattatttacattcacacaaattttatttgattagagggccttgtatgtttttccctaatgaggattttattttttttaattaaataattacgtgttagtgaatagtgattcttcattaattgtttgaatattccaatcttatgttagattttacactaaattgtgtaaatctattctccattgatacacatgatatgaaaatattgaaggttccacttaatcatttaatactatattgtttgtgccttaattaaataaatgaatataagtacatgattagtatagtgatatttggggtatatatatatagttctctttattgcacttaggtgttttttgtaaagtgtgtggtatatatatataatgggtctcaaggtacgttaccatttttttaactctaattactcctagatcaaccccagtccctagatccaataactctcccatctaacggctgatgtacaccacgaaatacattccgtgaaagtacaatcacggaacaaaattatgtccctattgataaatagttattttattgtactttaatttttaagtgtttccacagtaaataaattctctatgtatgaagtcaatttcttacaatagtaatctttgttgttacccgcttgagactatgagcaggttagaattttcaccctcaaagataaactacacacacatttttacaacacaaaatttattaaaaaattgaagttcaacaaaatgaaattaatttggccgaccttaagtcgatactttaattgtcaaaagattttatcgtgaaaaattttaaaaataattttatgttataaatattattaattatgtggatgtccaaatctttt

SEQ ID NO: 300940 - DNA, 8059 bp, Cannabis indica
ggtatcttaggggttaggtggatataatcctttatcccttcttgattgatgtgatccctcataaagtagccgtcactaggcttattaatcatagcgtaatagctgcaacagaggggttacaccatcagacttattgcttatggcagttccaatacgtcttctcccatgcgacattaaatgcgaggtgaccgttcaaatggagtctggtatctctcggaggtgccttaccatggctctgacctcccgtattttgggcaaaattaagggcaacaaatcccatagctaaatttaattaacaataaatattaaaaaatagcataaaaataaatataaaaagcgtttattatgatcactaatttttgcactacaagaaaattaacttttggcggcgcatttcaaaagtaggcataatgcgttagcaaacttttatcggcgcatcatagagccggtaaaagctgtctatgaatctcggtcggtaaaagactttgctgacgcagttgacatttgcgacattaaaactagcttttgtcaatgctattatgcgcaaggaaaaactatacaccagtgtaaactaggattctaatctgccaatggacgggtaaaataacttttgttggcgcataagtgcgctgataaaagtttcacgcatttttccaaattggcgggtaaagattttgtcagtgcaacaatgagtcggtaaaacttttccccgccaattaaatatttgcgggaatgacttatacttctgcacttatgcgtcgagataagtcttacctaccatattttattgatggtgggatgagttttaccggcgcaattttgcgcgggtaaaatccttttctatttattaattttgataatttattataaaggtaaatagatgtagataatttattaggaaattttgcacaagtgcataaccaaaaacaattcatttttgttacttgtaagcatgatgcattactaggtgaaatataaagataaatagatgtaggtaatttgttagttacttttctttactttggggaaccacctcacttggcatgtgtttaacatgcattgttctaagttggctactatcccttaaagtgtagttgaggatgtaattgttggtctcaaagtaatcagttgacttcaagagatgtggtaacagctccttttaggatttcatcattacattaaaatctgattcgttggtacatgagatgtcattatcgtacacccaaatctaccacacatcaatgtctacctcgacagctgcccaatacttttgtttatcatagtgcaggatgaagtataagaatccttagtccctcagcatggtaggaaacggtctttgataccttggaagtagtctgtaacaacttctggccatttaaaggtgttcttgccacccgtgtgtgtcctctaaagtccaataaaaaattgtagacatgagatgtctagaatcacacctagctgagggtactagtctaggaacaattgtcgtctcctcctcttcaagtgcgcaataacatctatatgctacatgaaaattaaacaaaacaccaattaaaactaactagtatagccacaatgtcgcttaaaatcaaaaaatatactgttatatatcgtcaatcatgtcgctaaatatcactaaatcatgaacctatatcgttactcatcactaacaacatgtgccctatctaatgaatacaatatcggcacatgttgctatgcatcgcaaataataccactaatcatcactaattacatgtgctacctatatattgaatactatattgtcacatgtcgctagacaccacatacagcgtcgttagacatcgctaacaaagcatcacaaataatgtagctacacaccacttatagtgttgcgagacaacgcgaggatgtcgccctatgtcgataaatgcattttttaattagttgaaaaaaaatgcactgtcaaaaatactatatataaaagtaaatacttatatcgttctccaactattgtccgaccactaacagctttataaagaattggacatcaccattgtcggtatagagattcctaatacggttgtttaggatgtccccaaccacccaccttttgaaagtacataacaatctgtagtcttttaaatagtaaggcttcttcctcttcctcacaaatggtatccctactaggggtccattcaagaataggacatcgtcctgcgactgtgtatcaccgatagtcgtgatattggcattccttggagtagacagaggctcatcaccattgtgtttccaatcttttgggtgccatcattgtctttatcacacgagtggtgagcctatgcctcaggtagtcggtaatcttctagttggggttgtggttgtggtgcctcctccttcaacaatgtcatcaggttgctcaactgagccataaataactccttcatttctttctgtttttccataaatgaacacctcatattagtttggctattcactaagtccgtctaagataatatagtcgcagattgttgcttctcaattctattcaacctttcctccaacgatctatagtctggtgtattagctgcagcagctgtagcagatggctcagctagtttcggaggcagtggtggggggaactatattcaccttactcacgacatcagtaattgtctttgcttgtgtttcaaacatcgaacctcgtgtaccatcgtcgtccaccaggtcatcaatgtccatctcaaaataaagagtggctttaccatcattgatggacctgaaatactcctcctcagtaggtcgagggcacacacatttctttatgaccaactgcaaacaaaaaaaggaaaaaaaatctttaatgtcgcaatacaataggcaaatatgtcgctatatatcacaaactaaattaatttttaaatttaatgtagttatactcatttatattgcaaaatatatcaaactattacttatgtcgctaacatgtcgttatatgtcgtgacatgttgctacatcatgcagaggtgtattaaatgttgctcactgatcaaatgtatcacaaaacatattgtcatatgtctcaaacatgttgctaaacttaaaaacatatagattgcttgaactagaaaaaaattagcaaccaaaacaattagttgtttagaaggtatttaacaacttacccttgtattaaacagtagtgcagtatcgttcgccttcacgtcttgtttttttggccctcaggggttttccaatttatcatcctagagaacttagtctcgatacacatagcatacatcgttcccactttctctatggtctcatatgcttagtactgtatgacaggtgtgtagccatgtacattatacttcgcctcctaagcaacctttttacccttcttcttctcaatattttgcttgtaatatatcatgtccttattcatggaccacatcgacttaggaaaagtttgctcgtcccacgaatacttgaagaagaactcaaggtcgtcaacaagtttcaacatctctggccaaacaataatgttgccatcttttgaaaccaatacaccctcaataaaggcgcatagtctgagcttgtacacatcatctttatcctcacatctctcaagttgtaccataagtgtatcaacatgcacactactcttcacttcaaaatacatgctcaacaagcagtcactgaacttggcttatatcatttcgtctgtaggagaagtaccatacttaggccagtaattagaccaaactcagtccgcccaaatctcatatcagttttaccaacataatatcatatctcatcttccttttctttattaactttcattttccaacactaattggtgcaccaacgcacgagagaaagtcaattatccaacttcccagaatggcccgaatgggctcgccttcacctgcttagtcgacttatgcttttcaaacgtggccttactatctctaaacctatctgagccccgatacgttagacgacttgtgaaatggtcggacactggaagtttaagctcaagagtcatctacataaatttttagaaaacaaacagaaacaacaaattaaaacacaaatatgatatgtagcaaaaaatattgctatatgtcgcaaacaatatcgtcatatgtcaccaaatacattgttaatttaaaaaagtatcgttaaacaactcaacacatggatactagtcatatatattcgcgatatgtcgctaacaaaatcaccttatatcgctaaacatctcaaccataattagtgagaagtcatatcgtgttatattgcaaaaaatatcgctatatgtcgctaatttttattatgctaaactgttagggtaatgtcatgtaatatcgttaccaatattgctagacgtcgataaatacataaaaactaagaaaattaacatacaacaacaacaccattggggtgatatcatcaaatgtcgctatcaatatcgaaaaacgtcgataaatacaaaaaaaaaacaagggaagtgaacatacatcatcgaaattcaagcccaaacataaaaaatcaacttaaaatctcacaaattttcttaatctcaaccataatcaacaaaaccgacccaaaatttcaattcaaaacctaataaatggaaaaaatcactcataaataaaaaaaaaaccaaatttttgtgagaattgcgggtgggtggctcatgtcttgttatccacataaacgacagaggtggacagaagggctgggtggcttcagtgatcttctcgtgagttgttgtgggttatcgcgaaatgtcatgggtcagtctgagggcgatggagagttagacagtgagagaatgagagagactgtggtggatgtaggtgagttcgccagagtggaagagagagagtttgagagaggagggggctggtgggtgtgtcgtcggagtcagagagagtgagtttgagagggagggagttagagagttggagagagaaactttgtttgaagatgttaggaatatttttgagttaaaggatattagaagtataaggtgtaaattttaaaatgagtggcatattaagagaccgtgcttaacatttaagcatcctctatcaaatttcccaaataaaattgacataaacctatgacattcattatgcataatggatcttacattcatgcaaactaaatctttgactatcttcttttcacctcagttaagaaatccaaaataagacaaaacgtgataatataagaagagttgcacaccccagcatttttttctatttgtgaaaaattaatttacagcaggagatagtaataaaaatactaaaagaaaaaagagtgagctccgtacgtattgactgattattctatatttgtgtagaacaatatattttcctcccaaatgactcatttggtgccttggattatatccaacaagtaaactctctcactcacactttcactactactctcctgcatctctatgcaactgagaaatggaatgtggacctgcagttgaactttcacccctaatatccttcaagacttgcaaagccaataaggttagcttaacgtatgtgctctctaattgctcaatctccacgagctcattccttgaaaatatgttatctagcattgtcccgcactcctccaccagtgtcttaaccacatcagtactgaaaaatggttcttgtaagacgccttggataaaagatacgcgaataagagctccacttagcttgtcgtgtttctttgttattttcactagtcctgtgcataggaaggaggatatcaaggtcaggaaatgacaaacaatagaaagaaccagcgtaaatctgaacgagaaatgctaaagggcactcatagtgtcatcatatcactactggtgcaattcaatatcgagtccctcttattttactttaataatgactacataaaagaaaaccgttgaccatttataggaagttatctcataatggagtagctggacaccgtagtacccaatagcaatgctcaatctaagtagaattttcatcattttcttgagtagaatttcttcctttcattatttactctttcttttactatacatgtagttaatttagatgatctaaaaagaattccaaacctcatattctaatgtcatgttgagagactgacagtttcagggaagataagacattgattatgaagtttaatgatactgtatctgtgatcgagcaatttttctataattcatctatcttaagagatgtgcatccctataactcttttatttagtagtttttgttagaaaagaaacctttcagccaacatatgtcatatgaaatcttcaatgatgtaaacttcttctcatatcaaaatctcagatttgtcaagacgacaaagcatatataaaattacttggtgctttaatttagaattacctgtgtaattaaggatgctgtaaatctcaagcaaaaccatctctccatgaagatccaccaacttcttccctacatctttcagatcttcatttgaatccctggcccttattattctgtctcgcagttcctacactccacgaacacagaagacaacacataacattcacaaaattaatctacactgaaaatgcaacaataacaagcagaaccacagcctaataatatcacatattaatgctacaacacttgaattgtaacatgcttaaacaacaaatccacctttaaattatccttctaagattacaatttctcccttctcttttcccctaaacaaataacattggaaagtgcaagagctaccgcattgtcttataggttcatgcccatcaacaatattttccctcattttcaaatgctttagcaaggaagcaaagctctgaattcaaaagaataggtatatatccacaacatataacacagaaacatatgacatatacatacaagtacaactcattcctaatggtcctacagataaatagacgatacccaattataaaaaacaaaaactttgactcataaacaaattcatattgaaaaaagatagaaccttccatgcaatgatataatcttcctctttctgaacaaagaactcattgaacttgtgaatctcgtcattcaaaagcttcaagaaaacggcgacctcctccgtaacctcggcttcttcttcttcttcttcggcgtgtgatagtttggaacgcttgggtgatgatgggttaccaggctttgggtaaaaagatttcaattgcttcttcaatgacttgtaagacagaaacctgtctcgccattcaggaaaaatctcctcaagaaggctgctgaggatcttccagaacttcatggttcgattggattgataggttgaatgggttggttgggtttgatctaaataaatatggattatataaacaagaatggaattagaattggagaatattcggagtgtggattttgggggaatatactctttgtttgagtataaggtagttgaagagattgagcgagtgagagagtgaaagagattgattgattgcgtgaccggtggattctatgctttttattattgttttgctaaagtatttagaatattctttccttgtattccccgttcttcatctttttaattttgactaacacatattaatgattcaaaatggtgttcataaaataattggttcacttgtagttttcaaaacaagagtattataattttcaaagccacatcatgatgataagtaatagggcacaacatttgtacatgaaaaactcattcacttggcaaacccgaccgactcgaactagaaaaattcaaaaaaatcaagttcgaaaaattacaaggttgtgttcgggttcaacccggtaccaaaccgggccaagttcgagttctaaaaattgacaaacccaaaacccgaaattacccggatccacctaagaaaatagattataaattaaaacattgttataaaataatataaaattgataagaagaagaagaaatgaagagagaaaaagaaacttaatgagaatttcttagttgtttattccaatggggtgaaccactatttatacacatacaagagtcaaatattaagaaactaagaaaaagggaa

SEQ ID NO: 300941 - DNA, 2366 bp, Cannabis indica
caagttaccctaattcttttacacctaatatacagctaatactctaacatatctcaaaggaagtatgtacttgattagttaactgagacaagaaaattgggagcaaaaccttacctaacgagtgataaagaaccatttgaagaccatgagaagtatcgcgaatgagttacaaagttgaattatcttattgtaactcgtccaaatattgcattctcagtttgtgttgtcagtcagtttatgttatcttccacaattcatcattgggcaaccttagagcaaattttgtgttacttgaaaggagcacctggatgagatattgtttacagggatcatgagcacacccatagagtatttctcagatgaagattgtgctggttccaaaagtgatagaagatccacttcaagttattgtgtctttattgggggtcatttggtctcttggaaaactaagaagcaaaatgttgtgtctagatccaatgcaaaataagaatataaagctacgacacaatttgtgtgaggtaaagtggatacatcaacttttgaccgaagtagggtttaagacttcagtaccagtaaaattatgctgtaataatcaagatactcttgatattgcctcaaatcttgtgttccatgagtgaactaagcactttaagatagattaacattttgttcgtgagaaaattcaacaagacttatctctaaaggacatgtgaaaactggaagacaattagtagattgtctgctttgaatagggtgcgggttgattatcttaaattcgctagaaaatagggtcgtataaatatatgccatctacatgaataatatacacagttgattcaccattttctacatgagtagcctattcatcttatatgatatgttatttctacatattagtaatgtgggactaattctaatagtatcatgtgagtatattctcaaaaatctcggatatactgtgttaaaactttaagcaagacattttttccgtatggtttaagcaagacattaagaaaacataacttagccaatatattatgatggattgtttatttcaaataagaaatcatagaaatataaacacatgttcattcatgtatttttgcttgttggctataataaaattatggtaaatgggatgaaagtaggaaataacaaaaaacagcactaagtacagaaaagaaaatggtagtctaagtaaaagaacacttagctggcgtttggttgggaggaatgaaaatatagaaataggaataagaatatgaatggaataaaatttaaaatgcataaaaaataataataaaaaaattattatattttttctcatgttatattggaatggtatttctttctattttaaaatggaatagtcattcaccaaaatggtggaaagcgcattccattggaatgttattccaatactttaaaatgcaaccaaacaaaaaaatagaatgaaaattgttttctttctattccattccatttcattacttccaaccaaatgccacctaagaagattaattctcattcttaaggagaaaacctattagtggaaaattttgtatgagatcatacctggagaacagactttgagaataaaatggacactgaagttttcagcattttccaaatatcgtttccacagaattttcttgtagcaggtctccaaatatctccaagtgatatccttgataagaaaataggtctgggaaaaaaataattctacaataacttagtcatatttgaggatacacatatttcagatcatatggtacatatttcatattcttttggttgctaagtcctagaccagtctcttaaattatttttccaatgttaaaagctttcttgagcacgtagttctcaacatcggcccgagttaatttttattcagaaaaattgatttaatctgggattgaaacttatgtggttaaaactgccgtgcggaaaacttttatgtctcattgagaatcagaaaggacatactttacttaactaaacttgataatgaaattccgaagaaaaaaaaattagattgtcaagagaaagagaagggagaaaaaaaggtgttggcgtggcacaaaccctttataaggctcagaagcattagtatcaccatcaagctcaaaaggtgtttctggtgttggagaaacaagtccagcaaaagtaagcaactgttttaagagccttccacgagggccaactggtgacaaaagcccttcataacgcgaaactgccctttgcgctgcaagccatattggaagatccttctctgaaaactcatctactcccagcaggtcatcagaagtctcttcattctgttgtaatgattgctggaaagtacttaggtccttgagccaaagctc

SEQ ID NO: 300942 - DNA, 3135 bp, Cannabis indica
atgtatgtaaataaattagtggcgaaaatattaaagtaatcaattttgttatagttaactattagtataaaaaaattaatagcgaaatttgtaagtaaaattattttttaaaaataaatacgtgtataaaaataattcaaattaacttaaaaataataataataattaaaaacaaattccacaaaccaaatatatgatttgatcaggtttcgggggcgtgagaatatcccctgttctcccatggcgaagaagaggaggactattcggaagccagcacctacaagtgcggagagcatcgaatttgcaaaggaaccacatgattccttcgatatcttggagagtgatttagggttggagcctgtcctaaacagcacggttcgatcccccatatcgaacaattgggcagaggaggtcgggaaagaatttcaagctaatttgagtgaaatcttgagccaattcaaggcaaatgaggttcctaatccttgtactagactttcttttgctgaacctatcaaagtaggagatcaattggttgctaaattggacttagatgaagtagaaattgaggcttcatactggaagaatgttattgtgtgtatagtcctaggagttaatcctccattcaaagtctttgagggatttgtcaagagagtttggggtaatatgggtattgagaaggtggtccgaatgaattcaggcttcactttggttaagttcagagatgaggttacaagggacttagtccgggaggttagtgttatccattttgataaaaaaaccagttgtgcttcctccttggtctgcagaaatggattcagctcaaatgataaactcagttctagtatggattcggataaatggtcttggtctccaatattggggaaagaagaacctaggtgctcttgttagcacaataggtaagcctattatgattgacaaagtcactcaagaacgctcaatggtgaaattcgcacgcattcttgttgacatggtaatttctgatgaaccacctaaactgatttcctttattaatgaaaggaggtagcttgttgagcagctggtggagtaagaatggctcccatcaaagtgcttggcttgtggaaatcttggtcatacagtggccgattataacaaggagaaactgaaagtttggaagaagaaacaaccaggggtctgtaaagaagataaaaaggaggctccaaacatggaatcagttactggtgatgaaatgaaatcgatcaatggctgtgaaactgctgcagaagaggaaaaagcaaagctagcaagccaagctgatatggaaaaaataggcagcggggttcaggacaaagctaactagattactcctaaaaagaaagggaaaaaatggtccaaagactattgttgaagcacccaaaacagtgaatggttatgcagctcttcaaggagcaattgatgcagtaatggttcccaactctaacttgactattaatggaagtttgtaaaatgattggttggaatgtgaggggaatgaataaaagagaaagcatattgcaattcttgatgtttgtagattgaataaaattggttttggagcatcattcgaaaccaaggtgaaacatgaggaagcttatgagattatagacaataattttcctaatttgaaatactattcaagtaatgttacctctgatagaattatgattagttggcaagataaatttgttcaggtggaaattttagatgaggacactcagctggtgcattgccgagttaaatttagtggtaaaaaggtctcttttttgactacagtggtctatggcagcaattcaatggatgagagaacaaatctttggcaaaaacttgagggctatgggctgatacatgaaccatggatcatctttggagattttaatgctatgttctcgttccaagacagaaatggtggtagacctgtgcaagctaaggacattttggatgctcaaacttggcttgctaatggccaagttgaggaatttaaatgttcgggagcttcttatacttggaacaacaaacatgctgtgggttagagaatctattctaaacttgatagagttttcataaatgataaatggttgaatgcttttcctaatactgaagcttgctttaaatgggagatggtttttgatcatagttattgtttaattcaaaatcatgagctgaataaggttggggttaaacccttcagattttgtaaccacttgactacctatccgaacatcagaagggttgttacttctagctggaatagacctacaccaggcaataaacttgagaaaattgttaagaaactttatagagtaaaacgtactctaaaaaaagtttagaaaacaagaagtgggtgatgttgaaaaggagcacaagattgtcaaagaggactattgccgggttcaagaggaagttgttgcccaaccaaataacactgaccttcaaaattctgttgatctcaaatagaaggagtttcttactgcccagaacaggttatccctttttctttctcagcaaagtaagataaagcggtcatagtttaatgatgagatatctagctactttcatgctgccatgaggaaaaggaagatggataacagaataacagcctacaccaaggatgatactattatagatgactttgaggaagttgttaaacattttgtgggtcattttgagaagtttatgggaagcaaaagctctgctatctccaacattgatcaaacatgtattgccaagggaattgcctaaatgtagagcagcaagttagacttatcagacctttcacaatagaggatgttaagaaagctttgttcagtatcccctctatcaaaagtttcgggttagatggctttggctctggattctttaaggatatgtggagtgagataggtaatgaaatttctagagcttttattgaattctttgccaatggaaacattcctaaggatctgaatgagactatcatatccttaattccaaaagttattgatccgtgcacggcgaaagactatagacccatagcctgttgtaataccatatataagtgtatctctaaattgatttgttctaggctctcagaagtgttgggaattattttaccaggaacttagatctactcacaagtat

SEQ ID NO: 300943 - DNA, 1179 bp, Cannabis indica
accgcaccacatttttttgcggtgcaatttttgtggttttttagaatcgcggtgcgggtgctgtttgaaaaattggaaaaattacatgtgcgaattggtttgaaaaaatggttaaaaaccgcactacccgcaccgcgaacacccctacattccacgatggtagttaacaactaaaaatagatgggaatgttaaactgctaacagaacacgagtttagggagttttaccaccaaaattttagaattgggggttagttgcaaaaacctggtcacttaaggaggttatgccgcaaattactctaatttgaatgttccaattctaataagccttctttttttttggtaaataccatttgatattttgagaaagattgattagactctctgattagttaaatgacaattaataacttatattttcaaaatgatacaaaataaacgttgagcttaatttttgtcaaattaaaacttaatattaacctgattacctaacatagagatgacaagactggttacatttgtttgcatctattcgtgttagaaattgacttcaagttgattatattaaaaaaaaaatgacgaaaattaagttcatgatctattttatagcattttgaaaaatacataatttaaattattattatttaggaaaatagaatatccaaatattaatttttataaaacacaaattcaaaatagtatttactttttttttctaaaataagtagacttatatatcaccacatgcacaaaatcaattttattatattataatgatttttattattttatatttgaaaataattcattatatgtttttttctcttcatgataatgattcagtttgtgatgtaaattaaaaattgggtctctaactttagttagtaaatatatataaaaaaaaaatggtgtagagcatttcgatagtttgattattattaattaaccaaagtggttggttcctacgtactactttaacaacgtcatccatctttttagggattcaacttccacattacttgcaatgcggtccgaatctgaagcactaatatttaaattttggttcaccactgaatataagaggattgttattagacactaataatatctaactatatttataattagcctcttattagtgatattatataaaaattattatattaaattatatgagtct

SEQ ID NO: 300944 - DNA, 2751 bp, Cannabis indica
aattgtaaaagtgattatgccataattttataattcaaattagttagcaaaaattttattaactcacatttttatttaaaccactagttttattattagaaactagtttataaaagcacacacatggcgtccttaggattgagggcgttacatatatggtcattactttttactgattttaccaccatatcatctatgtagactttcatgttgcgacctattcgttgttcgaacattccatttacaagatgttggtatgtagatataacaataaagccttatgctagttataaagctcatgtgttcttgatctgggatgtacatttggttctatccaaaatatgcgtccataaatgacatgagtttatgccctaccatggcatcaacgagctaatcaattatgggcaaaggaaaataatcatttggacatgctttattcaggttagggaagtccatacaagttctccacgtgccatttagttttgggaccaatactgaatttgaaacccagattggataaaatgcctctgtaattaagttattagtcaataatttgtcgacctctttcacctgattcatcaaaacaaaaattggtcgacatcttcctttattatattctacctctcgggatcaagtaaacgtctcttttgttgtcttggtggaaagttaagatctatgttgaggtggtggaaaatgacatttaggtcgatccctaccatgtcagaatagctcctggcaaattgatcctgttttccattaaaaaaaacaaattaatttctactttaactcttccccaacctttaaccaatttttacaactttagtagggttgttgggatctattaccacctcctctaattcctccataggcccaagttatgattgttcatcaatgagccttgggtccagatcttcaaattcttcattgttcgcctcagttataactatcattgcttgatgggtcattgcactttattttagctatacgttatagcattatctcgcgattaactgatcccccttaacagtgcctattctggactggttgggaacttcaaagacaggtgctctatagagcttattgcgcccattctagtcaaagtaaaggtgatccattatcatattatttacttagggaaaatctaccaccaagaattcttgcatttatgttgctaacaatggtgactctcccattgttaatggaagttctattgttcccaagctcgcaacactatctcctatgaatccatacaaatttaccatgcatggttttaatggagcattctctaaccccatctttcttaatgtttctttatacaatatattaatagagtttggtgttaccgactaaaactcgccttatccacttgttcgcgagctagactattatcacgagtggatcaatatgaaaaaattgaacgtgtgatgcatctctcggtgaaataatgggaactgaattttgatttctttcttggtttatgtactgtttctgtgcatttctactgattcttttcagatgaggcccttaagaaattaccaccagatatccttgccatcaataggtggtggttggatattctgatttttgtttaggttgttggctgattttggtttagctctcctcttgcagtaatcccaacctgcaaagtggttaattggatactatcatctaaattcctcacttttgttgtagccatgtcaaaacgacttagaaatgcctttagcatctcactaggttgttgctttatgtgagtcagcgaggaagcttcgagcctcctacttcttgctgctgagaattgttttttgaagtctcgtgataatttttcgtaagaagttatagaatgcttggtaaatttatcaaaccaactacttactgcccccgttagtgaggtcgagaaaatgatacatcacaaattactccctatattgctcgctcgcattatagtattaacattatttaaatgcaccactaggtcggttgtcccttcataatgagtcacatggggaattttcaaaccacttggaaaataggagttcagtatatatggatggaaaggctcaggttcctcgtctgagtcatacccaggcaatttttcgtactctcgatcttgaaaccttctaaacttgtcttcaagttgaatgacccccttttctgtattgaatcatcaactaattgattgagttattcttgcattcaggtgcgtttctttagtctttctcagatatttggggcgttccagttcaatttttcactcaaatttgggtgccttagatttatttgatcttgaaggtctggtctatctcacgtatcatgatgcctttcttgtatttcaccataattactcaccgatttggttggcaaaatactttcagattgataactctacaagttactaacgctttcttgttcatcatgatattcatgatgaggagttcttttccttctcagtgggttttcccatgtccatgatatggatgatcgattttgtccttggctcctccttaacccactcattgcagtcttagattcagaccctcgagattcatctcgagttggcctttttctttcaaaagcatttgctacatggtccctgcttagataagtgtaaatattatccctctcattcttctagggacctcgcggttgatgaggagtgtaaagcccgcttagttaatttggaaattagcagttatttgtgttaatcagggaattatttatagctatttaaataatttattatggaattcagat

SEQ ID NO: 300945 - DNA, 2825 bp, Cannabis indica
atatattttctaaaagatattttttttatttgggctcctaaaatgagtgggccctaagcgcgggtctagcccacctatgcctagaggcgaccctagggttcttttgttcaataaaaaatttagggataagtcgaaaaatacctcttttttgtattaattaatcaaaaataccctcacattatttttttattaaaatatacccacttttttgagtagattgtctaatataccctcactctctacttaagtctagcatataacttacataacctaaggggtcttatggaaacatggatataactaaaaaaatatgaaaatagaggtaaaaattaaaacaaataaagtggatatacaatgtaatttcctctagaaatttattccattacattcttatactaaaccactaataccattttcaaaaaaaaaaaaaaaaaaaaccaactaacacgaccttaatatgtagaggtgatagggctttttagccttctctttcttttcaaagcttcaaatgttttggtaactaataacatagttagaagagagcttgggaaaatagtcattatttctatgacaatatagacttttatgttggagaaatctgtcgaggataaagacgtttgtgattccaaaccaatggtttttttgtgttgacgtttcattggtggcttcgagatctgactactgaaatgaaattcagaaaattaaagagccacatgtttcacattgccaagagacaatgaattaacaacctcaaatcccaaatttttgtaattttttatttttatttaagcatataaaatatatactaaaataatattagaatgatgtaacaatattatatcatacaacttaaaaagaatgctactactaattgtagtatttccctttgtcaaaaaacaaaaattgtagtatttccgcgtttatttttgaattaatattataatttatctttagtaaaaataaaacagagtaatatttatctttgaaagaatatatagactcaactcaagtacaaacaaaaataaagtgaaatcagtataataaatttgggaaaatcagtatgcaaaagactttattgtcatcatcattattggaaatcaaattatatgaacaaagcaagagctgtcatatatagtattgtagctaaaatagcaaaccatgattggtgggcaagacatgcaaattgacaaatgtcaagccattaataacacacttattaattatgtttctatatataaataaatattgtaatattatgaagttagagagtgtttgtattagtaaagttggagtactcggcgcatggaattgggagcgttacccttaacctcattcgcctccactttctttcctcgttctccaaccatttcttcaatctgaaaactcagaggtaggtacatacattatatatacatatatattgtgtttagatatagaatgacatgagttgagagagagtcctctgttattatcaccaggtttggagttttaccttgttttctaggagctgcttctcttctctcagttgcttttcctgcatcaattttcatataacatggcaaatagagtaagtaagttcctttggccaccacagccatattttctttgatttgatcatattgtgtatatttatatatatatatatatatatataaatagttctgaatatggtcaaaccataatggttatcaaatgacagagtacttttgcaacttttgtccttttgtttttgtagcataattttatagctgtgaaaaatctcaactcacaatgttgtaattattgggcaaagaatggataaatatacctttacattttctaacaaacaagatgaatcctttaatttctatttcagtgataatttgtattatccaacaacattgattctgtacaagtttgatgttactacactttgttaaaggtagtgaccttttttttgttactcatacaaagtacaaaacgaacaaacatgcatgatttgccaaacgaaacaacctaactttataaaaagataataggtggaatgtacctgatcagaaagtgttgatacagtctccatcattagttgtgcctgaaaagtagaagattcgttagcaacataccatcatattcctttagtgacaattacacgtcagtgtcatgaaagagtagaaatgacctataagtaggggcgacaattgggttgtgttcgtgttgtctcgagatttaggttttacaagcaattactaaattaaaatccaactcatttattaatcgtgtaaaaaactaaaacacaaacctaatatgtctaaatagagtgattttacccaacctgtttatataaaggatcatgcttaatttgattacttatcaattcattaacatagttataacaagttaaaaatatttacaacaattttatggcatatttataagtaatttaacatgtttatatactatttaactaacttaatacactttacatgaaataaaatgatagtaagaagaagaaagtatacttttaaataggccctagtgtcatttttggttagccatgccaatttgaatataatctgtttaataaacaagttagttgtgtcaacccaaaaatgatccaaacccatatatggtaaaccctgttgtggacattgtctcacatagaataaatggtagagaattgagaaatatataagaacatgagctactccattcatagccaattggttttgagatggaacctcatgattcttaacatggtatcaagagtcatatcccttgcgggcaagtgatcctatccgatccgcacctatacagatagtgaccatgtccactcttatagtgttcaa

SEQ ID NO: 300946 - DNA, 1035 bp, Cannabis indica
ttttttaaaaacaaagttaaaaaagtgcttcgtaaattttatttaattttgtcttttgttttttatttacgtgaggaaactgagatgagggaaagtggatcgatatctcgctcggggacgatgtttggtgttgagattcgagttcgtggtctaagtatggtgccccggtccgggtctgagcaagattcgggtcggggtcggtgtctgtgagccaaggtttgatctgggccagaggtcggggtaggtttgggtccatggatcgtgttgaagtcggggtttgagccactatttaggctaggttcgagtatgtacgtttgggtcagggttcgatccaagagttggggctaaattagtcaaggttctggccaagggtcgggtttgaggtcggcgtttgggctaaggatcaagttcgagttcaagttggggttgggccgagtctaggtccaggctggggactgggggcccttagccgtgggctaggggggaggggtctaggtttgggtccaagttaggggtcggggtccaagttcaaggtttgagatatagggtcgagctccgtgtcagggcttggggcttaggcaggggttagaggccgaggtccacgaactggaggacttgatctatggatcgaggttttcgggtcagggttcaagtctaggtttgcgtttgaggtcgaggtcgaatcggtggtcgaggtttgggtgctgaagcttggcccaaggcccaaggcccaagtcgggtgctaaggtttgagtcgggggtcaaggttgccaaccttcggggttagggtcctagttagggtcaaagttggatccaagttcatgggtcaggttagggtttgagatctgagaaggggtcgaggccgagatccatggttcaacctaggagccatgagtcgaggtctggtcgaggtcggggtccaattgcagaatcgaggtccaaaatattaatgaaagagattaaaaaataaattatattaaaaaaaatgttaaaataaattttaaaaactgaaatatttttttttgtttttaaaat

SEQ ID NO: 300947 - DNA, 2501 bp, Cannabis indica
ttttaaattgtattttaatcaaaagcattattacttttttatttttttttatcaagagagaaacttcattaatcaatactaacaaatttacaactttaaccggggcataccctttccaactcacaccattcctactagctctttacaaattttaaaattaccttatccaatttagacaatgtcctctcattaacaaagaacaccctagtcttaatactctcttttgctagagtatcaatacaatgaggggccatacatttacgatcaaacacacacaaattcttattcaaccaaatgccataaccggccatagctgcataaaaaatatcagctataaacctcctgggctttctgctattcatccaatgtatccagtcctcgtgaacactcggccaaagcttgctgcctagccccttcccaatgagatgcataactggccaagagtaaggacaagagaaaaataaatcagaatggctccaaattcaattcacacagtgggcagagaggtgaatcaatagacatttgtcttctaatgagattgtctcttgtaataagatggtcatgtaaggcttgccaaacaataaaacgatgttttcgagctgaaagattatgccaaacagcccttttaaacgagacacgagagtcattcttcaaaaactgttcatacattttttattattttaatctatatttaataaatttaaattataaaaaattattaaaataatcaatcttaactaaagtacaagtatgattaaagtaggattaaaaaaaatagctctctattttaacattttaggtattttaactaaaatttgactaaaacatctagatgctcttagttacatcagtacttatctacagaagggcagacggctacataaatcttaattatttgatttttattcaatgattgtgatcaatttgatactaatacaactactgtatttgttttttttgacatgtaatcatcatgaagtcataaccattgaaattattctatatatataaagagagagaactggatcaacctataaaagcattattatcatttcccttatccattcctttttttattcttttccttttttttttttcgcttttcaggaaagagttcgtctgaaaagattatgtggtagaccaacttataataattaagacaatttttcatatactgctgaagtaactgttctgaagggctgaagtttgtatttgtcatttttaagattactgtttcttaatttgtatatacatatttatttatatagtggggattgttcttagttctacttgagttgtgttcttgtagatgataggcacaatgttctgaacagtaatcgtccctgctccaatatgttctagtataaatgaatcttcagacattttagacagagataaattttatctcttaaacaacacattcaagtcatgtctttcttttatgttcattttccgattgtaattttattttgtttgcggaagttcaagttgttttaatttcaagtaatgtttttttcttgttctttttttttttaataaaatgataaaattcttgataattaatacgtataattttaccccaagagtaattcaaatagtcaaacataagatctacctccacatgatttgagatacaactctctcttgagcatgctattgcacttattcttagttggtttctttcgaagttgtacatatttggtcccatcccaatcggccaatccctgaatattcataataagttcctccttttttctcttagaaatattgcaatgttgttgttggttaagtagatagatgttatgaggccagtttgggattcctttgctgtatgtgacatgagtcgaccttagagtttgctgtgctgttgcagcattgcttggttccggccggcaaggatgccgctaccggcagcctgttatgatttgtcattggctagcttgctgatgctttctgctgattcaaagatgagtttgtgttgaatactcaagtttgtttatagtttaaaaaatgaagtttataactttggttttaggtagtacagcgatcctcaatattatcaaaccgtctatgcactatgaattgaaaaataaaaaatatatgattcttgaatctcgaaaccaatctcttttttttttttttttttcaaactaggaggattgacatttggtcaagatgttatctatctctttccttggttgtggtgaaactttagctttctttagtgagggtataacatacatatttgattaaaaaaacagtaaaggttgttaaaatacagaatatttttaaacgggaaatttgcagtaccaaaactcgtttttttttacacttaattaccaaattttgtttcgctaaagatattaaaatgttactttttcttacgttttggtatcaaacgtttaagtttgatttttgaaaataaaagttttagtatttaattttagtaaacataaaatttaactaatttcaccgtaaattaacttttttttttttttact

SEQ ID NO: 300948 - DNA, 2375 bp, Cannabis indica
gctgcagggctggaagcgaagctgtttacaacagactttgatctgttgtctgtaaacaaaatttgatcagaagtgaagagcccttttccttgctgaaggtttttgtagtaagcattatcgaacgtccttggggttgtggggtccatgttaatggcgattctagggtccacatttctagggcacatttgtctcagttgtaaagcgtaatttctgttgagagttgggtcaatagttctcccagttttcgggctgaagttgtaaattcggttcgacattttactacagtgagagaaaccaattgagtgggcacctacagtttcagtcgttgaagtttattaagttagctttggttgttaactagaatattgtaaaactataaaatcataattaaaatttgacgataactgaaaaagatacataggtatgctttctcagtgaaaaatagaaataaaaaaacaactaggcgttagtttagagttttcatggggttatacctgataaagcaatcatatctttttgggtaagaccatgagatgcaaacatggagttgagttggttcaagttaaagtttgggtgaggaagctgattttgtacgctggacttggaagaaattctcccatctcttctccccaattccactttgtaagattgccctccagtctgcccatacacacataatttattatagtttattatgttatttatattttgcttcttgtgcatgtaatgaataatcatgtatgcgccatttatttgttaatttgctatatatatgttcgtaccaaacacatacttatgtttatacataaaactaattttgaccacttaaaaattaccaggacgacgacatctctggtagcaagagctaggatatcagcgcatgagactttgttcctgcaacgagagtctctgtcaacagctgccttggctttaatgacagtgtcaaaaccatctccagctagagaaagattgtctgggtgatccttctctgcgtttccatttggtgatgacagcataaccgaagcatcacacccctaaattataacataaatacacatcttcacatatgttaattaaccaattaattaatacatgcatttaagagctgtatagttagtttaagctcattgatattacgaacccgaacaaagcagtcgtggaaaaagagtcgaagggtggctggagcagtgacaaatgtctgtcggaatttgttgttgacggccgatcggactaaagattccacatttggacatgagtttttgtagaagtcattgctaagctttgattgagcagtagctgctgccacgaacaacgccagaacaagaacaatggctgaaagagcaagaatcgagcttcgaggacttcccattttgatcaatatatatttattaaaatatattagagcaaatatactttctacgaatattggttgttttgaagtcctatttatataggcacacaaatgattagtgttgacaaatgatcgaaactgttgctgttggaccaaagaatttttctttgtccgatcacactctggcttaccatttaatataattaatattgacaatcaaaatataaggcaatattcctttaccatgttctacaaataaaaaactagaagaaataaatattttctttttatttatacgaggatatacttatatatatttcatgattcgaagacattcatttgatagcaattaaaaaccacatacgtgccccatttgtgcttggacatttaaattagtttacctttaatttattcttatatagtttaatttaaattaagatgaaaggccaggattgaagggacagatatggacaaaaaaaaaaatcatttgtttattaagatggaaaataagtggaaacaagaggtgagacaaaattgtatgtataattacgtacatagattaaaattatctaccaaagaaccagttaatatatatttatttataaaagttctttctgaggggggtgacatatataaataaaattttatagaaattaatttgccagttcaattcgatgttagtgcctaccaactcctgttgatcactactctccatgactatatgatcaatatctccaagaaaattcgactctcacacgattctttatataaatgaatatacatatttaaatataaatataataatgcaaaatgtcatatctactgttctgatatattaatagacttaaaaatcctacttgttaatttatgccataagctataatctagctataacatatatagaaagataggtttgacttttttgttttttttttttaaaaaaaagaaaataatttcattaaaatattaatattttaaaataatttaatttttatttttaatcttgttaacgcagattttcgtt

SEQ ID NO: 300949 - DNA, 3616 bp, Cannabis indica
caacattttttggtctatcattttggatgaatttacactaaaaagaaaaaatatatataaatacaatttaaacataattctcattattaaaataaataatttttttatttacacattttaaaccaattgagtaacttaaattgcaatttaaatccacatagaaacccagtaactatcggaacaactcacactataaaaatagaaaaactaaattttaaaaactagtatatgaagtaattctacttaaaaaaattaattaatattttttaataaagtaaataaatacataaaataaaggaattatttcaacaaaaacataaaaacaacaaaaaaattataaaaatgcggtttcacgaaattttgaatatttttacgatttttttgattttatttacagaaaatacggtttttttatgttgtaatcttgttaatttgttgttgattttttgttatctgtatgttatttttatgttgttttcgtgttattttttagaaaactgtaaaaatgtaaaaaaaaacattttttgaacgtaaaaatgtaattattttataaaaaaatagtaccccatgtaataatatatattttagaaatttataaatataattggatgataattagatagatttaatttaattatttattaaattagatgtctcttccaacaaccaacaacgatatgttctaattagatttttaaaatttgggtcggttgtaattgaatcacatgaaaccattaattagtcaagatgttcggtagtttttgggtgatcactcttccttctcttttattttttctcaataaagaaaattcaaagtgatacatttagtattaataatattaatagaaagtaataaaaggtaataatttctttttgaataaaaaagggtaataatttctaaacataataaaagaaaacatttgataacgatgatatgattggtcagctcatattttgtctgccaaaaataaaaaagctgaggtggaacaataatctaattagatttttcatttttggaccatctttttcttttttatcgtttatatatattttttaattaggcccaagttgacctagttgagatataatttagattttgtacgtgcaaacgcctaaactagaaattcattgtcaccctcttcaaaaacagggtgtcacaactcacaaccacaccaccaccaccaccacattgccctatctatcaatcaatcatccatgctcatggagtttatctttcctacttttttaccaaacaaaatctaatttttctttgttataaatatttttaatttatgattgtattagtctcagctatataagatagagaaagtagtatactaatttgttacgttgttattgttgtttctttcactgttcttctttcgtcgttttctatattgtattatattatatatataaactttaaactataaagcatcaagcttttgctcgcatgtggctaaactcgatctgggaaagtggcaaaagccgtaaatttaaccattggcagttgctttctttgtaaactgtttttgttttttaatctgatatatattattgttatttatatattgccaaattaaaaaccggccacagctccatgatcggtgaccagaggcagaacatatttcattagcgtcaccatcatcaagttcgctccttttattacctcatatactctctcttcttcataaaaaagataaaaagaagaagaagaagaacccttttaaggatatagtatactaccacgagaaagaagacaacaaaatattcccagaagccaaacagaggaattggagagaaagttttgattttgtttgatgggtcatttacaggagaagctgagagggtttacaaacaacagatggctcgtttttgtggctgcaatgtggttacaatcggcggctgggattggatatttgtttgggagcatatctccggtcataaagagctctttgaattataatcaaagacagctagccaggcttggtgtggctaaggatcttggagattctgttgggttttttgctggaagcttgagtgagatgttgcccatgtgggctgctcttcttgttggggctttaaagaatttttttgggtatggttgggtttggctaattgttactggaagagctcctgttttgcctttgtgggctgtaagtatctatatgtatctctatcaacttttcaatctatctcttttggatttcttttcatatttggtttcctattacaactgggatctagttcttttttccatgtttttccttctgggcatctctctttctcactcaggattttatttgggtagattaagaatacttccctttcatccattttctgaaagttcccatctttaaatgctcttgagttttttttcccttctaaggtgaccaccatctagatttccacgtgtaattagtatccactactagtgtttgatacgaggacttttgtaaaaccaggtggttttgctccttccttttatatgctactatagttttagttgaaagaatagtgtctaggatccaaagacaatctaaaggtgtttggaagtgaaatatgggaattgggttttgttgtttatacatgtttgagaaagtttgttcctttgtagcttctaggaaaagtataaacagtttttatagttgtcttaaaattctaattagtaccaaagaattgtttttttttttttgcttggttagctatcaatgtagttttaatcacttgtcttattaggtagaagaaaacattaataaccaatcttattgggctcttgtctttgtctaagaatttgacacaaacatcaatatgttatgcagatctgtgttcttatatttattgggacaaatggtgagacatacttcaatacagcctctctggtttcctgtgttcaaaacttcccgaaaagtaggggtcctgtggtgggtattttgaagggatttgcaggcttaagtggtgcaattttgactcaaatatacactatgatccactcaccagacaaagcttctattgttttcatggttgcagttggtccaaccttggttggtattgctttaatgtttattgttagacctgttggaggtcataaacaggttcgagcatcggatggcaccagctttacaataatctacagtgtgtgcatactagtggctgcttatttgttgggggtcatgctagttcaagatctagttgatgtgagccataaagtgatcattatatttacagtgatcttgttcatcattctcctagctcctattgtcattcctgtgtggttgagtttctctccagactcaagagtaccggaagaagaggcactcctagctcggcctaagaaagagggaactgattcaggtgctactagtgatagtgaggcgatattgagtgagcttgaagatgagaagcctaaggaagtggacttgcttccaagatcagaaagacaaaagagaatagctcaattgcaaacaaaattactacaagcagctgctgaaggagctgtgagaatcaagaggaggagaggtccacaccgaggggaaaacttcaccttgacgcaagctattattaaagctgacttttggcttatttttgtgtcacttatgttaggttctggaactgg

SEQ ID NO: 300950 - DNA, 957 bp, Cannabis indica
atagtgatttcacaccttatcatggtccttcatcaatcgagccatagtgatagagtaccatacccacacatagcaagtcaagtactcaatcatagtgtgaaagatggtggttaaccaaaccgaaggagagaatgagatccaggctcagatcttgttattactctgcgacagaaagaaacaagggttagagatctaagcggaaagagtcatattcatccgctaccatcaatgtaaggttttctaaactcttatttgtttaattttatcgtattagagaattcatatttagggtttaaatgaaacatgcatgttagtaaatctagatcctagtaaaataaattcaaacactttcacctccttattagcaacaaatagctttgtgttcaccttgccaagctggccgtctaggtcatcaaggttcttcttattggctgcaacagaccgtttaaggtgagcatacgtatgcccaagcttcaaggtaacttgaaacaaaaaacaagagttaggtggtggactacaatatacaaaaagactcctgaaaaaaaaagtatcacttaccgaggacaactcttttaagactccaaaagtacagtttcgatgggctcactgtctgaatccttcaattgctcatccacttggactgggcacctatctaggtagttgttgacaatatccttttcttttcctacccagctagatctcggacattctttattggacctcctaggagcatgaggatgcctgtccaagctacccaccatcagttcgttggccagaggagcataaggaagtggtggaggaagaccaaaggaacttgatccctccttctgggcagacttggaaagagactcttctttagggacacatataggctttcccttgatgaattgccccagctttgaagccataactgcaaaaacaaaacacaatgtatgttgggttttacgccctaaataa

SEQ ID NO: 300951 - DNA, 677 bp, Cannabis indica
aatgaatatatggacagaaaataaaaaagagagcaccaaaattatagtagttcattctctgtatcacgaaagtaatgaagataagtacacttagagcttttattattactaaatgttaattgccttacaagaaaattcaagaaaaaaatgattaagtctagtttcgctctacaatttttaaaaagaaaaagtgtaaagagagagaaactctaacattgtagaaagaaagtaaagtgtgtaaaataaactaggggagctcttattttataagaaatgaggtttaattaaattacaataaaataataagtaaatttacacaaaattggttggaaaatcctacactagtttgctagtcaatttgaggctcgaaacttcagaattgtaagagggtgtgagacacactgagataccccttcaaaacagctttataaatagttacagataatcataattattctcaattaattaatagttaataactacgccaatggggcgggtaacctatgggggtatagtaattaaaaaagggaaatttgaaattctatgcttaaaatgccattttatttttttcctaaatgtatagttattaaaattgttcctatatgccaacttttttcattttcctaaactacccccctcatttgaatcagcctctctcttcctctctcttcatctct

SEQ ID NO: 300952 - DNA, 2443 bp, Cannabis indica
cacaaaactcaatattacgactagttgaaagtcatggtgtatgtctaaattatcggcccgcactttgggtgctagcctgaggccaacaatcagagcttcatattcatcctcattgttggaagctttgaaactgagctttattacctcgtgcagctattgcccctcaggtgtcctaagggccatgcttgcaccagacaagttatcaatgcaccttccaagttgaattgtcttgctcatgcttttgctcttgctctcgcttcttctcgggctcttgcttttctcccaaatattgagagatttaaagagatgtgctcgtacattcagcttcaaagttggcgagatcttggccttttatagccatgcttggttgatacgtgacctcatattggtcgagctcaatggaccacttaagtggtcggccatatgttttaggtttatgtatcacctgtagcaatggctggttggtgtgcacgtttctgtaagagagtgaagcattcaattggattctctccttaagactttctatacatttggtttaaacatattgtcatacagttgtgtcagagacactattttcaatgatctttggatcactgttagttgttattgcaagatttttctctaaatttccagtagcatctgtatcccatgttcgttggacagctaatgtggatgcacgtgaattagatgggcatgtttttcagatgaatgaacaacttgtttggctggaagattaatctatattatattttagacactttgttaccatagtttgttatttttacattatttatttgttcaatgatatattgctaaaataaaattatggcatttgaaatctctcttcttcctgttattattatttacaacctcttagtcaactttcataccagaaatcacatgttggacttttctttgcaatttttatagcagtatttgttatagttacaatatcatctctataaatttttgaaaatttttgaatattttacagtactaaaaataaaattcttgatattccaatttaccaagcgtgtttaaaaaacttcaaacctgttttcgatgttgtaaaccgttcgaaattttttaaaaatttataaaaataatgttataagtataacaaacttatacaatttttttgaaaaaaaaaatattgtaatatatatttttaggcacataaattgactaaaaaaattataataaaaaaatttataataacactcctcttttttcaaacattaaagtttgcgatagaatacaagtgaagtgacacaatcttaattcatttgccatttggcataagctatggtttcttgatcaaactgactgtgtacggacctttagcagataataataataataaagttgaagggaaggtaggttgtaactattttacctaattctcctctaccaaaataaaccaccataacttcataccataccaactttataaaatgaaataaaataaagtgtaaatttcattcattccattcaacatttctgctaattttcttgattaatatttgatatatgttattttttatattattttaatcaaaattattattactttttcattattctataaatttatttgtatttaacaaatttaaattataatatattattaaaataattaaataccaattaaaatatggaatataattaggacaataacaataaaagtggctctttattttaattttttaattattttagttaaagaaactatttaattactaatatagtgattagttattgttttataattctttttttaatcttagttaatatttattttagaattttattaattgaattatattatattatattatacgataactcattagctttcaaagtaacaaaaatatatataaaataactgatatataaaaattgtagcttgttaaattatatggcaactccctagtttaaaaaaaaaattagatgatctaaatctataataaattataagctattataatataacttaaaaataattaattaattactaagatgtatataaataaatcttagagttaaccaaagtatatttcaaattatatgaaataaaaatgaaatttttatgtaaagtttactaattaatttttatcaacttattagtaactaaaaattttcttttaaaaatacaagaaaattagaaaagaaaaaactctaaacttaaagtcatgtcaaatttagttattgtggcacgttaataatagtagtaatattattactataaattagatataaaatatgtatattgttaattttcagttttgaccatattcaagggttattcagggtaattattagaattctcaattttctttcttaaattactctacattttcagatattattttatagttattatgtaaagcccgcttagttaatttggaaattatcagttaattgtgattaattatgaaattat

SEQ ID NO: 300953 - DNA, 5590 bp, Cannabis indica
aaaaaaaaaaaaagaagtatggtggaaaagagataaatggaaaaactagaataacataaataaacaaacctaagggttcaattgtaatttcatagaataaagaggacacttttgttctgagctggagaagagaaaaagaagaagaacaggaacggaacagagttccatagcttcaaagtcttacatgccaaaatggtactctaactctaactccctctctctctctcaagattatatatactattttgtatgagtttgtaaaattacacacaggagacgatcagattatatttagtaatccaaggtttataatcaagttcaaaccctaagcttattgatacggtaaattactggtgcaagcataaattacacagtttctctacgagaatttatgtaaagtttgaattggaataaacagatcgaaatgcggagattttgtgggaattttccagatgagcttttggaggaaattatgtcgtggttgcctcctgattctctcagacgattcaagtgcgtttgtaaatcatggcgtgttctgatcacttctcttatcagaaaccctgaatttgtggccaaacaccttgctaatatgaagaacaagaagttgtgttctccgttcatacacctgaggaatgtgataaccactaattacactgaaaggcaagaaggaacttatttccttacattggccaatgatgatgtcgaagatgattacaccgatgatctggacgataatttgtacattccttgtgttactgaaaatctcaagtttcttacctgtgatctgcacaatatttttgttaaacttgttgctcattgtaatggcatcatatgtctctctgcattcgataaaaatgatatctttattttattgaatcctgccatgaaggaattcaagattgttgctaatgcttcccctggtgatggctcaggagagcgagtagtgggattcggctatgattcaaacacaaatgagtacaagcttgtcaacattaagtcgttgtatgaagatgaagatggtccatataaagctgaggtattcactttgagtactaattcttggaaagaaattgagttgaatgtggaaattctatactttccaaatagtgactatcaagtggtgtactgtgatggagcttgttattggtacttttgggatggtacttgcatcattatttcttttaatgttagtgatgaggtatttcaaatcattccatttccagaaaatgtctcagagacagaaaaagaatgggatatacttgctgaatggacaaagattgcggtttggaaagatcgtcttgttctgtttttctatcctgagttggatccgatggttattgatatgtgggttatggatgcttcttctggtggtatttgtgattcctattcctggtctaagcatcttactattgggcctcttgaaaacattagttacccacttgcattttgggatgctgatgagctcttcatggagactaatgatggtgaaatcatcttctacaaccttggcagccaagaactcaacgatcatactgtctctttggaaccttttcaccggaatcgtcttgttacttatgcaaagagtttggtttctgtagtccaaagagaggagaggtaactaaaaaagcgtacggaacagtaatactttcatttgttttttaataatatttatgttactttcccctttcatgctctattgtattgtgttacactgttactaatatctgttaatattataggctgccgtgcaccttaattttgtgtttataggtactttactgtagaggggttaatgtgtttctcttaggtatgttgtattgaaaggcaatacaagtagtttagctttgagcattcttaacaaaagaactttgatattgcctttcgcacaccactctcctattatagaacacaaatatgctatctaaacgtttcagattattccatgttttaaatgcattatattctaaacaaatcagaattacacatacatacatcgacgatgagctcatcttctataacattcgcatccaactagccgatggtcatatcatctccttggaaccgtgcaacggggatcatcttgttactcatgcaaagagtttggtttttgcactcaaaagagaagagacataactagctaagagcattgaacatttattagttaattcatttttcattttaatatcagactatacgtatctcatttcaagggttagtatattatagcttgtccttttgtataaattgtctaatttagacgagttattggtttctctttggcatatcactgtgttattcttacataatattattagccctcatcaatcagtaaggaaaaatagcttgcagtgaagattctcagtaatctgttttgtggagaataaattaacagttacaagatagaggcaataactttacagtaaaaatcaaagaataaataggatttttagttctgaactatgatacttgtagagttttgcacctgaattatttttttcttaaaaagattctttcgaattaagaaaataattgtaaatattttcctttagttatattttgttcattttgtaagataatttattgatgtggctatgagtcacgcactagaatggtcttattaactcaaaatttatagagtctcaaatttttttgctatagtattatttatgaaattattttttgtttgggctcttaaattatagtagttttccttgtattagtcttgcattaggagactgtaacaaaatgtaactgcagaggaaattatttctatagtttaagggaaatttcttacaaagaaaaaaaataataattgaggggcaaaatcttgtcacaatctggagtaaaaatcatatctattcaaaattaaaagttgtttttatatgaatatataatattttaatataaattaaattttaatataatattatataaaaatatagtatacaatccaatttaatataataatatattgtataatattatctaatatagcatactcaataaatacaattcagatgaaggcatgataaggaccatattgacttgacttaaactatttaactaatgtatttgtttgttttccctttcttttttagctaaacatttgtccaagtcatatgtatggatgatggatctgttgatatttactcatccctgtcatacttttgtcctgttaggtgactgaaaagctgagagatatatactttatatcaatcacaaatatattggtcactgaaagtaaagtgatgagtgacccattgaagatgatcactccacaagaatagaaaattattgctatacttacagatcggccaaagttgaatctaggaaaatcccaccttcaaagaaggaaaaggagtttctaactcttattcaaaaacaaaggattgagcatggcgagtgcgataattatcttttttggtctcctaggtaattactaataaagtacatatttttctctaacatttctgttgtactgtgaattgatgatgctagtggtatttgctttcatacaggtaatatttcaacagggctactctatgtttcccctacgtaagtacttcaactcagttacactttatcatcttcagttcttacctcttagtcttcgtaaacaaactttttggtatcagaaatgtgttttggaggatcctgaagcgtagatcaactgaagaatttgagagcataccttacattagcaaattactgaatgcttacttttgggtttattatggagttattaagcctgacagtattttggttgctaccataaatatgtttggtgctcttattgagataatttttctcttcatattccttctttatgcacctccaagaatgaaggtatcccttttcatctcttttaacatgtattagcttttcttactctttaaatcaacatgtctcatattatcagatcaggactgctattcttgtggttgttttggatgtggtatttccagcagcagcaattttgcttacccaatttactctccacggcgatactcgaattgatgttgcagggttattgtgtatgatcttcagtatgattgcatatgcttctcctctttctgctatggtatgaaaggagataatatacatgaaagcaaacactttgatttgaatttgctctgttttgctttgttctaatgttatatttttgatgttacagaaaacagtatatttgacaaaaagtgttgaatacatgcctttccttctttcccttgtcttttttttcaatggtggaatttggactatctatgctctactagcaaaagacttatttgttggagtaagttccattcaaatttcatataatattttcctatagataacaattttttgcctcattgttttagtcaactaattggagaaatgagatggacatatttactgtgtagataccaaatgggacaggatttttccttggaatgccttcagcttgttctctatgcaatatactggaagccaaagtcatccgatcaagttggagacatattagccgatcaaccgcagactgagccgctcatcaaatcttcagaacagttggaataggaaaacgaaaatggtgctgctgttgctgtataattgtgctcataaattgtgcgtttatgccagaagataatatcacatgtaaggatgagcatgtgccttttaatattgagtcaaggcatctgtatggttagtgctagcatcatatctttttatctattataattattataataattattattattgtacttagacccatgttctggagatgtaaaatttttattatatttgacacaaaaaataattttgtgatgtatttgcatcaattgttagcgtttttgttagcctttttgttagtgttttgtttcaatgttcaattacaaaacttgatacaaaatttaaaatttggttaatatttttattaaaaatataaatgactcttactaattttattatataaaactattatcccaatttttgttcatctaacgtgatacctccacctggccaaaagtaaaaaatacatgggggacaggtcagtactaacaggccatggtagtgtcgtgcaatcccttatccctcaaaatctcaatgttgcaagatagactaaaacaagaagagcatggagatttacaaaattctcatcttttaaggttctgaagcaagttcattttaatataagtatctctagtaaagacagagatacacaagcattggcatgactctggccggacatttagctcgtcgaccaagggtgacagcccgtataccgggcaacctccaaatatggctagttgaaaaatacacgtattacgctctaatagttgtgctcttcccaaaggccttgcaaaagattccaaatcatccacaacacacctacaatttttgaaaaaacttgaccttcccacaaaagcaggaaatcttcgtcaaagtgtaactgccctatttttagggatattttccatcgattatgtattttgaataacaacttgtaaaaccataacactaatttaggggtgggcaacatccaatccaatgcaattgaactgaactaatccaattacaaaaaaattggatatccaattacaattgg

SEQ ID NO: 300954 - DNA, 4647 bp, Cannabis indica
aaatcgttcaaataattatactattttaattattaattaaaataaaaaataaaaatattaaataaaactaacactacgtggcttggcacgtaacaatcacctagtaatacataaaaatatgtattcttttttctttttattttacataatttggaaaaaaaatccagccataataatatcattaaaagtagattaatgaagtgaaaaaaataatttattggataccagtagtgtctaatacctttaatatatgacgcattatgattagttagcaatattctttaaaagttattttcttaagttacatgaaactgatacttaattatactaataacgtataacatcgatgaaagtactaagcaccagtaatatcttttaacaattctatatataaaagaaaatttattgctcttacaattagtatataatatacacgtagttaatataaccaaaaataaatgtaaagtactaatagataaactataaagtatttgcctaatgtatgaaactaaaatcataaaaaggcccaatgaaaatttattaatgttaacatgtatttcaaccaaaaaactatagttagtataaactgaaatatattggtatgaatttcacaccctttcaagaaaaattataattactttggataatacttttttttgcctttagatattatcaattatttttaattggatttttattattagacctacaaaaacaaaaatgggacattggaagcataactttgactgtaaaagtttataagcatgatgtgttgactgatacataacaagtaatactatccaatcaaaacatgccacttcagcaatattatgtactccctctattatatacctttctttatagcttttaagaatttcttgattggtggtagcagattggctccttactttatgattaatttccttttctcaatatttttcttcttatatatataattgaaacaaagctaacctaaataaataataaaatgatatgaatgagcttgttacattattaaaatgaataatgtattaattaataaataataacatgcacaaccccctatgcacttcatcattattattatataaaatattaattactacttaataaaaataaaaaatcatatagtccaccaaaaacaaagtcaactagatatatatacacatatattcatggtgggttggttagtcttcttctctttatctttttattaattattataagtaataaactaaaactaaaagggtttgtctctaatctttgttcctttgctaatatatcactttggctttatttttggctctctagcactacttcttatatatacaaagatatatataatctcatatatatatacacatttttttttctttttctttttttcacataaaaattattattcctcggcgtgaagagtggagaaactagggaaattttgttagcaaaacaaaaggcatgaatgagtggggaccttataataatattagtccactcaagccctaattaatttgattactatcatcaacttttgcgcacattacgcacttcgtttaatttagccacccactcaataagatatatgatcttaccccataaatataaatttgattattaatatatatgttacaacttatggtatatatcatatcactaattaataaacatgtatacataaatatgtttgattcatgattaaatgtttcaaacgtctagttctttgtgggacaacaaagcaataagtttttttttttaatgttatattaaaaaggaagttgtgtagggttagtggtgagaataataaggacatacaactcccatacctaaaatctttgtccttataatatatatcacagccccccaaaaaagagaataaaattaaagagaataaaatgtgtatataattaatgaaagtgcaacccacattataattacaatggaattaattgagcagagcacatacaacataagctgcatataaaccctacctagataattacttattggtttcatttattatcacttttgattaatgtaatatccttgcttagtgtaatagtaataatatgtggattagggttagacatgtcgtgatcattaattgagttgaaaatggtgatgtattcctttctaattaaaatgtaataaactctttactcatgtatttaattaagttgatgatatttaattcgctatgtatataataagaatgagaatatcataaggaaaatgaaaatggaattcttatagtattaatggaatgttattatgatgtttgttttattttttataataataatgaaaataagtgtgttgtattaataaaaataattccatttcgaattctttcattaaataaagattaaaaagttatgaaattataattttacacaaaagtggtcttgccaaaagtcgaaaaacctaaatctttagccattgatttatgaaataaaatttgagacctttagacattgatttgtggaacaaaattcaaattctgcatgaagaaataatgttctatttatatattagaatcggcccgagggtaaactccgacctgctttgaatgtatcaattaggctcactaatagtgtaaaatacaatttatattaactttgggtcggttagataaggctcgtattatgagctaacggtcgtccgtactgatgaggaccacatgatggtgacagggtgttgctcgctgctaactgtgtacagttaatgttgtggtgcgcgcacacttccaagtttgacgtataggtaggatgttgtgtcactaggatgccacataggatgatttccaaatgtgtctttggatgtctctttagttgctcattctgaattaccccacgagggtatatatctaactacgctttgatggacattttatttttggaaaattgttcccaaaccaatacggtttgactttattgcgtctgtaagttagactcgtgttcaaatctaaaactgtgactcgactcttctgttgtagattgattcacgtattatttattcaaaaacatagataacaaaagggtataaaagtctttttacttttatatagatgtaatactaataataattatatgaggtcgtaatacttataatgtaatggtaattacattataaatcaaacaaaatataataataataattttattagaattacttaatccaaattgctttattcaatggaattagctcttattaaaaagaaaacatgatttatcatcataaatatattaggccaaaccacctgggcactaggtccaacacaagtaactgaaaagaaaatggagagtttactgaaattaattggcactgaaaactttcaaattaaacacaattagatcccctttttgttttccttacgtaatatgtactgtgtatttatttggcttacttgcaaagaagaatatataccatgtaaattttgtatttatatatatatagctataaatgttgtaggtatttgtgtttaaagcaagcaatataccatccaataaattgaattgatttcaatagtactatagtgaagtagaaacacacacatatacatataataataatatatataatacctctatgtggctcttgttcacttatcatttatacaagaggatagtattgttattaagtattagtggtgttcagtactttttataagtttcaccttatgatcataattatactaatattatacctaagagagtactaaagactaataataccccacataacaattctctttatataaatatttatgtctttctgtgccattaatgatcacataatgtgacagattgacaaaataacttattgagctacatgtacagctactcaaacgtgttactaacgtcattacatttacatttacacttccataacaaaagtataaaaaagatgacaattcaattcaaactacttaattaccttgtctttctttgctccaaaatcaaatttatttacttcatttttctcccaaaatttaattgccaaatctcttacatacacacactattcaagactggtcctaagttgtttggggccaaaacaaaataaaattttggccctttataaatattgttctcatcaatactaaatattgtgatatagtttgatgtaatattttttattttaatatatttagttttatgattttcgttatattatccagcacattccaccaaaaattgtctggaccaaggtagcacctcatttaggacacagaaagctagaatgaattagactcaataacatttctcaatggtactctaggatatattatagttacgacatgcttattaattttttaaaattttgaataatctattatgacaaaaaaaaaacattcaaaatcaatagacaattgcgtgttcttataaaaaaaataaaacaaaagtatctatgtgtatcgtaaataatttaggtgtattatatattataacactaaaaaatagtgctgccacttaattagtccccaataaataatatataatagatcatggagtttgtatttactcataattttatatcattattgaaatagtagaataatacatatatagggatatgattttgttccgtgatgtactttcacgggtacgtttctactttttaaccctaattacccctagatcaatctca

SEQ ID NO: 300955 - DNA, 3001 bp, Cannabis indica
acaaatcatatgatttgttgttacgattgattctcttcaattgaataaaataatatattttccaaaattggtcgcatcattattataagtgttcatccaatttaattcatatttttcttctagtgcatctgatttgtactattcgtgaatttcatatttttaatctaatccaatctgtataataactcaaatccaatgtattaatctcgtttttagtcaacgacgcagagtcagtaaatagataatataagtgtctgaataataaaggtaatcaaaaagttatatatgaaaaaaaaaaaaaaaattaaagattcgaccctgtaatagcccactccactttttgttgcatttctatagagaataacaagatcacatgaacctgatcaagtgagtttcttattatctctcaagtttacaaatatttctgtagagtttttgctctcttcagaatacagaacttcgtcctcttattagtgaatatgatccactatttatatgaagaataatgtagaagatttatatttaattagaataaataattaatgttgattgagtcgatcccacgaaattctctaatctttccttattctcgcaatccctcaattataggagtgtggattaacttatttatagagaaatcagttaaggaaatgaatctggacatttcctttcgtgagagtctttggttggatatccttcctgtggtgagtcattggtgactcgaattgctggtggataaagtctatccagcatatgtctgaggtcgcgcgactccatctggtccatatagccgaccaatatctcttggagagtcttggagggttttcaatcctctcaacctctttcatgtttgtcatgtatcacatcattctatgccacatcaccaaggtaatttttggaataacattttccttgtaagtctgcacaggaacttctagtcgtacgaggactttttggcttatgtgatgcctagctttgctcaattggtctgtccaacctgggcattatacctaccagaggaaaatattcttattgtctttttaagtctttttgccatgattacttctcttgaaaactacactttgaagattgtgtttgacagttacatgttttctcaagtggcttttattgcaaaatggggcttttggggttttttttggaaaaaaatcaatcatttcaaatttaatccccaaatttttttcccacattttcatttcctctataatactccgaaggaaacttcatttggaactttagcacctttgaattttagagaaaaaaagggagagttttttgagttcttgagttttcttctcagactgatcattgcacaaactactcttctagggatatcttcttcacatatcaagtcgaatagtgagtaagtttctttgttctttctctctttgactttttacgattttgaatgtgtatcttgtaagaaatgttcagatgttctttgttttttgatttggaatctgtgatttgctcgactatggttttgtttattccatctattaagggttagtctagatcagcgttctactcttagatttagcaagttttctcatggattttgaattattctagaaactttgggtttttaaaaacccaaaaaaccttttctcattcaaaactctatcaaaaatatgaagtttcttgattttgattcgaatttccttctagtcagagcattgaaagtatttttccatgaaaaactttttccacgatgttcggtgcctcacatctctgtccttcttttgtagatgaatccatgcaaattttgggaaagtgaccactgaatagatgacgacctgctcggactgctctttgagcaccaccaaacactccgagcaacaaatccatcttcattttcaagcaaaacttctttttcatcaaagttcaccgagaaagatctctctagtgactctttggaatcttccttcaaacatcatcactacatcgaccaggtaagtggtgatagttacgaccgacacatttgggaattaaactaaggttggaggtagttcctcccagtcttgtggacgtacatagtctaaccagacgtctaggacacactccctgctggacattccactccgcctaggaaacaaactatcctagcagactttgttgtttctattgcaaaacatacatccaagccaactcaagctgtaaggcttaacctagctcggacaaagtaaacaacttaagtagcctcggttttggatccccacattaggcggctaatggtagctcaagctcaaaatgatttggaaccccaagaggcatccaaggagaaagttgaattggagatggaagagggtggtccccctaacattgatggtcgattcaacactaaggggggacccatgtctccttcttaactggtattagaggttaatgttgactacatcagggaggagcttccagaagccatgcctgttcggaagaaatctaatagggctcaaccgttatatcaatctcctccatctaggctaacaacaaaaaggttgagcaacctctgtgctaccgggtggttcaatggggctgttatttccccccttgcgtgcgggtcaactagctaataggcccggggcaaggtctctatgcatggtctgggccccatgctgagcaagacgccatcctactgctccacccttacttccaaagggtggctaactattacaatatcttctcgacacatatttgcccaaaggggttgaagtacttgtcagtgttgtacgtactgtgcgcccaacaaggttgggggagccttctccccatgagatcaattgttttttcaatctcaaatccaacttccgcaatcactactcggggtactttttgtaacgtctcccgcttcaagcctccattaggcctttacacccacggaatgaatgactcttatacatgagtacgtcactctggctgcttcatggaatgacgactggccccataaaccaacacgagtgtttctagtgtgctttatcctcactcg

SEQ ID NO: 300956 - DNA, 2598 bp, Cannabis indica
agatgaagtgtcatgtcctgctgtcataactagcagaacattgtgaaccatttcttcttctgttatcatttcttcattgttgtcatttcggatactaagcaagcaagtgatgaggtcttgatgtggagaagcacctttctgttccaaatccaccctcttttcgcttatgagctgtctcaacatgttttgagccagtttgctcgcttgcaggctgcgtctgtatcgtgtgaagggaaagtttagaggaactgaccacattccacccatcatttgtcgaaacaaacccacaagtttgtctctttgagaccctcgttgtattccgaaaagaagagagcttattatgttgaaagttagggtcttcatcaatggtaggacctatattaccacagcaagttcatttattgatccatgtactctttgtttaaaaagcaagcatactgagtagtgattcatcttactaacaaaacctttacaacaaacgtatcatgattcatatagctcaagtcttaatcatgtttgtataacaagaacagaaaataataattataacatacagttacttgctgttttccttgccaatgcatctcaaggtgccacctgatttcttcttccaactttcccacacaatctttaagtgactctggcctcaaaaacaacataagtgcgtttctaactcgcttgtgatcatctcccgtcagctctaaaagactccggtcaccaagaaccatctgtatggacttgacttgttggttagtgatgatgctgcaactgctagtgaatatgaacttgtttgcagcaggtccgtggagaaaaactgttggatttccgaagaggcttagttttgaaataggaccatacttttttattcttttctccagccatttttctgctgtgtttgctctcattgctcttagtaaacttaggctttggcctattatgggtagtcctagtgaaccaggaggaagtttttttgctgatctttttctctttataaggattaggaagattgggatgagaagcatgagagttgtgaataaaatactcatgatgtatatgaaagagagagagaaggctttgagagagtgaaatgaaactaggtaggtgtttatagaaaatgtttttgttgttatttggaagggaatatgataatcttagcctgaaaattccttttcagtatctgttggagaaaaaacaaagctatctccttgaaagacataaacgtcataaggaaatagacatggctattttattatgaaaaaaaaaagatctagtattttttgacaaaactataaaaacttcaagtaaattggtattaattgatcacgtctttgttaaatctaatgtaagttggcatttctacagtattgtttaaagtatgtttactgcatttcgatatctctattatatatagtctaaaagatgagctggttttgctttttctaattaaaaaaagaaaacaatgaagtttgtgtaattaatcttactgatgcagattccgcccaattttgtctttggctttattgatcaattggaaatgtcatatgcatgaagcctaagattttgcattgacattatcatttcatgacaaaaaatgaaaacactgcgtacaccttatttaattaaaagatgctttctctttctcaagtgctgtttttggtgatgctgacaattgaagagaacaaatttacacacaaaacctatacattctattgacattattatttcatgacaaacactaaagacaaaacccatataggattcatttaattaaagaagtctctttcttgagtgttttcttttttttggtgatactaacaattgaagagaactaatttgcacacaaaaactataagagattgtttgaattttcagtttttaaaattgtatttttaaaagtgagaaaataatattttaaaaatttaatgatgtttggataatattttgtaaaaactatatttaatttttttttttttacctaagaaaaacctacttcagtattctacaccataccacgacatgaacccaaccccaccttagattggatctggacccgaactgagattcaggacacagactctgttaagaccgcttagctttaatttgtaaattagcagataattagaatttaattatgaaaattatttattaattttgaattattaatttatgatgatttgtttgaattcaaaatgcatttttatgtcacatataaaaatttcataattttgcatgttttgtgcctgacaacattggaatgcggtgtttggctattagaatcacatcctagtatttttagtatagcgggacaataatttagacattgggaatgtcgggaatagtcgggatgttagaatttttcaaattaccccttagtgccattttatgacttttagtgtgggaggggcaaaatggtcattttgccccattagccttttgtcattttgtgagtttgcttaagttatttaatctgatttttttaactaagttagccgatattatcttctaaataaaacaaaaatttatttactcatttattttcaaacttagaaaaaataagagaaagccatttctctctctttcaacttctctctctctctc

SEQ ID NO: 300957 - DNA, 6569 bp, Cannabis indica
ttttttatttatttatataataaggtgtttatagtttttgtagttttcagttaatatataatagatgatacgtaaataccagcaataattataaatgtatggatctctcttatacatcctttcatctattattgattgcataaatttcactctcaaaaattccaactcacactttctccattatgaagattagctgccctgtcgctattaacaactataaagtgcattaaggagaagttaaaaaaaaaaatccaatcattgatatatgtaacttatcaaaagaaaaagaaaattacgtttttccatggatatttggtattttgatttacaaaaaatccatgcacaacttttttttttcatttttccttttgaatatgttgcataatattaacattgataaaagaaaaaaaaaattaaaaatcttggcagcctttgtaattttgtttctttattatataaataaaaagaaagatataatattaaaaaatagaaaagttttaactaagacttgagcttttgagctgacactatcatatttaatggggggcaagtagatcggttgagcaagtgaccagaataactataatccaaaccagagcacaatggtcacagtgtttccagagctgtagtggatcagaagctcagagcttctttctctctttctgaaagcattttcttgattcgagaacccttttcaaatttatttccctccacagagtttttaaaccaaaaaagacaacagagtgagagaaagatggaaactttctcattttccaagctcttagctttgttcttaatggccttgttcatggctcctgagcttatgatctgcactgtaacttacgatagaaaggccattctcatcaatggccaaaggaaaatcctcatttccggctccattcactatccaagaagcaccccagaagtaactttcctctgtctctctttctcctttttcatatcttgattttgcatgcagagtttccttacatgtttttttttcctttctatgaaatgggtttttgtatttagatgtgggaagatcttatacagaaagctaaagatggtggtttagatgtaattgacacatatgtgttttggaatgtccatgaaccttctcctggcaatgtacttcactagatctcttctgtctcttcaatttcagttctcttctctttcattattaattattaaacacggttaccttctaactttaatatatatcggttcaatattttattttagtacaattttgaggggaggtacgatcttgtacggttcataaagacagctcagaaagtagggctgtatgttcatctccgtattggaccttatgtctgtgccgaatggaattttgggtaaatgattatagatatctaaaaaaatttgttgcgtagtattttaccatttcataaatgtgtctatattattctgatttcaccttcattttctctttggtatagaggatttcctgtgtggttgaagtatgtgcctggtatcagcttcagaacagataatggacctttcaaggtaaagccttctcaacctggctcaatcaactttgcaaaattttctacatttattaacattgcacacacagtcaatcaatatggatttgattctaaatatttttctatcacttttggttttgaaggcggcaatgcaaggattcactcagaaaattgttgagatgatgaaaaatgaaaagctatatgaaacacaaggtggtccaattattctttctcaggtatgttcttgttagtttgaatactttctctcttaatactaaggatttgtctgtttacttacttttgttaataattctgtattcaaagattgaaaatgagtatggggtggagagcaagcagcttggagctgctggacgaaactatgttaattgggctgcaaaaatggctgttgggttggatactggagttccatgggtgatgtgcaaagaagatgatgcccctgatcctgtggtgagctcactatattatttattaaactatacagctaatgcttattttcattactcctttattacatcttcattagtttcttattagaaaatgaaagttctaagttttgtgttttcatgggatggctacagataaacgcatgtaatggtttctactgtgattctttcactcccaacaaaccttacaaacctaagctttggactgaggcttggagtggctggtatgtattctgtatatgcctaggaaatatactactttagagtgagtgtttactgagtgaataagaaaagtactcttttgaatatccttcatgttcctaacaaaatgaaataggtattctgagtttggtaaagccaatccccatcgtcctgttgaagatttggcatttgcagttgctcgcttcatacaatcaggtggctcatatattaactactacatggtaggctgccttgtttacctggtttgtgttttaaatcccaaaaaaatgttccagcaaaatttgagtttctacatctgttctttatggcagtatcatggaggaaccaacttcggacgcagtgctggaggtcccttcgttgcaaccagctatgactatgatgctccaatagatgaatatggtaaaattagaacactactcataataagttaataacaccttaaaagaattctgtctcttggatagaattctttaaccttatgttttaagctattttatcagtgtaataaccacttcactgtttccaggtttgattagggaaccaaaatacagccatctcagggagcttcataaggcaataaagctaagtcaacaggccataatatcctcagatgcaactattacaaaattaggaacatatcagcaggtgagattactttattcttcataattttatctcctttgttagatattagatgaagcaaagaaaaagaaaaacagcaagccttattcaaccatggtcttttgccaggctcacatattttcggggtctagaagatgtgcggcttttctttcaaacatccatccaagctcacctgccagagtgatgttcaataacctgcactatgatctgcctccttggtctattagtatcctaccagattgcaaaaacgcagtatataacactgcaagggtgagaaaatttcaaagttctcctcaatgataatagaaagaagatttctccctcttaacttgctgacaaacatgtcatttcctatacaggtgggagctcaaatatcacatatgcaaatgtctcccacaagtactaagttgctctcatgggaatcttatgatgaagatctttcttctttggatgagagctcaacaataacaactgttggcctcctggagcagataaatgtcactagagattctagtgactatttgtggtacataaccaggtgagctgctgataacaatttacataccccccataccttgttaaaaagattgatataactatttctttctattctttttaacttttgtttttttcttttttcttgcagtgtcaacattccctcatcagaatcatttcttcgaggaggacgaaaaccaacccttagtgttcagtcagctggtgatgctgttcatgttttcatcaatgggaaatattcaggtaattttttagaatcatattctctcaaactacacatttatgcatatgtactattgagttttcagtaaacctttagtgattggaaatttaacacaaattctcatattaagtacaggctcagccttcgggactagtgagcggagacaatttacatttactggaccagttgatctccatgctggaactaacaaagtttcacttctcagtgtaactgttggattaccggtaagttaggactcaaaaatcttaagcgtagcagttttatgtacaagttattcaagtcactaattgagaaaattcaatctttttggtttgaagaatattggaatgcactttgagaactggaaaacaggaatacagggtccagttttgttgactggtcttgaccatggaaagaaagatttgacatttcagaaatggtcttaccaggtgagacaacaaaagtcttcatctcttttctattggacttgccatattattttgtcaaggtctcagtctcatggcatgtttttaaacaggttggcctaaaaggagagtcatcaaacttggtctctccagctggatccaaatcagttgactgggtccgagcatcactagcaaccggaagccagcaggccttgagatggcacaaggtaaggaactaagaagagccacagaaagcatagctgcatagaataacataacatttttacctatctataaagccccaacatagtttactaatggagaactttttcaacaatttgaaatgtttggtgcaactgcaggcttattttgatgcacctggaggaaatgagcctttgggcttagacatgcagagcatgggaaagggtcaagtatggatcaatggtcaaagtatcggaagatactggatggcttacgcgaaagatggctgcagctcttgtaattatgctgggacataccggtcctcaaagtgtttaactgattgtggtggaccaacccaaagatggtactgttttctacattgttggattctgatactagcttttttacttgcttgtataaaatacttatgtagaagctgtcccaaattaatattgatggatttttcttaggtatcatgttccaagatcctggctaaagcctagaggaaatctaatggttgtttttgaggagctaggtggggacgcgtccaaaatatctttagtaaaaagatcgctgacaagtatctgcgctgatgcatttgaaaaccatcctaccattgaaaactacagaattgaaagtgaaggtggatcaagcatggatcatgcagctaagattcatctcaagtgtgaaccagggaagacaatatcaagcattaattttgcaagttttggaaccccttttggaagttgtggcaatttccagcaaggaaaatgccattcaccaaactccctttacattatcgaaaaggcaattttctttcccaactaactatgatagtttcagtagctacaaacttaaattcgcgccttatcatcttcatagaaattattgtagtaacattatgtctttgttgttgggtttaacaggcatgcaaaggtcgtggagattgcgctgttgctatttccagtagaaactttggcactgatccttgtccgggcgtgctcaagcgtttaacagtagaagcattttgttctgcgtaagccattgcaagaatatatattcaaagatgacgagaactgaggaggatgatgaaaaacttcccagagtttattcatatactggccttatttgaaaggtcaaatttaattatgagaaataagagggtgatcaaccattatcagatgatcaactgctctgttagcattatgtatctatatatttatatgtatagttaatagtaagcaggcaattcttttgcctcaagcctcaatacggtggcaattttggtcatcatttcttttgttagaaaaaaaagtctaattattttgtaaagaactgatctctacatcaagttcaagtttgaatacaaaagtttttgattgctcaaacttctatcatgtacaatttatatacagaaaacctggatagtgagcaaaattattgatcctggatccaatattatttactaaaaatatgttatctacctggataatcatcaatgatcagttatctgttaacattcttttccagaataaaagaaacaatcaagtacaaaccttagaaacaacagtttcaactgtcgaaatatagatcatgattacattataagaaaaagatacgaaattagtaagtttggttttagcataaacaagatcaggttaaaataggctaaacacgattagaaacgattaaatttcaagttaaacacaagttaatcaattaaatttgagattgacacgtttaacacgaataagtacatattaataaataaattataaatttgttgtagcaagtgtattaatcttttaatcaaacaatgatgggttatacaagttataaaattgacaaatttgaaactatctgtttatttttaaattaaacagataaaaaatattaatgtgttatgtaagattaacataacataaatatgtccctcaacttttaaagcatttgatgtaaaaaaatatattagttacaaagcatttgatgtaactaatatgaacttttaatattctctattttaaagcatttgatgtgagtgctcttggattaactcaattttgatccaatagttataatgactacgataattacgggaccatttcgtagtgggacaaaattcattccctatatataatgttgttagacagtaacagtgagtctaggggtagcaattcgtgttcataggtcgtgttcgtgttgtgtccaaactttggtagggaaatttgacaaaccatgctaaaatattagccatggtgtttagttatgccacccccctaataatttttttaactatactttttttttaacccaaaaataccctctcctcaaaccaaaaaaaaaatctcatatttatctctctctctct

SEQ ID NO: 300958 - DNA, 1878 bp, Cannabis indica
tttcaacaaaggaaagttcagctgaaagtgcaactttccaaacaaggaaaagagcaactacaatccgaatttataaggcaagaaatcgaatatgaatgcatagcaatcttaccataaatggaaaaattattttgtcaactaacttgccaaaaaaggactttacactatatagaaccattttgtatagtatctccctttattaacttaaatatattatcatcaatcaagagagttacaaatcagttactaacttgtaaactcttcataggttatattttggctaaaataaactaaatagtaaatatttaattttccaaacacctaatttatatattttcaaatagtcatttaatttataatacattatttggaaataaataatatggaaaacactagtaattttagatgggcaagcaaagatttataatgtggctagtagtaatggggaaattgcggaccagaactcagatcagcaagttcattcacacatggataaaaattgtgttttgtgtggtgatgagattgaatacatcaaccacttatgtttttgaatgacattacagaaaagtttgtcttaactgattgaagagtgaagctactaatgttaatagattattactctgttggatcactaaattaagcacagccagttttggtatataatctcttagagggtaagaagtgatgtgatgttctttagtcacacatggtatggcaaatcaatcacactgtacagatgatacaaagagagaataaacttactactttttgtgtaatgcctagtaaagtcaagtgtatagatagagattagcttgaatcaatattttgtagtaatatatagatatacaggggtgtaatgagattaaggggattcaaagtgtttggttggatgttttgagcaatacaataattcatattcacccaaaaagataagctttctgatacaattattgcatatgtaattgtaatacactcatttgtatcattgcctggactggaggatcaacactagtataacataacttataatatatatatacaatttaccaaaacaaactgagcaatgctatgtgcatcacaattcaaaagatctttgattgaaaacaaaaccatggaagtcctccttgcaattacaagtactctagtagcacagatttgtgttagtcaatttcttgcaaaaatcatacaaaagaaaaatatttctagcaaaaaaagaaaaaggaatttgttaatgggaagccaaaggtggcaagtttctaaagtaagtatttcatctatctgtgttatgtaagaacttgtagtatactctatttcatgtgaagtaagccatgtaaccatttctcgcagtgtactctccatcgaaattctttcaatataagactggcatcctcctcattgaaaattctatcaatgaactccattgcctattctcctcatggacaacgatcaatcacccttaagccttgagaaaaaaggaattgggatcttagtagccatttttgtactccaaaatattaacattcttcccccaaccaattctccaataattgatagtcattatccaccaactgctcccaaggaagaatacttacataataagtttaccttacatcaaaatataaatttaagtgtttgattaatttacaacattaattaaaacaaatgaagatcccacatttaaaatataattgaaggaaaatcaaataagactatataaaggaaacaaatacttaaaaaaattcccttctaaaaaatataaattgaaaattgaatatgaattgccaataatataaagaagaaaaaatattatatatatatatatctttatatattaaaagtgcatatctaacggcatttcttggtttaacattcttggtt

SEQ ID NO: 300959 - DNA, 1110 bp, Cannabis indica
tactggctctctcaatgccatcgtttccaggaggaaaatgtttgttggaaggaactttggaagttagagctacatcctcaccactctctgttgctttggaaggctatggggggatgtccggctctcaaaactaagctcaccttccttaatcaccaagacagattgtgctacttgtgtaacaatgagttggaaaagggtatccatctcttctgggactgcatttttgctcgcaatctttggtttcaatgtccctgggctttgcttagtggaaaccaacatttcgactcgtttgaaagtctctttttatggctcagcaacttcggggatccaaaacttctgagctatgctgcgtgtgtggttgaagggatttggcagtgtaggaatgagttcatctttcaaaacattgctctagactctattgtaatttctcgcagtgtccacagacggtttgaggagttctatttgggtgtggctggcacccagcactgtgaacttcttgatgttggttgtgaccagggacagtttgtggcttgctttatggttgatgcttctgtggtagattgttctgctggtcttggtattattcaggtggatgaatgtgaatacggctatctcttgccaagcggtgtgttctgttaacagcgtgctagaagcagagttggcggctattcatcttgttttggtggtggctcttgaggagcggtactctttggtggtaattgtttttgactcagctaccgttgttgcaggcactgaatatcaaagagctgcctcttgtgggggctcctatcttattttttgcaaatgtgtatctcttttgaattccttttcccatattatgtttaattttactcctcgtgagaaaaattatgttgctaataggcttgcctatttggctagagtgaacaatgtgtgcaaaaaatctgttggtagggaggcagttccccttgtgactgctctttaaggttttttggtttaaataaacttcttaattatcaaaaaaaaaaaaaaccaaccactagtgtctagcaatcttctcggtgtcatattacaatattggtgtaattaagtatcggatctcatataacttacagaaaatagcttttaggg

SEQ ID NO: 300960 - DNA, 1622 bp, Cannabis indica
tttttttttgaaattgaaatatattggtaggtatactatatgaagagttggtatgacttttgatataaatgattgagaagaagaacacttccacacgtggctgaaagtcttttgcaatgaactaataaaagtcatacatattatcttctcttgcatgtgtttttcttttctttcttaaatgaattatttttctctttgttgaatatataccatgtagttgtagtactagtactatgttatatatacatgtaattaatagtaataataataatattgcaaaacacgtctctcatcctaatcaacatctacaatatgtatagacgtgttttaataaaggagtactactactatactatataaatttaataaaattctagtatcaatcttgttcctttcattagaacaaaacagagaaaaaaaaaccaaaatatatgagagtgtaaattacctatgcaaattgtcatgatcaatgaacaatttggttacaaaaacacacaaactatccaatatatatttgaatagtatatattaaatcaaataattaatggtcacaagaagattagagttagagacatgcatgcatgtttatgtcatgatctcatcattgtacatgtctcatatgatcatttgttgtgaagtgatttaacaatttgactttttaagtgacatcatttcatttttagtaattaacaattgctaacttttatagattttggtggaatagttatgattatgaaaaaaaatgctaaaagatagagcattcttattaggcatcagtagtgcatagcaccttctcgatatgtcgcgttgcgattggctagcaatactctttaaaaactattatattaaattatatgggacccgatacttagttggaccaataacgatattgacacataggagggtgttagggaccactggtaccctttagcatttctctaaaagatattagtgatgtttaaatatcaaattattattagtgtaattaaatatcaaattttatatagagagctatttttaaaaagtggtgagcattattaatacccaataccgatactcttatgagaatagcgtttatatatatgtatatagaaaagaactatattggtataatcttaggtatacatggtcgtcattggaactttaattagtgtaattaattaattaactataatgtgtcctcttctaactcattggttaacccacatatgtatataattaagactatttttttaattttttatgaataagactaaagttaagggctcacacaacacaagctcccacatcgttctgtatatagaaatatacatataaatttaaaaaaagaaattgatgcaataacatcaaagataatgactaatataaaagttaaaataggtgaagagaaattactagtgacaagcaaaaccagttaaggattttgatgatttcaatgagattgtattgtacatcatgcctttttgttctctcaaaagattacttaacagagagttacttagagaagagataaaaggacatgacttttcaatatatatctttatatattaaaagtgcctatctaacggcaattcttggtttaacagaatattcttaaaaataaaaagaatattctgttaaat

SEQ ID NO: 300961 - DNA, 6731 bp, Cannabis indica
ttggattttgaggtctaattggattggatcggataatgattttccaaatccaattactaattagattggatcgaatgaggaaaaaaagattgaattgaatcggatgacaacccctaatccattatattaccttactaagataataataattatgattatcataaacaaatataatattataataatatacaagtgtacgtaaacacacctataaatacatatgtataattatataataatttattgtctatgaaattaaatctgttttaattataaaaacattggcggaaagccgcaggcaggctctgaaactgagtcactcaaccgtggcagtgttggtggaagagagaagagaagagaagagaacccctttaagattctcactttctttctccttagatcttcttcttcatacccatcttcttctttttccataacaatccttcttttctcatcttcaatggctattgaagaaccagaaccagcagaaccagaacaagctgagagctgtggtagcagaccactcttctcttcttctcaccctcaaagacagaagcttgacatgtataacgatgtccttcgtcgaattcaagagatcaatcctgttcttgcttctgttcctgactttgatgaagacctctggcttcatttcaatcgtttaccagctcggtttggttctttgtttttgtttttatttcatttggggtttagaaagttttgatgtttttgatttattgattgattaatttttgtttagatatgctttggatgtgaatgtggaaagggctgaagatgttcttactcataagagattgcttaaattagcagaagagtctcttattcaacctgcttttgatgttcgaattgttcaggtaattagctactttttgattatgatttgatgtagtttttgttaagatttattgttacatctcaaaaccaattttactcttactctttttgagctaattctatatgttgtttttcttccccaattgaaatgaatggactaatttattatcattcattacgttcatatctatatgcacttaattaggtaccttttgactatgttttgattgtttttgttaagattcattgttacatctcaaaacaaattcactcttatttttgacccttaaaatgggattattcatttgagttaaaatgggttccaactcaaagtaattgacaattttttgaagtaacttataagtatataatggttttatgtaatctattgttttggtttgatttaggtctatcaaccattgaatgggaattctgtggattctgttcattcagatgcttcacttaaggaagatgcacaaagttcttatcatcctgtcaaacaagggtatggcttgattatgtataactgttgttgatactactttgctctctccattgtatatttacaatgtttctgctagtcattcaactatgtattcaccaggattcatttgccacctacctttggttcgtcgcctaatcttgaaacgcttgcaattcacaccgatgacccacatgctgttgaagatggagatacttccatgaatgaaaggactgtctttcataggtatatactgtaaaaactcagtagtatttgtatctttccaagttggtttctattcaaaagcccaaaaatcaaaacaaaaatccaagttggtttctattcaattatgacctatttgcaatttactatagttaaggataaggttgttagagtgtcccacatagaatgtgtgttgtcacattcaaccgtttataaaaaccataggttactccactcatcattatttttctgatattactttttaattgggttaagattagtaacagatttggtttagcttctactgttgtttactagcttgttaaatctgtttctaccaatctttgtagcccattgcatgagatcactttctcaacggttgacaagcctaaactccttagtgaggtaattaacttaacttgcataacacaagtgtataaattcttgattctctccactttttttttgtcatttgttttcaataaaattttcagttaactgcattacttgctgaaatcggacttaacattcaagaagctcacgccttttcgacttgtgatggttactctctagatgtttttgttgttgaaggttggcctcatgaggtatgaattttgctttattactgaatcataatattgcttagcattttctgaaacaacataagatgatgcatgaatgttcgaaaacatcttaggaaaccgaggagctaagagctgcattggcaaagggaatatcaaaatacaaggtaacttttcatattgttgtcattttagtattatactatttcatgtgttcatcatcaataatatttctttgatgttctttaggatcaatcctcgccaaaacaccaaccggtttcttctattagggaacataaacaagttaaaatcgaaccaggtcttacctctgtagacattccaactgatgagacagatgtctgggaaatcgataccaagttgcttaaagttgaggacaaagttggttcgggttcatatggtgatctgtaagtagtagtactatgatcatgttcattgtcttgatggttacatacagtcccttatctgatccttttttcttgttgagctttcttaggtacagaggcacatattgtagtcaagaagttgctgttaaaatcctcaaactcgagcgtataaacgcagagatgctgcgagattttacacaggaagtttatataatgaggtttgtgcacatcttttgaaccagaaaaccaataaaacatagtgataatcagctttcgtttctgacaattgctcctttggatttgatctttggtaggaaaattcggcacaagaatgttgtgcaatttataggagcatgtacacgacatccgaacttgtgcattgtgactggtaaatcattgtctttttttttttttatcatggttataagaaatttccaatctaataatgacagtttttgtgctttgttatcagagttcatgtccaaaggaagcttgtatgattttttgcataagcaaaaagctgaatttaagcttccttttctactcaaagtagcaatggatatctctaaaggaatgaactatttgcaccagaataacattatccacagagatctcaagacagctaatcttctaatggatgaaaatgaagtaagccaatcaaacgaattttctttcaatttttaagttataaatcagtggttacaatccttaatatgatctctcaattctccatatgtatctcaatttagaacacaatgtctttgctattagctcaagtggttagacgtgtggtttgttcttgagtccttccgaaatacacacatagcaattgttatagtttcttgcttagtgtttgtgtgtgaatataatgtattctcataattcaggtggttaaggtagctgatttcggggttgctagagtacaagctcaatctggagtaatgacagctgaaaccggaacatatcgctggatggctcctgaggtaaatgcctcctttcaactgatatcataatgtggcaacagaactcgctcttaacgattttcctcattggtttttgtgatgaaggtcatcgaacacaaaccgtacgatcacaaggcagacattttcagctttggaatagtaatgtgggagcttttaacaggggaagtaagtacttcaacacaatgccgccgatgcattgacatgtttggttgtgcaattaaggactcatgataacttgtatgttttattaacagattccatattcttcattgactccattacaagcagcagtaggagtggtgcaaaaggtctgtgcattgtttagtattagtttttctttttgataaagaataaggggacgagggggctacaagtgtggctccaaccccgcctaatgaatgttcgccaagaccctacttgacgggtctaaagggatcctaagttagaggtaaaaggtggcaaggttggcactgtgatttgaacccttgaccttcaagtttcaggcatatgccactttacaattaggccacttggttggtcgtattgtttagtattagttagttaagttagttattttctgttatatggtagttagtttcattagtaactaactaactaactctctttacatttgtcatggttgtgttgtgctgtgttgttagggtctccgaccaacaataccaaaaaacactcatcctaggcttgttgaattgcttgagggatgttggcagcaagatccaaccgaaaggcctaacttctccgaaatcatagagatccttaggcaaatatcaaaggaggtatggtattatgctaatctcatttaatttctagtttttgtcccatgaatcagttctaattggtggctttgattctgaaacaggtgaatggaaaagaaagatcaagtgggggaattttttcatccctgaaatggaaccatcatcactaatatcaaagaagagacatttgggggtgtagaaaatctgatcctgtgcacatactgatcatctttttttttaacatagcaaccaaccaaccaaccaatcaatcctattgttctttcttagtaaatctttctctttgtgaatggatttgaacagctttagtttattttagattcctttcttactctgctgtcatacttgtctgtcttcaatgtttacaaagtatatatatcttatgaatatgatgatggaattagtcagcaaattgagccatctgtttcttactttcttaaagtattgctcattttgaagatgtaagaaatgataatgtgtaaaaactcaacattatatatataagaacatgagctattcagactcagataattgttacatgcagcttttggaatcactaaaaaagatgtctttgcaaggttaaccgattattgttgctgatgctgctatccccggcaaagagctggcgtgctcgaacactgacctgcagccttgtcattgcattcatacaatgcatagctatgcgcgcctgtttccttacttgccctcctcgaactatggcttgaagcttgacaagactcctcagggcccgaaatgctcgtcttgcctgacaaagtattgagaagttaaccacacaacaacaacaacacgagtcatgagatattataacaaaagaagctaagttacgtacgagatggcctcggaattgtgcttggatttcgattgcagccaaatcttgttttgttaaaggcggcgggggaagtgtttgttgtgtggttattgaagctgcaacatctgagattagctgagtggtttcttcttcatgggatgatatgtgagagtaaacaacaatgatgttccttgaagattttgaagaccctttaacaaaatttcttctgattcttttgaaccaattgctacttctagccataatattctcttagtgtgattgagtttttgtattcagaaggtattaaaggaagaaatgaggaattggcttagaagaaatgtggaagccatgtctgtttttttcggttaagagtttatatataaaaacatatatatgtatatacatagtggtatgtcagatactataacgtgatggcatgatgtgatgtgttacttagtataaaatttggaaaaaataagaaaagggtatttgagtttggtagaaatgaaataaaatatttcaattattttagagttatttggtacataaccaaattaaatatatccattatttaattatagtaataatatattatggtttgagtaaatagcgcaactcaaagttttaaatttttaagtggcacaaatttatatgtatttttagcggtataaatatttaatatttgtaaaattataattttcctttagtttcgtcaatacagattttgttttgaatttattaaaaggacatttcttaagaactaatactacatgtttttatctagattcaatgatttagaatctgggctttatgcgtgctctgtttaagacaataacgagatctacattaatgaatttgaagaaaattataattttataaacatttagtacttataccgctaaaaataaatattaaatttatattatttacaaacttaaaattttgagtatgttatttttttttatattttatataaactacaagaacaattcaagaacttttacaaatggtaatgcttttaaacaataagctttttggctctaattaaattaaaaaaagaaaaagaaaagtaaaagggtagaattaaacaatttccaacaacaagaacaaatcaactatatgataaaaatccaatatatatataccaacagtgttacagtagtactcatccaaattagacagttgttctttctttaattaaacaaactaatcacaataattaaaaaaatgagaagagctagcagctggattggaatgaaagactaacatttttaatgtaaaattttaaaaattggccttttattttagaaataaaataaaattcaaataaatttttaaatcgttttagcaatagatttttttttatggaagattttgcggcctaatgttaaaagaaaaaaaaatagggaagatctcttgggctgagggccaggggctataggcaatagccacaaccaccctatcaaaccctgattgtatgttgtacttttagtggtgtaattgtttctatttcctgagttctaattgcacatttttctttgagctaactcaaacccggtgggtcgaggggcacaacataatacag

SEQ ID NO: 300962 - DNA, 1006 bp, Cannabis indica
atttttcatgtaataattttaaaaaaattatatatctaaatttaaataagaataagagtgattaaaataaattaaataatgataatcattgttatcttagtgattatttcgattatataatattcttaaggctgtaagaatcttcaggcttataaaaataaatgcaaaactttaataagttccgaccaagtgttatatccgaaaaagaaaaagaaaaagaaaagcatcgatcaaaccaaaagagaataaaaggaacaaatggttttctaacaaaaaaaagataaagaaaaaggaacaaatggttttaaattatgggaaatttttattatttaattaattaatttaataatcaacttcgtcttcaaagtaagattgtgttaaagttggggtttggtacttttattttccccaaggcgtaatcatttgaaatatatatgaaccaatcaattaactttaatttaaaacagaaaatctaaaccaaataatgcgattacaatatctcaaacaaacccgagaaatctcaacatgacaatccttaaaaaaataaactcaatctgacaagaagcaaaaaaatgacaataatttccattacttaataaaagtagttagacattacaaaataaatttttaactaggaagtaaatatccacttagccatattataggcaacaaagttacggtctctactaatgttaatgaaaatacaactcacaaaagcaggagaggatctagtacaaaaagagacataattctcaagcacccaatgagactccttcttattaagagcgttgataacaaccctcgaataactctcaataataataaacttagagccaaggtccttcgcaatatccaaagccttgcagcaagtcgccgcttccccacacaacgcatcatagaactccaatctagttgtttgaacccaaatcaccctgccaagatgatcctttgcaactactgcaatatacatgctatccaaccccactctaacatcacaattcagctt

SEQ ID NO: 300963 - DNA, 1959 bp, Cannabis indica
ccttaaaaaaaaaaaaagatgtgttgtatcttctggtaaaatccatggctttcatttggataaaaaagaaaagatgagagaagaatcacacacatttgtgtagtgtgttgctttggtgtttttgcctttattctcatcttttttcattttttctgaatatctcctctgctctctctttcaaaacccacatgtttttcatgtccactgcttttgcttgtcttctctgttttgagaaagcttctttaaataagggttaaatcccaaagttttcatctttaagcctttttcccttttctcttctcattcccattatcaaatttccttatctgtttgtttagagaaataatgggttgttgtcagagcaagaagagaactccaaaaccaggtgctactactacagccgactcctatggatcagcacctggctctgttgctaccgccgctcatcaaacttatcaacatcatcaccaacaacaaccccatcaaaccccacccattgttcaaacccagaaagtttcagcagcccctcaaactcatttgccaccagtacccaaaccacagcaagaagtagaaccagtgccacaacccaagcgaactcctcctccgccgccgcctcagcagaagcagcccagtccggtttcttccgacccaattcccccaaatgctattctggatagaccctttgaagatatcaagcagtactacactctgggtaaagaactgggtagaggtcagtttgggattacttacttgtgtgttgagaattcaactggtgacacttacgcctgtaaatctatactgaagaggaagcttgttcataagagtgatagagatgatgtcaagagagagattcagatcatgcagcatttatctgggcagccaaacattgtggaaatcaagggagcttatgaggataggtactcagtccaccttgtgatggagctttgtgctggtttggaactctttgatcggattattgctcagggcaaatattcagaaagggatgcctcagaacttttcagggccattgccaatgttgtccatatttgccattttatgggagtcatccatcgagatctcaagcctgagaatttcttattttctagcaaagataaaggggcaatgctgaaggctgctgattttggactgtctgtttacacagaggaaggttagttgttttagtcctaattagaattgggggaactaatttgagttatttaatcacaattggggttggtccctgcattgaccatgttcctgttatttctctgtccagtttttagtacttaataacatcattgtgttttctttgttttaagttataaccatgtaaagaacattacatgtttatcataatggtgttactggttcaggttttaagcatcattaggacttgctatcattgccaacttttgtgcctttgtaatgtaaataattacagcccattttgtcttttgaagagcttgtctgtgaattgtatcatgtgcattgttttattttgtcatcatggcttgttgacactttaggaaatttaggtaaaaacgtgaggaagattgttgtatcttgtattgtaggtctgcaccctgcttttatcctaatttagacaagtttgggaacatgtcaatgctggattgttggttatatgtagtgtaatcatgaaatatgatattttctctaatatttatgtcatcttaagcaagagacctttctatgtttcaccaatgttttgtgataatcttctcaggaaaggtgtaccgcgatttagtcgggagtgcttactatgttgctcctgaagtattgcgacgtcattatggaaaagaaatagatgtttggagtgcaggagtcattctgtacattttactttgtggtgttcctccattttgggcaggtaaatactaaatacaacttcaactcttcaatcaatgttctctcttgtcttttcttgttgttgttgttgtt

SEQ ID NO: 300964 - DNA, 2699 bp, Cannabis indica
gaagatggaggccttcatttttttttttttggtatttacaatataaaagaaaaaaaattggtcaagacactataaaagtaattttttccgtgtggcaatatttttataaagattagtccaaaagtcagtatttttgtaagtttttcaaaatttagggcattacccttttataggatatcttttaatgcagttgggctatagacttttacaattatttatatttttatgattatgattaaaatatgtcacatttgtaatatattttatcattctcatatttttagttttgcttctttgctctatttctttattttcctgatttggtttccaaaagaagcatggcaaagacgactcaaactttgtcagctactccaacaagaacctcattgttaaggcaactaacagttagttagttagttagttagttagtttattgtaacagttgttggttagtttattgttgttttttttttttatatttggaggttagtttattgttgttgttagtcaattagttggtattgctctcatgatgtatatatactgtgtactcaatttcattcaatgagatctttctttcttctccatttctttccctttgtttctttctcaactctttcttcttcttccttgtttcctattttgttctttgtcaatggctcgtaacttcaagatggtattagagcattttcctccattcaatgctaacatggctactattggtactgcaagaatctccaaaaatggttcaaccttcaataacactcaagctactcagaccagagctcaactctctcaagaaccaatgtatttcaatcagagcatctcgattcgcctcagtgttcacaacttcttattgtggaaacagtaagtccttcctgccattagagggaatcgactcgtgaggtacatcaaagaaccaccactagctaaattttcgactgatgaagatcaaactcaaaatagagtcaactaagctttcatcgactgggaagttcaagatcaccttctatctcatggttactgtcatctatgatagaaagtcttctcacaagaatggtgggatgcaactctacacaatagatctggacaactttggaaaagcacatcatcaccttacaagtttcttttaagattctagaattttgcacgaagcttcagaatctcaagaaaggaattccgagcctcaatgattacctgctaaaattaaagcagaatttcgatcttcttgcatctgtgggagaaaccttaagtaactgtgatcatgttgctgcaatcttcaagggtcttccaagcgagtatgacacctttgtgatctcatctaatactcgagttgagcaatactctgtaggagaaatcaaggctctacttttggcttctaaatccagaatagaaaaattaggtaaggaggtggatctgactgctaatatggttactgatgatcaagattccatgattgaacctaatcttgcttagagaaaatttaagcaacaacagtttggacatggaaatttccaatccaaccatggagcttgtcagcttggcaatcaatttggcaatagaagcttcaatcgtggaaatgactatggtttcacacctggactaaactctggtggtagaggtaacttttaccctaatcgaggtggtaggtcagggatgaacatgaataagaaagtgcaatgtcaattgtgtttacattttggtcacacaacacacgattgcttttattgttttgataagtccttctcaggctctcaagcatgaagaagcaccaacagtggtggatctcagcaatcaccgcaaccacatgctaatcttgctaataatagtagctcagaagataccaatcattgcactcctcaagctcagaatcttgctaattgctatgactatgatggtcaggatcaaatgtatgtgggagatggtacatgtttgtcaataaagcatattggtcaatctttctttattcctcggcatgcatctcactcccttgtcctaaataatttactccatgtgcctgaaattaaaaaaaccttatcaatttgctaaatttgccaaagataacaatgtttattttgaatttcatgatgatttgtgttatgttaaggaggaagtgagtcatactactttgctgatagagatgcacaagaatggcctatatacttttgatccatcacaaattggcactgtttaatcgagccatgaccccattatgagcaacaaatgctcacagcttaaccagcttcaaaccagcaggagtgccaacaataaatccaagcctaagtgtacttatgttgctactctaaataatacctttgtgtgtcaaaatgttttaaatgtaatacaaatgttcaaaatagttccactttttggcataataggctaggtcatctatctgagctctgtttgaaattggtagtttctgatttatgggggccatcacacacatcatcctttaatggatacaaatattacatccactttgtggatgtttattcaagattcacttggttgtatctgttaaacaataagtctgatgctctcaaaaccttttagcatttcaaagctgaggctgaattgcaacttcaaaaatctattaaaactttgcaaacagattgaaggagtgaatataggtcctttaccaacttcttacctgacaatgggattcaccatagacatccttgtcccacaactcacca

SEQ ID NO: 300965 - DNA, 1687 bp, Cannabis indica
tccaatacatactggatctaaaatattggatggatccaatccgatccaaaaaatattaggtttaaaatattggataaacccaaattaaataaataaatatatatgaaatacatccaatggatagaaccgatccaatccaacatccaatggatgttggatcgattggatgatgaaattaattggatcggatcggatggtaaaatctaacatccaatatatgattggatcggatctggataggcctaaaaatattggatgtgatccaatgaacacccctagttattaaatagtgaatcagaatgacttacgtgatgatctccaataacaagatgcaccatattaatagatgacattgtaagaagaattaaattaataggatcctcccaaaaaattgatgatatatatagctaaataaggcagagttagttcaattttctgatgaacataaagattaattattttcttgctctgcctatctgcatgcctgtgaaaacatgtatgctcatttatatgtgtgtatatatatatatatgtatttatatataaggcaagtgattttagataatataaaatacaaagtaagctttacttgaactttaagatgacgaattttttcatttactcatgtggctttttctttgtgttaattattattgaagagacatgcaataggtatcaccacatttatgaaagttagactacctatatatataaaattacttaacaactaatttaagaaaaagctatgagaaaatttgagagtgaaatgttctttcctctttgattattgccgtaggctaaatttggataatatgggcctgtatcaatggttatattgtttgtattacatattaaagattgtccaatcattttggtaaacgtacatttatggtccctacccaacatatatattgtgatccatacatatatttgtatatatgagagcctagactgataattggtctattattgggggttacacttacatttgtcttcaagagtcctcaacgggttgaaaattaaaagagagaaatttgagtattgatgaaattaattaatttgaactgcgtacatataaatatatatactagtatattacattatataagtataaaattatctaaagagacgtagacaatgtttggtaacaaagatggagacactacaacaaaaaaaggccatgttgcatcagttcatagatttgttggagcgttagcattggttctcaactggcggaattgagtagatgcatgcctcggctgagggccaatgcagctaaagcaaacaatgtaaagtcgaaccttttacaccatttgtgtgtgatttgtaagaagagatactggataagctatagggaaagtcaaatgtgatgattcagttgagactgtatatgtatgagactacacagttgaagaggcttaaatggattaatgagtactacctatattaacaagatgtatcttattttctagtaacccatcacttaagaactctaaagttaagtgtacgtgcttgacttagagtaattttgggataggtgatctcttggaaaatttttccaagaaacatttgagtgaggacaaaacacgctagaaatactcgtgtttttctagcataataataaataactgacgccatagggttagaaatttttagaaggaaattttacgccacttatggcgtcggt

SEQ ID NO: 300966 - DNA, 4400 bp, Cannabis indica
ttggatcgtgcggattggattggatcggatactttgtgaacacccctatgtacatgttcatcgcgtcactttataatccttttgtttgatgtataattaaaaagaaaaagagaaatgctaaaggataccagtggtgtttagcaccttcctatgtgtcaataccgctattggtccaactaagtatcgggtctcatataatttaatataatagtttttagagaatatcgctagccaatcgcaacgcgacatgtcgagaaggtgctaggcaccactggtgcctaatagcaatgctcaaaaaaaaaattataaacaaaaaccccaataattgttaactcttaaaattgagagagaaaaactatttattctttttttaaaaaaaaatcaacaactattataaatcacaaatcgcttacaataaccgagaaaataagaagaatttctcctattcaagaagtatctctatctaactctagcatatgtttagccaactcataagcagtttggttagcatttctcatgacatataataatactagagaagaggataacaatgaacatctataatcaaatctaagaaacaagataattcgtgagatgtagtgttcaaggttgatgagactctttgtccatcagttttaacttaagtgattggtaaatttagttgggtagtctagttgaggccatgaaagagggtcttagcttctatttcgtctaatctaaaacatcattggactggtttagaaaaaacagcaatcacccgattcgtgattatgaaaaattgcaccaactcccaaaaactttcgtgaccatgttaacgacagcatcaacattaagcttaaagccatggagatcaagtggtttccacgggagaccatctttcgtccaagaactggagattgaatttgagatttgtgtagcttgaggttgagagagatttttggctttgtgattattatccaaatagttgatcacaaaatagccaaatatgacccatcctcgacctgaatttccatggagtactttgtttcgctcagtccaaattacccaaatgatgcaaattatttgttccatctctttctgagtgtgaacagtggagagataaaataaataatcattgtttaccatttgtcgagctttcccaaaatcatgatgaaaatgaaaatgtttctacactaacttggcatatccacatctgaacaaagcgtgcccaatcgatacccaagcatgggcacatttggagcaagcagtcgaatcaagaattttcttcttatgtaagtttgtagccactagaagggctccttggatggctttccacacaaatattttttttagaaggtaattttagattctagaaaaatttccttcaattgctatacaaatttgaggtcacttcttgatataattcttctaaggtagtggctgaatggaacaccaacttcactgtgtagatgccaatagtggtgacattccatataagttggtcaagggttgggaagaaactcaaagggataggaaagatacaatccacatcaattggtttaaaataattatttaaaagtgtgatattctattccttattatcagtaataaggtgcctcactgtaagtgatggaggtcttatagaggttgaaattcactatggcccgggatccatggatctttaccaatgttaattcggtagttgttcccaactttgaattagagacctttgagtagaagttctcgtccccaacaaatgcactgccatgtaagtgaaggagagtggccaacacatgcttctaaaaaagtattattagagaagtacctattctttaataatcagcttagtaatgaatcacgggcttcaaagattctccaagcttgtttggttaataaagcttggtgaaaatgcataaaagaacggaagcccataccctctttaaattttgattttcataaaagttttcagttcttctaatgtattttagaaccattttggtttgatccccaccaacaatttatcatcatcgcctctagttggttgcactagtattttggaaacccaaaacaactcattgcatatgtaagaatcaattgtaccaacaaattaaaaaaaaaaaaaaaaaaaaaaaaaaacttctttacctccaattgaggaaaaaaattcgttccaagcattaagcaattgctaaatacgatcttcgatattgatgaaaagttctttttgtccctgctaaaatatgaaggaagaccaagatattgttcatggcactcacttatcggcatactgtctggtaaaaaaattctagacagtcggcatcatatttggagagaaggacatgactgatttctgagtgttaagaaattgacatgaagctttgtggtagatatcaagaaccctctaaatagcaagtactgattattggttacatggcaaaagataaggctatcatttgtaaaaagagggtgtgactgtactgatggtgcatggcaagtgaggcacaatccttcaagattgctaattacttcctcgtgttgcaatagcctaaagaggccttctgaacaaattagaaataagtatggcgataataaattaccttgacgtagtcctcgctttggtgtaacatccctaattacctcacaattaagggagaaagagaaaatggtagatgataagtactttaaaattaagtcaatccatcgagcatcaaaatccatttttccattacagctgcaatgtatacccacttcactctatcaaaagcttaatttatatcaagttttagagcagaaaaaccttttttccttgtgtcttgtgtttggaaagatgaaccaattcaaaagcaatgaggatgttgtccataatgagtctatttgtgaggaaatcgctttgggtttctgagatgactaaaggaagaacttctttgaatcgaatgacctacattttggagattagtttgtaaatgacattacacaaactaattggtctaaattaatcacccattaaacttgggtttttaacttttggaataagagtgattataaacctgttaagcctttccatgtcgtgaccatcattaaggactcccaaaaccacctgtgtaattgaagaaccgacaatctcccaataattttgatataacatagccaacttaccattacctcctaggcttttgtctggactcattgactgtagatcaaaataaaattcgacacttgtaaatggttgtgggtcaaattcatttcaacagttatcgttgttgggattgtagaaatggtatgagatagagctgaaatagttataggagatgcagtaaacatatcttcaaaataagttgaaatgatagcagtcataccatcctttgagctttcaagaacacccgcgacattaatcaaggatttgatcgtgttatttgctttgtgagacgaattatgggcatgaaaaaacttttttttttggtcaccacattgaagccaattaactattgatttttgtttctaatacgtttcttcttgttcaagaaaatcatctggaatactctcagaatatataagttatgtcataagatcatgtgatcaggtaaggtcattgttaagtgcaaccacctttttttgcatttatgcaatgtttcacttcatatttccatgcttttcggtatgccaacattgtagagattcagtacaaatttgaagattcaagataaagtgatgcacaacctaatctgaacctgggcctttccaattttgcttgattaataaagcagtaaattccgcattatttaaccaatttttttttaatcttaagcgtgttttcttttcatttggctctgtagctgaataaattagtacaacttgaacactaatggcacgatgatctgaatgatgttaatctaaatgttgtgtgaccatagactcgaactgagaattccatttgtcatttacaaaataccattcaagcttctctttgattgtctccgtatgatgtttgcttttaatcaaagtgtatggatgttcttcaaaagacaactttgaaagtgagttaagggtgcttcgaaaattatccattgcacttcatttcttagagctctacctattttattttgattagaaaggattttataaaaatcaccgatgagcatctatagaattaatggagccacatcacgtaatccttttaaagcaaaactatttattcttatgtttatgtatttatatgagtagtgtttatattatgtatgtgtgccaaaaaatattgtagttttgtgtaatatacagccattgacgaaaaatttaaaattatatacatatatctattttatataaaatgtggctatataaaagaattcttagtttatgaaaaattattgggtgacttttttttaaataaaaaaaaataataaattattagatgttgacacgta

SEQ ID NO: 300967 - DNA, 2746 bp, Cannabis indica
ttacctcgagattttcttataaaaaatattaactaagttgccattatcgatcataatccattttattcttttatttacgagctaaacgattatcacaatgggatcaatatgtgagaattgaacatgggatgaatcttgttcgataaatagtataggtggctcctcgagttttgcacgcttaagcaattatacaggcacaaaagttgagttttgattcctcacttgattaatgcaacattttgtgcattgttgctagttcctgcgagatggagccttccaaaaattaacaaaatgtctttgccatcgacaagtggtggctggaaattttaattttgattctggttgttgacttgattttgatcacccccccagttcctcatgtattgttgaaaatatcctcgggaaatgaggctctcaatctgaaattctatttttattgttactaagtgaaattatcaaataatttaaatacggaattgtagtaaaattatatgaacataatttatctctggtctttcagacacaaaatctgactgaagaaaaatatactgcagaaagtaaaattgcagaaaattaaatgacacacaacatacatggtctccacactagttgagatattattaacttataaactcagttaattggctttaactaaccaattagaattctaaattagactatgtctcatttatgaatatttactaatctagggcttagtcgagaagttagggtttatttgttaattaagatactttataaggtctaattaataaataagttaaatagaaattttatttgataattaattataatattaaatagatagatttgatattcacaagattagaattaaaatatggcatttgtggaagaaaatataagttgttaaataaatggcaaaattgaaacctgtagggtccacatatagggccggccacttaagggtttgagttagctattattttatcttttttgatttcgtataatttaaattctaatcctagaaggtatcctataaatagataatggtagtctcttattttcataaactgataactcaaaaatttattttgtgagagaaaataagagaggcacctattaaattcaaacgtccttctcttctctcctctaaaattcaaaccctgtagtgagttgagtgcttgcccacacaattcaagtcaatacttaaatgtagtgtggaagattgggaagaattctatcatctaaggagatccaagtttagatcttggtaaatactttgcgacagaaaggaacaagggttagagaactgaatgaaatgagtcattatattctgctgctaccaatgtacggttttctacaactttatatgtgtttatttcattattttaggaaacttatatttagaatgttggattgtagatcataatcaaacatacatgttagtaaatctagatcctggtaaaacatgttccaacaaaatcttcatagtctacgagtccattagtattaaggatttataagtttgtatacataatacaatgatactattctttaggaataaataatagcaatattatctatttttctaaagattggtcgtcccctgttccctagattgcgtctctatttaagatgtctataatgatagttattctctatggatataatcattcgtaacagctcataaaatatggacattctctacatttcatctttgttcacgtgagataattataaataactacctaatgactctttgtatttatctataggcgattaagctgactgtgctcacttattctccccatctgggtgatgtctttcttaaatatctttgtagaaaaagtattatgtgttgagttacgatgcatctcacaaccttctttagttgttgattgaggtataggcaagatggctattataatgtgtcatgaggtaggtgaataaatgttgaaattgtacttgaacatgtgagtatgtggattaatgagctgcaaactcatattcacgagtatgtggatcaatgagctgtaaactcatactcacgagtatgtggatcaataagctggaagctcattatctattcgttctgaatagttttgttgtatattttgtttatcccaatatggacctatttatctcggtagtctcattggccaatagttattaatcatgtctcgatattgtttataaggcagcgagttcaaatatttctattaattgtatttctcaaggggagttatttaagtgcatttaataatgcataaatttagggctgtttcatattctagcttacatgtgtcagctttctattgttgctcaaaatatagtacaacacttattttttttatgttttttgaattttcacttattaattttataagtaaaatttgaattaagtcatatttattaaaattaaacaaaaccaacttgtacctacttttttcaacaaatggcgaaaaaatttattagttaatggaaattcaattttatattttcaatttgtacttattgttttgagtccttccagtaggcaatgagctctgcacacacctcctgggtcaccccctatggaggtctcctatttgcctctacctctccgacatttgtgaaattctgcttccacacctattcaagtccaatctctagttgtgtagcccttttgacattgctaacaaagtgtagtccacaaatttaggattgtcaagtgggaactcaaattttatctgcaaaaaagataaacattaaagtcatatatattttt

SEQ ID NO: 300968 - DNA, 1659 bp, Cannabis indica
ggcccttgtctaaaaaaaatttttctccatatttgaggctccaaatctaaaagtaggatagaaagtctcaatatatcttttatcctattttttatttttgttaactaaaaaagtgggataaaagttcctctttcttgtagtgataaaatatatatggtattcaaaactaataataacataaatatcgcatcatatatgccatatataagtctaaaaattaaaaaacaaatactacaagaaaatggcaatttaaaactgttatatttatctaaaagtattttaaaattcattaagtgtaatttgtttttttttcctgttggtcaacaataaattattaatcacatacgctgcttttgagtctttaattaataatgaaaaaaagcatcaatttttccaaggtaaatagtttactctcaataaaatgtttatgtttaaatatagtacttttctatgtggaatgatccggtggagattcttttcaaatagccaatcactgaagagagagagagggagagatatatagaatagtaaaactaatctcatcgacccaacaatcaatttcttaactatttctaattagtagtttgtttcttttgcatatgtagtttaatataaatattcaccaaatttgttaagctctatatgtgaatgtgctgtataataatcacttttaaattctttcaaccatatatttagtaatgatctctatatttatctatcacagttgattaggttagtatataaccatcaactatacgttaatgttagtctcgatcaagcctagaataattgtatgttaagacagaaaattaaccaaagaaaaagataaattattttcttcaaaacattcactcccagccaagaaaacaaaatgaaaccctacataaattatcaagttaaggtttttcttttttttttttggaaatacgtgggctagttgtcaatgattctatttcaactgcttgcaccatcaaattgtgtctctcctttctctatgagaagatgattttgatcacgacacgtgttcatatcgattatgggaaaaagctttagatcaatggatcctcttttcgccatgttcagctaattggtggtattaaataaaggaattaaattaatagatagattttaacgttttcactatattttatctccaaaatatatagggaaagagaatatataagcaagcagcagtcaacgacagtactcaacatatcaacagcctaagaggtcccaacgtgtaggaaaggtctacctggctgctaattattattatatatataattattacaaccttataattaattaattaattaattattatccaacgtttaattttttcggtcgtccactaattagatatttatcaacttatatatattgagctatatatatagaagtactcttttttaaattacacacgcacacacatacagcggaacaacagttttcatatatacataattaattagtacacatgcatctgtagaacaatctgtcaaaattaattttaagctatagctttatgatcatattcatatatattaatttatatattcattatatagccaagacgagagtgaatttataatgcatgaatatatgttattgttataaatattaataattatgtgatgtccaaatcttttatttattacc

SEQ ID NO: 300969 - DNA, 1574 bp, Cannabis indica
aataacccaaaccaacaactactatatattgttttcttctttttttttttccaaataaaagcttaggttataagagcaaccttttatttttggcagttaaggagggattcaaatgttttgagttttttgaataataacaaattgtaccatacagtagtccatgtgagtgagtaccatatgtgtttctaaatggtagttcatatctttattttaacttagtaactatagactctgtcttttacctctttggccaggaattgtagtatgaagatgttaacccatcggattgtaataatgagctgtagtcccacattgagaattgataaggaaatttgatacctaagacaagagagtgtgagaaccaaacacatctagattttggaatagtaggtgatatatataaatacataggatagctatgtatgattaagatttaaaagagaaaacaaaaacatgttccatttctataaatgaacacttgagtgatgtgtagtgaattatgtttttaattatttgagtaacaattatttaaaagagtatggacccatgatagctaactaaaagggaaaaggaaaatattaaggcattaagtgagactgtagttgtagaggacttgagaatgatagaacgtctacattccaaacaagtgtgaaagatggttcatatttcactcagctttcaaatctgccttcttctctattttttttttatttttttttagcttgcctttatatgaagttattttctttttttatactttgtcaaatgtttggtttgagttgtatgtggataaatacccttttcttttcccttgtcttcttataaactcaatgtatagcttagcgtgacagctactatgcctatattatcatggtcattttaatggaacagtttaagccaattttattcaattattagcaattgtaaagataccactttttgataatctttagaaaagagcatatattataagctgttgcaattattgtgagaaggggtcatgtgagttatgatcattgcttcaaaggaccctcttgtgaaggacctccaagcaaggacccagtttggaaaaagaaattttacaagtcactcttttgatcaattgataataacagtaatggaaacaataatgggtcttttgagtgatgatcattgtcccaaaggtccctacctttaattatcttttattttatttattttggaagaactgtaaagacccatttttctttggggaaagaaattacatgtcacccttctgagcacttgatgataagaggaaaaaaagggtgaaaccaacaaggcaaccaatgacatctttagaacgtaatctctctatctatctaagtctagtgattttgagaaaatattaataaaataaacatttgcatggtgtggaaacagaggaatgttatggcatgtgttgtccattgtgattttattaagatcatggatctgcataatgataagaaggcatgggcgtatcgtcaaacctagtgtctttaattaacagtgtgttgtactatttataaatgcttgtttggtcaagcttagattaaattattattattattatt

SEQ ID NO: 300970 - DNA, 3881 bp, Cannabis indica
gagcttcgaactgctattcgtcagcttagtgatcgatgcctttattccgcttccaaatggtaaccccctttctaaaaccctaaaccttactctcattttcccattttccctcttcatgtatctatatttgattgtaaagtgatatgagtttccgtgtccttgtcctttgcattcaaaggagtaggtctatagtttggagagttaaggacattttttatagctttgtttctgttgctgatgaggtcgagaatctgtgtttcttctggattccgagatctcttaactggcattgcctcctggacttgttctgttaatcaatttcggttttttaaggctaaggaggtagagccttttgtttccaccatgaacttctcagttttagtttttaataagatgaagttttagaaactggggttttaagataataaatttgtctgggaaatttcacactttgatcatacggattcagttattttggttgattcctcttgtgaaagttgatcttttaaatcaagaggaagtggaaagtgaagtatggatcttccatggataggcaattttgttatctttgttttttatgtgggtagtgttcttttgttactttttgcagggcagcagaacaacttgtgggtattgagttggacccggcaaagttcacgcctgcaaacaccaggttccatcgtggaagctctagcattcggcgcagattccgcacagacgatatcacctcaactccagcagctagtgtgtcctatgtatccactcctgtaatggaggaagatgagattgtggatggtgacttttacctattggctaagtcctattttgactgtcgagaatataaaagggctgctcatgtgcttcgggatcaaagcgggaagaaatctgtgttcttacgctgctatgctctttatctggtttgccacatttttctatcttctctttggttatattttatgtttcaatacttggaatttaaagtgaaagtttagcttctttatttggtgacaagagattgcttatctattttgcaagacaatattttaagcatctatgccatatagttgaatattatctaaggttcttggctgttgattctataattgcatatcctcattatgacactaactgttcaatgccaccgttttttcttttgttggtcagccagctagtaaaatagcacattgaatatactaaatatactagacaagtatggtgcttgttgattaaattttaaaggttttggttcaaggaccttgcaactcttttcccttttctctatcttttctgataatgtagaagatgccgtttaattttctgaagcaaaatctagattgagcatctaaaaatctttatcttggctgttaactttatttgatcacttgattcttttaggaatttaattgctgccacctacgatggagttcaagttcagatctataccttttgataatacttgagtcttttcattaaacatgattttcatgatgttagttattggttgagatttgagattgcatgcccttgtatgtatattatactcttaaatatgatttattcaccatttttctctttattataattttttttttgttaatgtaggctggagaaaagcggaaagaggaagaaatgatagaactcgagggaccattaggtaagactagtgctttgaaccgtgaactagtctctttggaaagggagctatcaacatttcgcaaaaatggcacaattgatcctttcggattatacttgtatggaattgtgctcaaagagaaaggcagtgagaatcttgctcgttcagttcttgtggaatctgtgaataattacccatggaattgggatgcttggtcgaagttgcagtccttatgtacttcgattgacatattgaacaaccttaatcttaataaccattggatgaaggacttctttcttgccggtgcctaccaagaactaagaatgcataatgagtccttagcaaaatatgaatatttgcagggtaccttcagctttagtaattacattcaggctcaaattgctaaagctcagtacagtttaagggaatttgaagtagttgaagcaatttttgaagaacttttaaggaatgatccatatcgagtggaagacatggatatgtattctaatgtgctttatgcgaaggaatgtttttctgccctcagttatcttgcccatagggtgttcatgacagataaatacagacctgaatcttgttgcataattggaaattattacagtttaaaagggcagcatgaaaagtcagttttatattttaaaagagcgctgaaattggacaaaaattatttgtcagcttggacgctgatgggccatgagtttgttgaaatgaaaaatactcccgctgctgttgatgcctatcggcgtgctatagacataaattcatgcgattatcgagcttggtatggactgggtcaagcttatgagatgatgggtatgcgcttctatgctcttcattacttcaagaaatctgttttcttgcagccgaatgattctcgattgtggatcgccatggctcagtgctatgaaactgaccagcttcacatgctcgaggaagcaattaagtgttacaaaagggcagttaattgcaatgatcgagaagctattgcactgcgccagttagcaaagctacaccatgagctcgggcgttctgaagaggcagccttttactacaaaaaggatttggaaaggatggaagatgaagagagagaaggaccaaatatggttgaagctttgctttttctcgctactcactacaggaatgtgaagagatttgaagaagcagaagtgtattgtacccgtcttctggattacaccggccccgtaagtcctattcttatagatttcttgcatattggtgaaactacaacttaatctgtattatagatttcagaagagcaaccttacaattcaattcatatgtatatgttatacttttttcattttgtctttatataggagaaggaaacagcaaagagtttattgcgaggaatgagaataacacaatccagcttcccttctacggatgttgagcactttcccccataatattcgcattactcgggctgctgctgtgaatgaatcaattgacaaacttctttattgatttcaagattggtgttggatagtcgtagttgcagaaagtgaagagttttagctgtctaggaagtgtctcaaagagtgaaaattttcattctttgtgttacatcatataattgtagttggtagcctgtatattaattctcctaaagcttcaactatgaatagggtcatttcaggttcctttcaggtgttgcatttcagtaatttctttaactgcaaatctcttctgaagaagcaatggtttgatcatttttgctcactttctccttagcaatattgcaatgtctagtaaaaaaaaatttgaatttctaagttttttttttttttgaaacagtttgaatttctaagcttaaaatggatgttgaaatttattattatgattatttatatcttactatattaaaaagtgtctgggacgatacttttaatgacatatatatcccttaaattaatattgtattatttgtgatgacatatatattttgaattcaaaagtctaattttaatattttaagagtatttgtaatgacatatatattaactttgaaaagtctaattctataattatatagaagaatgataaaaaaaagtcgtttttgtgttattgtatagggatgattgttattgctgggcactagtggtgtctaacactttctataaatagcactttataattgattagtgatattgtttaaaagttattttttaagttatatgagaatcgagacttaattacactaataatagta

SEQ ID NO: 300971 - DNA, 1702 bp, Cannabis indica
tttgagtccatacaaggacttgtttagcttgcaaacaaaatgctctttccctttctcctcaaacccttgtggttgagtcatgtaaacctcttcttcaagaattccatttaagaacgcattattgatgtcaagttgttttatttcccatcctctcgaagcagctatggtgagtatcactctaatcgttgaagctttaataaccggactgaaagtttctttgtaatctacccctggcctttgatgaaatcccttggccacaagacgggctttgtacctttggtgtgaaccatccgaattgaacttgtgcctatacacccacttgtttccaatcaagttgtaaagctctgaaggtggtaccagcacccaagttctcttagcttttaaggctgcaatttcggtgtccatagctttgttccagttctcatcttgcaaggcttcttcaatgtttctaggctcagaaaagtatgattggaatcgtgcttgactgagaaacgtttttggcttaaatatacctgctcttcccctggtgatcatgctatgagtggatgcgaaaggagctggaggaggttcagtgctttgagtaggactgacaggaatgggatgatcaacaagggtatccaagttatcaagaggagaagctggatgggaagaatagggactggtatttcgaatgtcatcagtgctttgtaacagcagaaccttgatcaagagaaaagggtgttgctgtcgaagtgtgaaacccaggagtatgtggtgaacaaggattgccaggtgacagaggagatgctgcttcaggggttatatcatcagatgaaggagtggatgtggatagtgagggtgaaaaactaggtgtaggtaaggtagaccatgtagagctgtgaactataactggtgtttcaggtttgtaattatttagaaatccttgatgaaaaggaaattcaagctcattaaacacaacattgcgcgatatgtaaactctgccagtaggactaagacatttataacctttgtgagcatcactaaaaccaagattaacacatttaacagaatgaaattgaaacttgtgagtgtgatatggtctaagacatggaaaacatgcagcaccaaaagttttaatgaatgcataatctggttttcttttgaataaaacctcatatggtgactttagtgacaatacgggtgtaggaagtctgtttattaaataaacagcagtatgaaaagcatcactccaaaattttaggggcatgctagcttgtgcaagaagtgtcaagcccatttctactatatgtcgatgctttctttcggctctgccattttgggcagaggtgtgtgggcaaggatgagtgaattcaatgccatgagcatgaacaagatcagtaaaggaacgaaattctcctccccaatccgttcttaagcattttatttttctttcaaatttattctcagccaaggctttgaattgcaagaaagcatcgagagcatcatttttaaactttaagggataaatccatgtaaaccgactgaaatcatctacaaaatggatgtaatatcgataattaatgttggaagcaatcggtgcaggtccccacagatctgtatgcaccagatctaggacatgttgggcacggttttgtgaaagtttaaaaggaagagaatgtgacttcccatattgacacgcatcacaaaaggttttcatttcatt

SEQ ID NO: 300972 - DNA, 4426 bp, Cannabis indica
ctcactaccactcactcaaatccctagatctgaaaaaaaacttcaaattccaatcttctcagatctccaattttccgaaaatggagaaggaaaagtcatgtacgttactggttcacttcgactaagggaacacccgccatggccaacgagatcaaggaagctttagaaggaaacgaaatcgaatacaagatcgaagctatgaaaaaagctattttgctactccttaatggtgagaccattcctcaactctttatcactattattcgttacgttcttccttctgaagatcacattatccagaaacttctccttctttatttggagattattgaaaagactgataataaaggtaaagtacttcctgagatgattcttatttgtcagaatcttcgtaataatcttcagcatcctaatgagtttatacgaggagttactttacgatttctttgtcgtattaaggaggctgagattgtggagcctctgattccttcgattctacagaatttggatcatcgtcatccttttgttcgtcgtaatgctgttcttgctgttatgtctgtttatcgacttcctggtggtgatcaattgcttgtcgatgcaccggagattatagagaagtttttgtcttcggaacaggataattctagtaagcataatgcttttcttatgctttttacttgtgaagaagatcgtgctgttaattacctttttacacatgttgatagaattattgattggggtgaacagcttcagatggttgtgttagaattgattaagaaagtttgtagaatcaataagggtgagaagggaaagtatattaagattattatatcacttttgaatgctccttcaagtgctgttatctacgagtgtgctggtactcttgtttccttgtcttcggccccaactgcggttagggctgcagctagtacttactgccagcttttgctctctcagagtgataacaatgttaagcttattgttcttgataggcttaatgagcttaaagcttcacatagggagattatggttgagttggttatggatgtgcttagagctttgtctagcccgaatctcgatattaagaggaagactcttgatattgtgcttgatttgatcacgcatagaaatgtggatgaggttgttcttatgttgaagaaagaggttgttaagactcaaagtggtgagcatgagaagaatggcgagtataggcagatgttggtgcaagctatccatacttgcgctattaagttccctgaggttgcgagcactgtggttcatcttttgatggacttcttgggtgacaccaatgtggcttctgcgttagatgttgttgtttttgtacgtgagattattgaaaccaacccaaagttgcgtgtttctattataactaggctgttggatactttttaccagattcgtgcttctagggtgtgtgctggtgctctctggatcattggtgagtattgcctttcgctttctgaagttgagagtggaattgtgactattaagcaatgtcttggggaccttccattttttaccccttctgaagaaggggaggatcaaagtgctcagaagacatctcagcctgtaaactcaaccactgtgtcatctaggaggcctgtggtacttgccgatgggacttatgccacccaaagtgctgtattggaaactgctttgtctccacctacactcgtccaaggatctttggcttctattggaaacttgagatctcttattctttccggtgacttttttctgggggctgttgtagcttgcacattgacaaagcttgtattgagattggaagaggttcagtctttaaaaagtgaagttaacaaaacaactacacaagttttattgatatttgtttctatgcttcaattgggtcaatcctcggctcttccacaacccattgataacgattctcatgagaggattgtgttgtgtatcagattgttatgcaacaccggcgatgatgttagaaaaatatggttgcagtcgtgcagggaaagctttgtgaaaatgctagcagataagcagcgccgtgaaacagaggagataaaagctaaggctcaaacatctaatgcacaacctgatgaccttattgatttctaccatttgaagagcagaaaggtatggcatactcgtgttttttctattaaaatgcttttctatgtttatatatagtattatgtttcattatttcttcatttactttgagtaattttgataatcataaattttgtattggatctctatcacaaatgttattataaattgatgcatttctcttaccctctttaaattttaaacttggtttgtgctcaacacacattctatcgatacatcttaagtagtacaaaagcattttactaaactgttcatataatctatacatgatatgagtgacacttttcactaagatggtcatgtgttttgttaatgttttccttgatcggtcttttcaaaactgctactcaataagatacaatttgtcttcatcgtctatgtttatgccatgctattagctttcatatgattatcttacaagtgcatatttttcagggcatgagccagctggagttggaggatgaggtccaagacgatctgaaacgtgctacaggagagttcacaaacgatggagatgatgcaaataaactgaatcgcattcttcagctcacaggattcagtgatcctgtttatgcagaagcatatgtcactgttcatcattacgatattgtacttgatgtcactgtcataaatcgaactaacgagacactgcagaatttgtgcttggagttggctaccatgggtgatctcaagcttgtagagcgacctcaaaactatactctagctcctcaatcaagcaaacagataaaggcaaatatcaaggtttcttcaactgaaaccggagtcatattcgggaatattgtgtatgagacttcttcgaatgtgcatgacaggagtgtaattgttctcaatgacatccatattgacataatggattacatctctcccgcatcctgcgctgacgtgacatttagaacaatgtgggctgagtttgaatgggagaacaaggtatatatatattcacttagtcattattatttgttgatttggatgcaatttgtatgatagtttgtatttgttaatggtttttgattaaaaccgaaaaaaacactctgaaaagttgtgactttagagaaccatctgacaagattttatttatttttaacattcatagaagttgaggggtattttggaggtactactacactatatcctatgattggagtactttcagttaggttagaaaaatttgggtgtagtgaaagtggcaaacgagcattatagtaataaattttttctgtattttactgaaactcttgcaatttatttatctcatgaaattttactgaccgaacaattgctcggtttatttcaggttgcggttaacactgttattcaaaacgagaaggaatttttggaccacattatgaaatcaacaaacatgaaatgtcttactccaccgtaagcttctctatctttaactctcaactcaatctttgtttaaattcaaatgaaattcgggtgttaattggggtttttgtagatctgcactggaaggggagtgcgggttcttggcagctaacttgtacgcgaagagtgttttcggggaagacgcgttggtgaatgtgagtatcgagaaacaaggagacggtaagctaagtggatacataagaataagaagtaaaactcaaggcattgctttgagtcttggagataagatcacattgaaacaaaagggtagtagtgtttaagtaagtctctctctattcctaactttgtcttttcatcaagacaagttatatcatcatcttttgccaattttattgttaatttttggtcttggatttagtttgtgcattgattttttttccttcatcatcatcttctataattagtataaccttgaatttgttacaaattcccatcctgtattttgatcttttttagagagagaaagaaagagagagagaaagagagagagagatgaacttggtcatcatcaccctggtatcaataacaaaaggcttcatgctgtgttagtaaatttgtatcgatatgaaaagagttcttctgtttagtgattgagaaatgtgattttgaccttatttgtgttttgggcttagaacattttgaactgggccagcccaattaatgacacgcggcccacaatatggcaacctctatggtatggcccacgtcaaggaaagggtaatattggcaacatataataatatttttttaatcgtaaatttttattttgtttatgttataaaataatggaatataatatttaagtttttctacaaattaatttttaattttttaaataatatatttaatgtaaaaaaaaaaa

SEQ ID NO: 300973 - DNA, 1586 bp, Cannabis indica
ctaaaaaaaaaaaaaaaatacatgatacaaaaattaaacagattagaaacgaagaaaaaaaaagatttagttacgtacgtaacatgcgtttggtcattttattaattcttattatttttttttgttagaaacgacaaagaaaaattctcaaacaacttgagaaatctttcttgcatttcaatatatacagacaatagctgagatttttctcaaaacaacaatgaattaagaaattccccatgcacacgcagaaaatcaaaatgaaagtgttgacaaacacatcatctcatgacctgatcatgatattgataatattaaattgaaggatatgatcgatcaatcgatcgatcaagttactagtattggtccacaaacgatgctaacatatcatatggtctctggccattccagttgcctggtggatcatagttgcaagtaataaaagaacccctattattatcacaccgaaccttagcacacccaagacgaaccgagttacgccacaccacctgagtgtagtgtccgcaaaccctaccagcccgacaagtattggagttgtagtcgtagtcagccttctccgccacccacatcctcacggcgttgacgcccgaaaggtcaggccttccccaggctatgttctcgccgtaaggcccactcgagtgaacgagtctgcagtcgcccttgcgctggttggcgtatcgacgcgcatactcagccaccgtgttgtcccatctgatcggccccacacccacctgcgcgcgcgcagcgttgtgggcgttgagaaagtcttgtggagagtcttgggcatgagtggtggtttggagaatggtaaccgtgcatgtgaataatagtatcactagtaatagtgacattctattattattattatgacctcctaatagctccatattttcctttttttttttgttgctatatatgtgtttttgatactatatttattgcttataggaaggatctatgtggtggattattgattcataatgtacacgatatttatagtgatggagtgtggaatttttttagatttacttgctattattataacaattttaatagataaatatggcagcagccggcggcggataaaagataatcataatggaaaaaaattatacatacggatcaagtcacgcatattatttatttatttatttattttttaagtagtgagagattaagctaaatataatactttttgtgttcaacttaacagtcattcttctttaaaataaattagttatcttttatgattcaaaaaaacaaaaattagttatcttttcataaaaaaaaaataaattaagaaaaaaagagacgagtaagttgaaagaaacatttttttgtagtattttaaattattaatctatttgtatttgtatttaatcttccaggcttaaattttggtgataaaataaaacttcctaaatgactgaactgttagtaaatttactctaacgattatataataagacgatgtctaacttaattataaaatattagtatgtgagtatgtaatatttactcgggatataaattattactcattgtatgaatatattgctccacat

SEQ ID NO: 300974 - DNA, 4791 bp, Cannabis indica
aagtgtaaaaataaaaaatttcctaatttttttaaaggaacaataacatttgttgtccagaaatttattagtaaattctgtttgatatggatatgtcacaagaaagttaaacgacatgtcgtttgggtaccattaaatgggcctttgaaactacaatgacccatttaaaaagaaaaacagaaaaaattccgaagcccagcattttccgaacggttcaatcctgtgtgcctgtgtggtgcttcacaatcacagaggcaaaggacgatcggatcggatagatagtgatggaggaagaagataagattgagcccgagccgaagaagaataaggtggtaattaagataccttcatatcaagaggtgattgaaagctcacagtcaaagtcaacaccaccctctctcttcgctccttctcaaagcttttcccaagctttttctttcgttaaatcctctgaattatactctcctcctcctttagagcctccacaggttacccagactacgacttccaggtagcccttttggccattttactccaaacccacggagtgaggattcatattttgttttttgttttttttctaagccaagtgagtgaggttttatatacatacgcattcaaaacaggaaacttgttacttttttgctgttttggaagaattgattgcttgttttgatcttttaattagatggaatttcggtttttattttaattggtgagcagaaacttaaaatcttttgaagcttatgtttctgttgtttcaggtgtaatattttataatttgttatttatgtatagacacatgtatatgatcaagccttcaccgagtctattttagcactaaaacgttgctagtggaagttataaagtcaatggcaatatgaagattttgtttcagttccttgtattaatagttttttatggtaatgtgatttcttgcgtcagggaatatctacagtcaaatgttgcatctccattgccagttgcgtctactagctccgttgcttcatcttcatcgtcatctactcagaatcgcaatgccattcttgtgagccacagacaggtacctattttattttgggtccatatgaagatttcaaatgtatgaaaagggcacactgaaaaatctataatgattgttaaccagaaataggagtcgatgttttactttatcttacaattcttgatgcagaaaggcaatcccttgcttaagcatatcaggaatgtgagatgggtttttgcagatattgtttgtgactacttacttggacaaggctcttgcgctctctatctaaggttaggtgttctatttgtagctttgtacaatgccattaggggcgtttggttggaggtaatgaaatggaatcgataagaatcaattctttgtttggttgcattttaaattattgtaatgtccttccaataaaataattttttcactattttagtagaatgactatttcgtagaagaaaactccattccaatgcaaaatgattaagaatataataatttttttttctatacactttaaattttattcctttccatttattattcttattctcgttcatatacctatttttatattttcattcctacttcccaaaggtatttttgttattgaaatattattatgacattgtgttaaaactacctgttttttctactcatttgaccatttgttacagccttcggtatcatctactgcatccagactacttatattaccgtataagggaattgcaaaagaacttcaagctacgtgttgttctttgccatgttgatgtggtaagcaattaagccaactgatcatgtataagaacttcggacttcagtagtagagatttcaccagtttcaagttttcgaaaaatggtgcttgacttactgatgttattgttgcaggaagatgttgttaagcctttacttgaagttactaagacggctctgcttcatgattgtaccctgttatgtggttggaggtataatatatgtaattttcaatgtaaatgaaatatacatatttgacaatacctcttttggctgttggaatactgtttcaaaacttgaatgtattgctgcttttgaagtagcttatttatgtccttggatttcgttaattttttttaaagggaagatgtccttggatttcacaaccaactctttatttcttttctcttgtttgtagcttagaggaatgcggtcgctacttagagactataaaagtgtatgaaaacaagtctgcagatattatacaaggacaaatggatacagattatttatcacgggtatgattctctttagcttatattttttgcctgctcaggtgatgctggcgtattatatgggaacaggttctattgaactatggctagattttggaaatttatagggtgcatctattagattgttgtgcactgactgaacacattttatcccaatgttgattgtagctgaaccatgctctcactacagttcgtcatgttaacaagactgatgtagtaacacttggcacaacatttggggtactacctactttcttaccctgagaattcttatggccaaatatcttgtagtttagtatatatatatatttaacagcgtgggttctttctttttactattgttattctttttgcagtctctatctcatatcatggatgcatcaatggaagatctagcacgctgcccaggcataggagagagaaaggtatctatgctgagaggcatgtcaacttttttatattgttttaatttctctgtaagttgataagaactagcttttccaatattgggaacctatggtgctaacaggtaaagcgcttgcatgatacttttcatgaaccgttcaaacgtgcagtcgtcagcgttcctactgttccagaaacctctacccagaataatgtcaaaccgagctcagtgaatgaagataaagaaaaagccgaacaagtagatgcagaaaatgacggcaaaagaagtaaaaaagaacctgatttgacaattaaatcagccctatcggctgcttttgccaaatatgctgataaagttgtttgaaataacacaaagtcaccgtgtaagaggaaaggtgaaacaagttctgccaccgaagaggaagcttaaaaagataattcatgatagtttaagctcacatatttttctgacttcaattagccttgagcataagattctttttgcactctgtgacactaggaaacagtcttcttcatgctctcttctctttactctattactttttcacaagcttcctcaagatgtacatttatataatgtcaatccaaattcataaagcattatcatccttgcattatgtgaacaaaataaaaaaggacagcgtttattactgtgttgatctatatataacaacatactgaaattactctgtaatgcttgctgttacagtagggtttttagaagttatgaagcaaacagccaaaccccataaatctcccacttttaagttttaagacaaatcaacagtacataaccacatgctcaatagtcctttgtagttggctgcaacggaaaggtagtaacatctatttagaacccaaatactgtggtattagaagtagttgaagtggtaacaaagtaatagcagatcgggaagttggtgatattatattgacggttttacaaaaatactgagttttggataaatgtttacaattttattgccacacggtaaaaattatttttatattgtgttgagttttttgttttcttttatattgtagacattgaatattaagaacaatgtctctatcttccacactcacgcacggaaccaccacaacaacacgaacacacccagaaaacaaccattcactcggacaagattgagcaaaaatagtgaaagcgacgtcaaataaataatcatggcaaaacaactgtaaaataagactaaaacaaataaaaaaaaaacaaaagaaaaaaaggattttaaaaaattactgtcttatgcacaacctcaacaccatatgcaataacaactatatttgcgttgttgagtaaatttcacttataaccagtcccttacatacaatatccacatcagcatatatcaacacattcacaacagaaaaataaaaagactcaatcctaggtggctttgcctctactagaccaagaaccaggagttagttacaactgttttttgtaactaactcccagatctttgatcaaccgacttcaacataatatataagcagtaaatcaaaggcaaaatagacttagaacaaaaaagagagaagattaaaggaataaaccctagtttgagacttatgccccaagatccagagaagagaaagcaagttctcgtggtgaggaggtagaaggaaggaagtacatgcacaaaaacagaaaactgagttagatcgagaacaaaacagagaagaacaaaatcaaaaagtgtacaatgaaagaatcgagtcttacctgatcgttttctgtgacaggaagctccaaaatattgtaaatcgccattgttgatagtggatatcaagctagatctctgagatgagcttgacagagacgtagccctaatttttgggtgaattctaaaataattctggtgttttctctccctttctcttgtttttcatttgattaaactaatctgtgtgtgtttggatgaagatcctagggtttctacttaggatcgagcaagttcttgtgaagaacttgctctgctagggtttctagtttttgaatcagagaggctaagtgtgtgagttaaggcttctagacttttcttgagaagtctttaagctga

SEQ ID NO: 300975 - DNA, 2970 bp, Cannabis indica
tggtatcggctctcctctccttcagcctttcctcactcgcgcgcgtaaatttaatatgtttcctcacggaacggttgttggcgccgacttaaaaagctcgttctcttcatcatttctattctattttctcatttctcacttacccaatcgaatcacagacttccgaaagccctaaaacgacaatccatggaccgcgcttcatggcgaacccatgttctttcaaagcacctcattcagccaccctccggtaatgttatcgagcccaatccatgtctcaattattcgccaccggagctatcagaacgatccgattatttcgatgccaaagagatgcgatctctcttggatgctcacaatctagaggaccgcgactggctctttgggttgatgaggcagagcaacctcttcaacccccggaacgccgctggccgagtcttcatcgcgccggactataaccagtcaatgcaacagcagagagagatgacgatgaagcgaattgcttatctttctgattgcggggtttttcggggctggcttacggaggatggggtcgacgctgaaatgaggaagttcgcatttttcgaagttattgggatttatgatcactctatcgctgtcaagctcggtgttcatttcttcttatggtaaactttaatttctatttctactttataatttcggctttgtcgtttccttaaatacttttttccgcaagcccgtgcatgcaaatgttttcttctgaattaaaattgtgatttgggcacagtatattgacttattagattagcttagcaatttccataagatactcgtggttgttattggagaagaaactgtttatgtaatgcaatattccatgttctactgttttggttggagccaagaagaaaaggcttgttaaaatgacttgaaagttaagatgtttgcaatatcaaaggttagcgttgactaatcatgatattttgatcatcgatttcaggggtggtgctatcaagttttttggcacgaagcgccatcatgacaagtggcttagggacactgagagttacattgttaagggttgctttgcaatgtctgagttggggcatggaagtaatgtatgtgaagattgttcaatcgtttgatttagtaaagaacatgctttgaagatgagtatcttttaactgatggattctttattatactttcaggttcgaggaattgaaacagtaaccaagtttgataaaaatacaggagaatttgtcattagtactccctgtgaatcggcacagaagtactggattggaggcgctgctaatgtaaggattaattttagacctctgcttcttatttaaccaaaaaaaaaagttaattcttgttttctgtcttctttctgctcttcatataattgatttctgatatgttgaacgtttattcgttcagcatgcaacacacacgatagtcttttcgcagctgaatataaatgggaacaatcaaggggtccatgcattcattgcacagattagagatgatgatggcaatgtctgtcccaacattagaattgctgattgtggtcataaaattggtttgaatggcgttgataatggcagaatctggtaataaattgcgtacttttgagacacagtccaagtttaaaaaataaaaataataacgtggataacaagggcattttattcataggtttgacaatgtgcggatccccagagaaaatttgttgaattcagttgctgatgtttctccggatggtcagtatttgagtgcaataaaagatccagatcaggtacttatgttgccagttttccatattgaaatatgaattattttttatatcttctttccaatttagctgcatcaatatttgttttgagtataaaacatttatcgcattcagaggtttgcagcattcttggctcctttgacatctggtcgcgttacaatagcaatcagtgcaatttactcagcaaaggtaatattatgtttaggcatgattcctcaaactttgattttatctttattaactttcttaaaacacattgtttataatttgacataatgttttgacctattagattagtttagcaattgccataagatactccttgacgaggcgggcattttctgttacaccaaatggacctgaagttctgttgcttgattaccctagtcatcagcgccggctcttgcctctccttgcaaagacgtatgtattcctttatacttgtatatacgtttcatggactcatctgtggtggggaataagttgaaaagctcaaattagctgataatttactcaggatcaaacaattcatactagaagtaagataataaaaaaattaaccagtaatgtactagtttctttgataacctaaaatttatttcttcccagtcccaattattgggactatctaggcgctgatctttcttttttccttaagcacgtaggcctagattgtgactaaaatatttgtgccttcctacttgagtaaatttcatgctctcatctgtgattgctaaatattgacgcctatagaattttgaattttagtcagtaacacaatatttatatatttatatatataaatttattgaataagccaacaaagtggtatttgtcctttgttttttcttcataatgtaagtttattttttgggtttgtgtacactgcagatacgctatgagttttgctgcaaattacctgaaattaatttatgtgaagaggactcctgagtcaaacaaaaccatccatgttgtgtcaagtgcattcaaggctacacttacctggcataatatgcgaactcttcaggtcataatggaatttaagtcaatatttttatataatttgtgtttaatgtatatttaatctatttgatgttgtttaggagtgtcggaagcctgtggaggcaaggcctgaagactgaaaatcgtgtggtcacatgaaaaagtgaatacgatgtgcagtctacctttga

SEQ ID NO: 300976 - DNA, 2205 bp, Cannabis indica
aaataaacatataaatgatcacatgaaccaaatgacatactaaataagtaatgaaaattatttctgtttctttattgataattgaaagacaaagattacgttgaaatagaattttatttagggcacaaagcccaacactcggtaaccgctaccgtactagtgttggtaacatatgaatcatataaatagcatgcatataatatacatacacatatacatatatatatattctatgctaaccttacctcatttctgaattcaagtgtgtcggtcgacctgaattgaaaattacgcgttgaacggaggccctatgtcacaatcatgtaaaatgggtaaataactttttaagacctttccggggtcctaaacttaaaactagaacttctcctatcgataaataccatggaaacaccctaaatatcgaggaaacacgagaaaaacaactatacgagaaaactacctgaaaaacggcaggtcatttctataaaaatggcaaactattttcttgggttctctgcaagaaaaaacagtagactagttccacaaaaacgacgtactattttctgcacagaaaacaacaaagccctaaatcatgctcaaaacaacccaaaactcaaatttaagctcccgaacatctaataacatcacaataaaccaactccaagcaacagagccacaaaatatacaaaaattcacaaaccaccattgttgagccaagtttaagttcttgaactcaaacttgctcaatcacaaccaacccttaaaatcaactctaggaagcataaaacctcaataacaaacttcaaaaatcaactcaataaaacctagggtcggacagttgctaatctccaactttgcatgttcaaaactaaaaaaaagtttatcaaaagttaaggaaatgggttctagggctttacctttgattctttgctaaaaatcactttaattccctttaattctttgctaaaaatcattagaattagatgagcaatttaaaaatgaaggaaagatagagagaatgagatactggtttatttgtcttaattttcctaagtttatcttaatgaataaatgataaacttaactaataatcagaattaaaccaacactaaagaaacttaaatctcttggaaaaaattctagttttgccccttgcttctcacctaagtaacctttaggcttaatggtaaaatgatccaatacaacaactctgcctaacctcgatattccaaatatcacttatgaataccccgctaaaacaaaggttctaacttcacccgtgtgactgtaacggccattcgtcacattttccatcgttatcgagcaacaatcataaaaattgtaaatttcacatttagcataaataatatacatagagtttaataaaatcttcaaaattgagaaattataactctaatgcccttattcctaaaaatgggacccacaataaatataatcatgtataattataaaatatcaataattaatggtaatcgcccaactaatccataatataatcatgcagtcattacacaagccctcaaatccccaccccaagatattcaccttggacgaggcttgcatccataatagacggaccacttttctcccaatctttctctctttctaatctctttaattttgttttttttaggcggttcgttcagtggttctcagtgggagcttctttttaattttgttaatttcatttcatatttgtgtttggatgtattgtttttaatatattattgggatgtattgtatttgatgtattgtttggatgtattatatttgatgagattcaatatatcaattttagataaacatttttatcttgggtttgtttatattttttttttaattttctagttgttagatctagctctatatggtgcggtaatggttctgattttattttttattttttttacttcgattcataaccgaagaaagaatctttttccgtcggtgcactactatatgcttccactacaacaaaattgggctttagaggcagtttttaaagcttttcagcgccagttttgataaaatttgctatcgatgctgtttcaggtgacgctataggggttaaaaaaagttgatggtgtagggaccctatggagtcggttattatgaaaaaacggcctctgtagggtccctatggcgtcggttattatgaaataatcgacttcgtagggaccctac

SEQ ID NO: 300977 - DNA, 1534 bp, Cannabis indica
acgtaattatgatctaaatttttctctaaattgttacctaaagaagtaatacacaatgtcttatatagacaactcaaaaagaaggaatccaagttagttaactgaaatttaactactttaagaattgactggacaaacctactctatcttataagtcactagatgagagactaacaaaacagtacaccaaattattaaaatctctcacaacatttaaattaagaatgtcttaaatgtggataagcaatcatagtttgaacattttgacattcagagttgtagcctcattttgatgagtcaaccaaactcaccatctttaactttaaacataaaagaaaaaaagtatcgtatttgaaccttcttttagcttccattttttattattagtatttttttaaaaaaaaaagtcagtactaatattaataatcaaaagatgtattccctccaatccaaatcaagtgccactaataaccaaccataatctctttgctaccactcataactgtccaataataattttcaccgacattttcactctaaaaacactttactttttttaatccgtatatatatgatctcactgatcaatgatctaatattctttcatttttacagcttgagaacaattatataagatgaaccaccaaaagtcagatcagatttcggtgattaattaagcctatacataaaacaagtgaattaagtaagattaatcagacaatatatagcatatctttatgatgtgacacttttttttttcttctctttctttgccgtacagctttttgtaattaaggaccattttagccatcaactttagcaaaaacaaaatttctaaatatatatatagctgttaattaatctctttttgacttcaccatgcatgatatacatattctctttcaaaacctttttcttaatactgccatatagctttctattaatttctttaagtatgtcaccttgttcgatgtcaagtacttgaacaataccataccatatatgatcacatggctatgaaataatccaccgttaattaagaaaaaattgatataaagtgtgaagttttgtcaataaattaagaaaagcaaacagagcctaactaatattctgtttatgaataactctacataacaaggaaaaataatacttcttttggtgttgaaaatatatgtttttgtttgtcaaaaaaagcctccacacgtcacatatataatggggttgttaggatctcactttcaaaaatcagattccatcaagaaatttcactttgagttagagcaacatttctcatttgctttaaaaagaagaaaataacaaatattaatctcttagattgtgacatcatctttatttttactatttcaagcgctaattagtaagaccttcaaactttggaactaagagcaaccagtaataattattatttataatgattatctattggaaaatttacatggtgtactaacttttgccatttttttacaaaaatactgccaggcagtatttttacttttttacttgtatttttata

SEQ ID NO: 300978 - DNA, 3358 bp, Cannabis indica
acaaaagacttctcaggttataatttctacagcaagcaaagcttctctttttttcagttaaatttataattgcattgtgaagcccagccgagataatggaagattgtagagtcaacaatagaagccccataagacaagattaattaatatgatttagtaatttgtttactctatacagctaagagttagtatttgttctctgcataattatttatttctttggctccataaaccatgttgcagatcattggttctacacattattacaaaaatgctgaattaacttgtatcattttctataaagcatatcctctctcacaagacatcaagatgtttgtgattaaccacgaggtcaatgtgttttataatataaactgacacaccctcaaatgacaattatctttcttttgcatccataaattttcttaagcttaactaggcatctcatggtccagtccattatgtagagtattcttttctccataacatacaatcaactagaaggaccgtcctataaagagttaccatcaatttaaaaggtctgcctctctagtgaggtaagaaaaataataagtttctgcttgtccagcatgaatgccttacctcaatccatttcttacggaagtcttcactacatggcctttggtcgggaaaaacacctggctttgttaatagtgaatcagaaagtggaacaccataaacttgaccggcctgccaaggtaaaagtagataatcaaaactctgatgattttcaatcctataagatcttactcattggaatgcattcatgtgcaaaagaacagtgataataaataaataatagtttcaaaaagacaaaaagaattagagaaagaatatatgcatcacctttcgcttttgagcacgagactcatttatagccctcagacatttcctgatagactgaaaagaagacaagaaatcaaaacagacatcattgaacaatatccaccaccgattagatagagaaaagaaaaggggggaaaaaactccaaattccaaatctagaagtaaaaaaattacctctttgcacttgacgacaacaggtttggtaaaagattgaacctgagtcagtgatatctctcttgactcctggtacattcagcgtgtacaaccatgtcaagtaaatacttgtagcagttacaccactaactataaaagcaattataaaatcttcatagctacattcttcattagtgtagagaatgtcatgaaacccaacaaactatgcagtgttactaacaaatttataagacagttttacataagagatgaaaactagtaatgcttttaaaaataaataaaaccctaaatgactaacacatcccaatatacagtagtttcagaaaaacaggaaggaaaaaacaaagaatcggagttgcagaaatttgtctgtaaatagaagcctacctcaactccttcaacagtctctctgtatccagattgcacatattctttggtaagtgtctcctctggacaatttgtagtttgcgggtgatagtcaggtgggccaagcctgatattttagagcaaattccagaaacgaaaaatgagagcaatattcagaagaaaattactaattaagcaaaatacaataaagccaaaatattatctaccttatctagttaggaattaaaataagaggattaaaaatgactaaactacaattgaaaatatgtcaaggttattataaaaataaatacatatttgttatcaaacgtccaaattttccacactacacaaatatacatataaaaataaaagcaactacagcaaagacatgtactgatccattgcaaattaccgtgaattcaaggattctttgtcacacttcaacttgtaaggtgataactgagatggccgcctggagaattgaaaatgagtcactacgttatatggggcaaaagaagaccaggtaatacaaacaacttgactgtactaactgaagataccagtaatataatatgtaacttaaatgccagagaaataaccccttaatggggcaatattcccaatttctggtcagatcacatcatgattactcaatctcataaaccaaatccagttacaaagttttaaacagaaaatggacaataattactatctgaatgccacaaattacttttttacgcatacacccacatgacatgagtaaaaataatatacaacagcatatggagacaccgatcagaaattactagtatcataaatcacagaaatcgtgctcataatatgattaaagagatacatatacctttttctgcaacgggatctcagaatggggcagtaatcagaattgaagacaaaatagtgtgtgttggaaatcatttacctattcagagagtagttagttggcaaagaagatgaatcagctcgggcagtatcccttgctgatgctccaccaattgaactgttattaactgcactagtgcagccagcagcatgataccgttgcatgtctccctcccaactatcatcggcatactgcacccagcattgaaactgctagaaaatgttgaataaacttaactgcattgcagaagcaccagttctgtcaattctgacaatttaagtcatggaggaaacagaaatcagatcttttaagaggatttctcaattacaattgatgatcattactcacatgcctaccaaaaatctgaaactaattcaggacaaaactgtaagtctaaaatatctaaatgaaacacagttattgcaaaattgcacacagcatgaaaataagatagataaatattcagaacataatgcgaaacatctcccaattaggaaatgggataaatgatgccagttctctaaacaaaaaattacaataatcagaaaatgaaactcgtgtgcagaactttctgtttgctacctcaaacggtcaaactatcctaggataagatgtttaaaattcaattccataacaaatctaatatgagccaaagcctaagaaaaccaggcacaaaaaatgaaacaaagtttcagcagttttcaaactatacaactgcataaggaagaaaactgcacacataaacactatgagattcttaaacgctccaaataataaagaaaaacactttgaggagggtttacattagcatagagttgcaaagacaacattagcagcaaaaaggggaacaaataaactataacaaatcttcaaacttgaacagtaatttgtttttatatacatgctaattcacagcccaattagcatgaagtccataaagcaatttgatctaaaattacttgctcgacagcacgtaaacagacgacaatatattcaaaagatttgccaagaaacaagtcacccaagtatctaaaaccagttgaattc

SEQ ID NO: 300979 - DNA, 1609 bp, Cannabis indica
aactacagtgtaaatactccaggcccaacaacatgcccaaatgaaatattgggcaaaacccataagcagtcagtccttccagataagttgaagactcctccaggccagtgacccatccagcatgacatacatccaaaagatattagacaacgcatttgggagaagcaaacatcgaccatccgaatgtccagcttataagcattcttgttaatcacaagatcttgagatatcaggaattaactctcaaggatctcattcgaagatcatgttatcctaaatatggaaagagagtaattagcaatcaaacatttagtgtgtctttattctcgacaaagatatgacacgattttcggtaactgccaatgtgatgtggcatccacattagcatacaccaagcgtctcatgggctgggcttcaccagataagcccaagtccatatgttacttgtaattttcctattagtgagaaaatgttaatgaataaaaactctaaacactataagtagacgaagaacccttcatgtaaagggttagaaactcattctgtaattgctcaagcaaattatagagttcatacattcttataaaccttaagccttttctagctttcaagtaataatattgactcttcgactaaggttcgttaacatcccaaccacgtaaaaattctcatcgttattttctttgtctttgatcaatttttcagctttcacatataataaatatgttttcaaaaatatcggcaaatattttagtgctttcattgagagctgaagaaagtaatgataccatcaaaggttttatactacaactacggtactcacccgaaaccaaatcagtggtcgtgatgaagacactcctatgaatgacgcagatcttgcagcctaggcaaaaataggagtagatggagatccaacaaaggcaaccagtcgccctactaaaaagactcaacgtactgagaaatacgttgatgaaaatcccatcaatgaggatcacgaagaggaagatcctaaagacgaagatcttgaaggcgatgggaaagaaaaagatgatgagtgatattattacaagctagatcctacaatcgttatgaccaaagaactcgccgagataaagttaaaattggaggcacaataagacttctctcgccgaatggaagcaaccttggccagactggaggctaggcttgaacctgagaatgttgctcatgatgaagaaattcttgacgatcctattccttaggacaataatactacaattgtccaagaaagcatcatgggagatcctccgagaaaaactgctgcgattgctctgcgtaacaacatgaaaaatgctagccaacctttaaagaaaaagaaggcagctaatgctctagggtaaagctacccaattgatccgagaggtagagttgttcaataattaatgatcctctatagagttgtccaacctttaaggaaaaagaaggcaaatacgctataagttacattgaatagggattaatttaccgttacacccttcaatgtatttatccttaaaacatttagctacctataaatgatattccagtgaactaatataaccgctgaaatgagtactcaatcatttatctc

SEQ ID NO: 300980 - DNA, 2661 bp, Cannabis indica
taaacggtagaatcactattagcacttatcagaagggatttaatcttctttgtactgttcttggctctggtgtttcttacccaataagagatgaagcattattaaagagagaatcactaaaaagaatcgctaggatacaaaagcaagaaagttacatcaatgagaatttcttaattatttcagttttcactcctagaatcaaaagctaatataaggtctgataggtctccccattgctggagggttccgcacatcagtggctctggaacaacactcgaccagtcatcaagcagtgattattctctatccctgtgtatgtgctgttaaatcttcgattctgttcttatattcatatcattcatacaaacgaaaatgcttttatttaactatgggcaatgagaacctgtcaaaggaaaaaaaaaaaaaaactatgggcgatgaggagaaaaggaatattgtagcttgtacagtacagtatgttgtagaaatttatggtgtgagagggtcgattagtccattcttttaaagttataacttataagaaccacttatatatatgtacctaaggagctctcattttgtttttttttttttgttgtgtgaacttagctaatgatttatttgtgtattgaattttgaatagtttgaaaaggtataattatggaatatggaatgcgtctaaagaaatatatataaaacgagatcttttccttttttaaaaacagtaaggatattgttttcgtaagttattttgaaaatcgacactgagattcccaaataaaaaaagaaaacgaaaacattgcagcattcttaaacggtaacaggacacttgctgttatacgtacgtaacgatcttggaacataaaatcgaattctcttttcaacctgaaaaatatattttatttatggaatagcaatggcaacaatataaacaatcggcatgtgcaattcccatgttgtttcttcttcttcttcacattaaactttgttacttgtatgcttaactgtctttaattccatgaaaagccaacaaaaatcatttcctactaaaactatagaacttaagggagctcgagtttatatcttgacataagaatctttctcctataatgcacttttttatttacttctgcatctcacataaatacacaactcttcaaacccatttggtgaataccccaccaaagagcacgtagaactaaattaggggaaactagagccaatagaattacattatttttctgtcaactcattacacattttgcaacgttggatcagatctagaaagcttgagcttagcacgcatttcacaatgttggatcagatctagaaagccctgaatacatgtctgaaatcgctttagcaaagtataccttagcttgaggtctcttaatcagcacactaatacccttttgatatgctgtgagacaagcatttacttactccctatttcttggcattcaaacaagggattccagaagaagaaagagaatacaacaacaacgtaccttgaatgtgggagtgagaaggccattctcaagagaaagttgtttaggaatcaaagttacagctttggcaaattcaaatcctctcaaatgtggtaaatagtagaacattaaactctattgcccaattttgcaatctgaagaattaaacatagtaactaatcacacacattacttgagcttctctgccaatggcgtcctcaactgacagaacagttaactttgctgttggattgttgcatagttgtcctacgtgttcatactacacaaaatcagtcatattcaatgagaaatttaaaaatgaaattgcttggtcttgcatacctaaagaaggaaaagttcaattataaccatgtttttgtaggtcaaaactcaactaaaatttggacggatagtgttacccaatacgttgcttgttcagtagagatagattcatgtcaaatggagttcccgattggcactcaaaccacaaaaacattaaactatggattacaaagcaacccagcacatattaagatatttcagagctcaaaggaacaaccttgacaccttcagatgcagcccactctttcaagatgtcaagatccactacaactacatctacttggaaagagtttaagctatcacctagaggggtaaattttcgtgagttgcagaaaatacgtaactgcttgtaaagatattttcattagccaatctcccttaccatatataaaacactgagcggcgaatttgcatttggcatagacattttcaactttctatagagctatatactctctttgcgccaacttaaatatattttttttcctgtgaagaaattcaaaatttagctcagaagagattaaatacacaagtccatttaatgtggttggaaaatctcaggctacttgactagataagaaaaaccttgaacattcttaggattagttttggattaagttagttaagggttgttttgtttgttacaaattaacattacagctatacatttttgttacagcactggttagtccttactaaccatttcttgattgtattgagctatataagctcctttttcccatctgtaaaatcagttcaggataataaaatacctaaagctctgattttcctctatttttctctctattctttctcatatggtatcagaaga

SEQ ID NO: 300981 - DNA, 5234 bp, Cannabis indica
cacccaacaactttcccaacacatgctttgttaacaactacatcttagagagttatatcttcaaatagctctaacatttctatttcaagagcactatccctctgcagaacttgattcatgccttcatctatcacctctacttcaatatccttggtttccccactagccttcgccatgcccacgacaactcagagtacacttagcacaggagagaacactaagcacagggccgaagaaaatagagaaaaaaaactcacagtcactagaatagactagactctacacggggagccatttctagatagccatttaatctttttaataatatgttttgatgtactagcagagaacactaagcacagagccgaataaaatagagaaaaaaaactcacagtcactagaatttgcaagggtagttttgtttggtctatggattttaggcatgcaaagttcataattgttaaatttgcaggcgtagtttttttccattgtatttggttcctttttatagtgcaaatttgctcttccaatatagtattttcgtgtaccatttagtgggataaatggtagaaaaagctgagaaaaatggggaacaaaatgtctcgtcctggagtggctactggctgcgcgagttagggggcacatcgtgggtctcttttgttttggtggtctccacgcataaaatgaaaagctggagagatattgtttaagtaaattggatttgacttgggcttggtcttcatttggcccacttcacttcaaatacaatgttataaaaataacttcatattaaattcaattgaaacatacctaccttttaagtgtaatgtgcctaacataccctcaagatttaatctcttattaaatcctcaatttctcacccaccgagagagttcaacatctctatcatttccctgactcctctgccattgctagcattcgtccgcttctacctccgtctccgccacctccaccactgtcagagtccgtccgcctccacctcctccatcactaccatcaacactagacctcacaattgcaatctcaacagtgagaactttcaatatttcttatttttttattagttccatttttcggtctggtttctccctttaattttattttcttattctttgtactgattacgtccatatatataactttgtgtgtgtttgtggacatttcttttgtattttgtaagagttttttttttgaatcaatcattactttttcatgtaattggggtctcttttatatcactgtttgaattttatatataaaagtatatctaaaatgaaatgccttctaagtatttgtttaaatgcattctatctctcttaatatatatataaatcaaataaacagctaagggtaaaatttgggttttacttataatagtgggtataaattaaataatatataaggaaaggtaaaaataaaaggaggtaatgaaaagtgggtatggggtgcaatttggaggggtataaatgcattctatccccaatgttatctcatgcttggaaaatagctggcgacttagacaaaagttggagtagaattgataacatgaagtgatcatgttaggattttgggcattgcatctttttacaaaaaataccaactattgagttgggtttctaagccccaaacatactaatattttaccaacttaaatctgaaaaataacagaaaatcaaaataaattaaatattttcaactaaactaaattttatgtaatatttaatttataataatttaatatacataaataaagatttaaaatgtagaaatttgagccttaatcatacatctttgataatttgataagtattgagttcataactctagttgaagtgtgtgaaggaggattgtaaaagaattcctggtgtatatgatccagactccccagtgtgaggagtgtgaggaattattataactggtgttgtacgtcattgatgagcgtaattgagtttaaaactctttgtaatgtgctgaaagtcaataaagattcaatcattttgctgccattgatttcgagctaagcttctctgttcttgttttattttcttgtctgagtataattctttttgaatgttcgaaatcgtgaatcttatgagttgtattaattataacagcaagttcaaggtgaatctaattcacatcaatgcttctttttactaataagatgactggaattaattattacagctacggaattccatcttcttgcagatgattcgcattgaagaacccaagttaaagtgtttaaagtagcaaaattaagagccatttgattgggaagatgaatatccttgtataagagcacatcatgtaatttcaaagccctaaaatgcatcatctttccgcttcacctgcatggattgcctttgatcttctactcgctgaagctgtgacgataactgaagcaagttgattgtgaggctgtgtgcacaggaaatacgatacttggagttcggaaaatcagatccttggaacatcccattttcaaagttaacattgtccccaccatcagatatcataatggaagtcatgtgactcctactcatagaatttgttcccggagataggagcgtatttgagacacaacttgatgattctcccacaagtttttctgagacttgatccatgttatagcatgcatggctctcaggcttcactagaggacgaaccacggaacttccagagaagtggtttgaagagctctgaaattgagatgacagaagagagagagcacaaccagagtctgaagtccctgagaacccctgaatggttgtacctgtattaaaagtattgaagtctccacatcctaagatattcttgtggaagaaaggacgagaaccggaatttggacctcccaggtcatgtggatattgaatgttgttcttgctgaaaacatttgttgttacaacattggctccgcttgcatgaaaagaagggaattgctttccagaatcttgaggaaagagcgattttgagctgagatggacatttgtacctggtaccggagcagttgaaagaagccttaaatcagacccatcttcagcttttatacgccgagtccagtcgattgttccatatttctgaggactgtaaaaaccacttggtagtatgtcctggcatatgaaagaagcagtcccctgaagtctgctatctgcaaagaatgctgattattaacatatttagtagtaaagattgcagtatttacaatttcttcaaggcagataatacagcatttgttattaagaaaaagagacattgacatattatggtataagaaagaccaaacaagattacaaggcttcttataagaaagaccaaacaagaagtcaaggcttctaagttctaagttatacaataaatttaagcatactccaacagaactataagcgaaaataattgaatttgaccgaacaatagcaaaacagaagattaaaccttcaaccagatttaagaaaatgtgcactgcacaaacttttacatttgtagttatttgacaggaagctatgaactacaaatcaagccacgtgacaaccattcccaaaagaagcaaaaaagggagaggttagaaagagtagaaaatgaaaataaataataccattgtatgactgaagcattctcccagctctactagagtgaatacccacttgaggcttcctccgacgttcattatgtcctgcaagacgtttacgacagctgcgcttgccatcatcaaattcagccagcaaatggaatctggattgtcaataagtgagcacatcttaaaactgtgtcctagcaaactttacgtgactgaaatgaatttataaacgtccattctttaaattataggcttatcgcttcaagaaatatagttgaccacctttacagaacacattagtagtggccaattataagcaaaataatcaaacacttttaggctagagcaaagaatatacctactacattgctgacaaaacctctgttctataccattcacaattactttagcagttttggaatgaagctcacaaactttatgcctcttatggtagtctttggaagagctaaggtttttgttgcagccataaacttggcagaggccactctgggagttcgctgctgatagccgtaatcgtttcggaggtgtagatgactctgatgaagacaatccggccactactcccatagaaagttttgatttactggtgtctctgggatcgccaacatgtcccagtttcaaatcaatgagtgaagggtcccaactaccagaatccaaaatagagcttgaaatccttgagctggactcatcttctccagaaaatgcaactgccatcgctggatcattaagctttccaccacaaaccttaggatcacttaaaacatcaccaatagaattattggatacctgtttccccatcatttgtatgtattctccgaaaccttgattctcaatcccttgttgacatgacaataacaaattattaccataagtgcatggggtcttaaactcccaacccataactacatttttacttctagcaaaggaattaaaaggcgaaatggtttcctcagatgccaaccccttctcagttgacacaaagttccaaggctccattacaagcaacagaacaacaaacttccaacaaattttagaaacaccaaattcaaactataaaccaaattagcttcagttcttgtaatctatttgaaagatttatacctcttagaaacttcagcataaaataaaagctaaatattaggcctactaaagaataatcactagttctagacacaacctacagcccattacacaaacccacctccattaaagtcaatcccaaaacttgtaggtctccatcccatcccatcccatccctcccatgggggaataccgtttctgacaaaaataaaaaaaaaaaaacacgaaaaatacaggaaaaagaaaaaaatagataaaataaactaacaaaaataatatttgtttgaccgccatgctaatttagtgaaaatttatgaagaaacaagtacaaaaatagatcaatgtatatgagtgagcagaaggtcataagaagcaaattacagagttcatagatacaggaattccaagctactctttagtatgttgcttaattgggaaaaccaaagttccctatttaatggagtgtatcatagataccatattcatctacatgcgagtctagcacattcatctacatggagagagagagagagag

SEQ ID NO: 300982 - DNA, 1333 bp, Cannabis indica
actattgaaatctaaagtgagggttggaaccctcttcagtagaaaatctatagtataaaaccagttatttaaaaagttgtgggtatgcttcacgaagctaataggcaaaccaaagatttggagtacctctcaaaacagtaaaagccaaatttgtgcttatgcttctgcgcatcttctgaggttatttgatcttatagaagtacaaaattttctctaaagtgggaacctaaattttctttatctagcacaacacataccatcccgtgagcagcatgtacacttgagggatgaattgaaaatgtgctattcccccaactgtgtagaactccgcgaaatagctccttagttgaaggtgtgctcccatttctacatgggcccagctccatatgttgaagcctccttccgcataaatattggggaactctccctcgacggagaggctactctacaataatccatgagtattttgaaggtccccatttgtctcatatttccagagattacataattttggaacctgttctgatactgatccatctcccagtaagacaaattcaatattattaatggagctgcaacctccttagcagcaactttctcctcatctacttcaacctcttcatgatggtcaccttccgctatggtaaattcaaaaatccatagagtattttgaaggtccccatttgtctcatctttccaaagatttcataattctggaacctgttctgatactgatccatctccttgtaagacaaattcaatattattaatggagctgcaacctccttagcagcaactttctcctcatctacttcaacctcttcatgatggtcaccttccgctatggtaaattctaaaaaaaataagaggaaaaatgccaagcagttaaatatccatattaactatagcaagaatacgggagagtcctcctcgataactacttggagaggtcctcacgggaccctacatccacaatcaagactcgcaagaagtatccattttggatgatgagatgaggaacagtgaagactaatcgaaggaaagagaaaacatcatccagaaccaaattagttccaaatagaggaagaaatttttttccaacatttctgttgcaatgtgaatattttcccaaagaaattacacaagaaatctagttttcactagatatagaatatgttcattgcaatacccagaatatcctatttctaccatacaaacagatttagtcctaggtctatgtgtggggaatattttactaggatctaaattttctaacaagtatgtgttgggttttgtgccctaaataaaactctttacaatctgattagttatc

SEQ ID NO: 300983 - DNA, 2043 bp, Cannabis indica
atggtggagaggttggctgcgattggaccttgatggtggagagggctcgccacatctggactttgacagtgaaagagagctgagattggttcagcaagatgaaagagagaagggggagagagagtgattgagatttaatgagagattgagaggatgagaaaggatatatcaagagagtaggtggtgggttttttggagttgttggatcgacttgtggaagatagaaaaaaacgaagaaaaaattaaaaaccccagagaaaaaagattatgatttttaaataatgtatttatttatttttaatattttaataaattaaaattataatttggaccaataatgtttcgacatgtgatatttttgaataagtaaacacattcgttaaaataaggactaatagacttacaagaaacgtgactttagggattattgtcactatttctcgatgtcagaaactaatctgcatcaaaataaattttataaggacttttgctgtaaatttttcttttatatttgatgcacaaattccttacttttatcttttgattttagctaaatcatttcaaattgttaagattaaaaccaaaagataacgtccagaaagaagggaaaatgaatggatggagaatataagagagggaggggagagtaataacatttttatattgtttggtgtgaagaaaggggtaattgaaagataaataattactaattaataaaattactattttattcttataattattttctaataatatttattgagggtatttatgtaatttacaattattgaagagagagagttttaatcattctattattggagaaattttaaattagagattcgagtagatttgctattctctcacctctcatttatctcattcaattcttcttgccaaacaaaaagatttgttatctctttccacgtctctccatccacttttatctcttatcaaacatagtgtaaatatcattgagtacacttattcatattttattggaccacatgcaaaataatttaatttaattttgccttaggctctatataccctaagatcggtcctaaaggacggtgtgattgaataaggtggattggaatatatccatccatagcttatgtttgttcataggggtgttcatccaattcagttagcactattttgctcatagcgcattcgatccgcactaagtgcggatttcatattttggatccagtataatccgcataatggctcaaatccaattcaattaaatctgtaaaagtgcgaattggatcggttattttgaattagttacttttcaatattaaattatttaatatttattaaaaaaatatatatttttttacataagtaataataaaacaaaacaaattattattcttttattttccaacaacaaattaaaataaataaaataacaaattcattatttctataaagaaaatattaattttatttcaaattatattttctctatatataataataaaatataaatttaatctattaagttttgaaatatatttatatcatatgtatcagattcttaaattactattagtttttgcattaaatgttaatgcatatataaaatgttaaaaatatgtataatttataaatatgtgcgaattggatttgatcaattatttttgcatatcaatcaacatccaatctgcacaagttcaaaatttaaaattttcaatctaatccaatacgcacaagtacagatatttacactttgcgaattggatcgtgcagattggattagatcaagtattttatgaacaaacctaagccatatttcttaaaagttattttcttaagttatatgatacttaatacttaattataccaataataatatgataccaacaaaagtattaagtatcgccttttaacaattctcttttaaaaggatattggcggctaaaccacctgaactttacggtttgtaacatttaaccacaaaaaccgaattttttgcggctaaactacctaaacccccattccgttttgctctgcacacctccgtccaaaaat

SEQ ID NO: 300984 - DNA, 1771 bp, Cannabis indica
atttttgttattggacttaaatatatgcagatcaatttggcaacagacaaaagcaacattcagagataagtttggtgatgtccacacgagactgatgaagaagaattatgaggctgttccagactggtggttctacacactcttagctgtggttcttgcacttgctatgcttgcttgtgaaggctttggtagacaattgcagctcccttactggggtgtccttctagctattagcatggccctgattttcactctcccaattggggtcatcacagccactacaaatcaagtataataatctcatcattaatcaacatttttacccttcttattatttccctctaaaactaattttaatcaacaacactatcactgtgttgtaaatttcttttgcagcaaccaggactaaatgtaatcactgaactcatcattggttatatatatccaggaaaaccattagcaaatgttgcatttaagacctatggttacataagcatgactcaagcaataatgttcctttcggatttcaaattgggacactacatgaaaatccctcccaagtccatgttcctagttcaggtatacacatattccattcaataaaaacaaaacaaaataaaagaacaattaagatttaagatactaaatcgttaagagtctttgtttatgttgttaatgaagctagtgggaacaatagtagccacctcagtctacttcggcacagcatggtggctactcacatcagtagaaaatatttgccaaccctcaaagctaccagaaggaagcccatggacttgtccaggagatgacgttttctacaacgcctcgattatctggggcgttgtgggcccacgtcgaatgttcggcccattgggcttgtacccaaagatgaactacttcttccttattggagctctagctccggtgccggcatggctcctctcccgggcgtttccccaccagaaaatatggggtctgattcatatgcccattattcttagtggcgccggatcaatgccaccggcgagagccgtgaactacatatgctggggcgtggtgggggtgttcttcaactttgttgtttaccggcgattcaaagagtggtgggctcggcataactatatattgtcagctgggctggatgcgggagtggcattcatggcgattctgtgctattttactttgcagattaaggacataaatggaatgagatggtggggtttggatttggacgatcactgccctttggccagctgtcctacggcgccgggaatcaaagtcgatggttgccctgttttcagttgataaaagaataagataaaaaaaaaatgtaaatttgggctctgtgcattccaatgtgaccacgtggcattgttggattggtaagatatcgtgcaaagttgttgctcagtagtgttgcacgcactcagttcaacttcaaacccatatttgcacatttttgaaagttttaaaagatagttaaagcaaaagaaaatagttataaaaaattagataaaataataataataaatttcataattcactattttctttttaaatttttatatacttttacagtattttataaaaataatacaaaaaaataaacaaaataacataaaaataacaaataaaccatattcaaacgataacatacaaattataaaaatattaataataaattaataaaaaaataacataaaaatatataaaaaaccatattatttataaataaaatcataaaaataaaaatatttgaaattctatacaa

SEQ ID NO: 300985 - DNA, 2755 bp, Cannabis indica
ttctaaatattggggtccacaaatattaaatttcataaataattataaaataacagaaattagtgataattgccttttctaatccaaattactaaagcgctcattacagctctactcaagacaagaagatgtggagtgagcaggtgtggggaaggttcaatactcctaagcatagctttatttttggattgatgttcatgagaggttgagaacaaaggacaaattatacaaatatggaattataggggatccccagtgtgtattgtgcagcaaccatgaggaaacaaatgatcatttgtttttttggctatagcacacctatggtatgttttactaaaattgcaacatggatgcaatggagagccactgatataatactgcctcaaataacaagatggatacaacgagccaaagcaagaaaatttaagaaaaaaggtaatggctgctagtcttgctagccttgtgtataatctccggaaaaccaggaatgatgtaatatggcaaggaaaagatccaaacatgatacagttagttaatagaattaaagagaatgtgaagctgatgattgtattagtgtagcataggaaagttagccaaaaagatgaagagtggttaattctttgtaaattttgtgtatagaaaagagttaaaccatggctcacatgctatggtgctatagtttgtacaaattatagattatttgcaataaaatcatctgattcataaaaaaaaaaaacagttccatgcctagtaatctcctagacacttttcctaacagtcgcatgcaagaagaattcagaacgtagctcgaacaaattttctaccctagcataaaattgaaaagttcaacaagttcagaaacttacttgtactttgattcgaagaaatgagatggttgttgtggaaattttgaaagttgtgtgcctagctaatgactcagtcaaaacccacctgaacgttgaagtcctcgtctaactgggggtgagtcgtactgaggcctataggtgacgcgtctgggaaatttcacgcttaaatttgcagaagatggtttatgatggaaatgaaatcctcaaacattcattggtaaaaaaagggtgtgggttcgaagttcttctagtcttaaattttgagaggagaaactttagttcaaatttgaaagtgaaggaattcgaaaagattagaaatggtaaaaaaggaaaataatgggggtttcgtgcctatttataatggggtaggcgattcatatgatttaaaatcaaagtcctagatcaagtccggaaaaaagcacaaaatgatccaacggctgaggagttaacaaattcacatttaatgctccttagtagaattaatgcatgtaatcatcattattttcctcgggctccgtgtgcattaaagagtcttcacatcataactttgtcatcattttgcttctctatgataaacacgctaccttcaagtgtgtggtgttcgcagttcaaaggaaacatgacacatgtgcactaccagttgtttcccataaaatgtttttgatgcttttgcatttttgagatttgtccacgtgtcccaaagtgtaccttgataatcaggaaggagactgaaagcttccaccactcaagattctgaaagcttgggggtaaatgtcattcatgtttttggatgaaggacatgtggcaaaaggcagaaggtgacgatcctaacaactctcgattaagtccccttaattggagagagtcgtagaaggactaaactaacccgagagaagtccagatccaggttaagactgaagattcacacgaaggaaatttaccatccaggacccgaagaaggtcgcatcaactattcttacagggagacacctatgagccttacaaagagtttaagacagatgccaactgtacatgagaaacaggaggactgtcatgaagctagatttggatggctcttgtggcagccatacttttctgacacaggttcagatcttatcccctacgttaaaccatggtagtgcgcatacctcctctaaatacacctttctacctgacgactcctctaagggttttgtctactaggtgcagcctccacacgacacgcatcctgcgccaatagtggtcccgactatacagacccttcgccccatgaagaagagccttcttaggggctcaatagttagtatttttatgtattttactccaatagtgggtggactttttgtaaaaaatcctaggcaggtcacgggtatgcccatactcatactttagcctatataaacccctttatttcctcacaaaggggggatgaaaaaaatttacatagcgaaagctttgctaaatactctataagtgaaaaattatatacgcaagtatacgtagtcaaacaagtaataaaatgataagtaagattgtctccacagggattgcaaacaaagattgatgtaaaaccaactaattacaacttaaagcaagaggaaataacatgcaattggttaagtaatgattcaaaattaaaaatgacatgaattaaacttgctaaaactaatactactgctgctagaaaaattgtttgcaagatgaaaaatgtaaaatggcaaaaatggcttgaatagctaattccttctagtcaggtttttttcccaggtatcacaacatcggttcagcattactccagcattctgcacagagataacaaaaaaaattcctctaggcttgtgagaatttttcaacactcacaaatttaattctaccatttagctcaatat

SEQ ID NO: 300986 - DNA, 2209 bp, Cannabis indica
ttttgtctattttatctgttctattagagttttccatcttacatgaagttgtgttgtgctagagaatatttgaatactttcccaatcagtaatacaagtagttttgttcaagaaaaaaagacattgctaaatttcataaggttcactcgtctctgaaatccttcaaatggaatgcaaagaccagaaattttgatggggtttaatacaggggaatacatgttctgtaaactcattgataacttctgatagtgaatggtgcatcttttgtgctagaggccaaatttttttctcttataaaaactgatcaagaatattttacatattaattatctaaaaacaactgagactgaccacaggaaaactattttttcctgtgaacagaatgacaattgtcttataatcttttctttgccatttataattcaagagaaaaaaaaaattattctgtactggttttatgacataggcaactacaaatttgcttgggttgtaaatttcttaacatgaagttattctgtgctgggcaatatttgaatatttgtagtttagtttaaggccttatggcgcgaggagcattcttcatgctgatgaatttgtacaagggtcggtgttagggttagtgtcatcaattcctatcacgaggtctatatctcccccctgcaatgcactattggaaatgtgatgcctgcctctattagtttgattcctctaattgtcattagtattatagatagttgaagtatcataaaataagtctgttagggttatagatccattctagtaattacattttttcatttactttctccttttgcagcaagacagtgatcccagtgaccccactgttagtctggatttccgtacacagaggcagacggagtttctacttgaagcatttagacttcagcaacgtgcatctgaaaccgggcagaagctgatggcattgcaaaccgagattgggaagagctactatggagatgagatgggaagctatgcaaatatcaccacaaaacgatcattggattccattggaaacaacttgaaggagatccagaggaatttggaaatatggttggccagaatcattggagatcttaaaggcattctatccagagatggcgtgtctcgtgtaaaagagtattacctttctggatatccctttgtccagtagaagctaggtactgttattctcgtatctctatatatgttctgatttaaagccatgcatgcgaagttgtggttaaaatttgcctgtggaaatgaattaattccactttttgtttatgggcaggcatttgaatgtattggttgaattttaaaacgaaaattgtttatgacaaacatttaagaccaatcataggctcaggatctcatcgtcaggcaaaatatcgtttattctgtttggtaaaaggcctgcactgcacaaattggcattctagaaaatgtacataagaaaggcatttcctaacgaagtatttttgattgattagacaatatattgtggctattatttgcaaacggattgtatcttttgttgggaagatctagtgcaatctatgataatattttcctatgtcaaaaataagattattacaaaatactacaattagtaatattaaatattcattaaagcaccacaagtgccgcagctattggccgaagctatggcacttgttcgtgccctctttgattgcctcaggcttgctttgcaagcagttcggggcacaactgaagtgatctctgagtttggtgtgttgctgcaagatgtcttaccttaggctgtctttgagtgaaccttatgaaaattagcaatacctatttttcttgaaacaaaactacttgtattactgattggaaaaacattcaaatattatattaccttaggctgtttgagtcgtttaagctttctcattataatcagtaatgccactgcccatttgttatctgtattatggtggcattgggacttggattctctgtccaaaaatgctgtcgattttcttgtttagccaataaaagagcacatgtcattgttttttttttttgtaaagaattattgttcaattaagctgaaaaactggtgggaaccacagggggaattcccttcccttgatacacttcggcaatatcatcgctagaaaacttagctttctttgccgggtaaataccattttggaccctgtgttttgcaaaagttacagattggacc

SEQ ID NO: 300987 - DNA, 2799 bp, Cannabis indica
gaatttatacattaaacataatcatgaaataaatcatgtgaagcatgcaacataaatgcaatttctgattttttttattaattaataaatctgattatattaaaatgagttttatttaggacacaaaacccaacacaaaaatggctgtaaaattcattggcgctcatggaacttactttgtaaaactaaaggtgaaagatgtatgggttttcgttcttttatccattttaatcaagcccttttagcaaaataagcttggcgtctcgttgagaaactcaactccctccttgggaagttgcttaagagcagatactttcctcacaactcgttccttgaagcaaatattggtcattctccctctttaacatggcaaagaattcattggtgtaaagagcttttaatggaaggtttgagatggaaattaggtgagggaagatcaattaggtgcaactttgatccatggattccaggtcacactaattttctagctatttgttactctggtttgtcaaattgtgttgtggctaatttcataacacaagaaaggcaatgggatcttaccttgctgtagcaagtattttcccttcttgatgtggacagaatcttaacattaccccttagttatttcagcaataatgacacactaatttggcatcatcatacgttggggatttacactattcaaactggctaccacctggctacatctcttgaagaatctgatcaaagctcgagttctacttcagcctcctcatggtgaacattcttctgatcctttcaacttcctccaaaagtgaagatttttgcctggcgagtcatccatgatgcattacatgttgctacttcccttattcgaaggaaaatcatcactgattcgacatgttctgttgttgacaagcttgggaaacaattggtcatgctttctttagttgtaaatatgcaaagacagtttggagatctttaaatatggtcattgattggcaagcttgcttctcaatgcaaaaatgtggctatttattccatctaccatctatttactctaaggttgagatggaacaattttcttgcacactttggtcaatttggactgagagaaacaaagttgtacatggcaacatgctaaaccagttgaagctatcgcctcttttgatgctgcatatcttcaaaactatcgtgcaacaaaccagaaatatcaagctgttgcccctgttgctcatccacaaccaacattcggtgctacagctctagtcacttggaatccgcctgctgatggtttttttaaagctgaatgttgatgtggttgtcaatgtctcgacaaatattactggtgttggtgctgttgttagggacgcgaatggacatgtagttgctgctctctcaatgccaatacttggcaactatttgtctcacgaaatagaggctaaagcgcttttctttagcttaaattgggcccttcatcaacaatgaccaattaggcatgtggaaacagacgtactgatagtttcaaatgcattagagctccctcgaattcaatttcctcttttttaaacttgattgtagatgttattagtcttttgtcgtttttccttaatataaaatgttacttatgtcaagcgtactgctaataagacagttcactacttagttaaaattgtaaacgactctcttctggctaaatttataataataagtattttcactcaaaaaaaaaaatacccactatatgataaataatgaataatatcatttaaataaataattaataatataacaaggaaagtttaggaaatttcatttaaagaaaaaaagaaaaagaaaagaaaaatgtataaaattgaacttttcacaataataatgataaaagaagaatatgatgacacgtttaagagttggtcccatgattgggcagtcagaaagtagaaactgaaaattgtgtcatagttgtaaatattatagtaatactcatcgtcggacttcgagattcccctgtaccccactgtacacaatcacgccttctttcttttttgttataattcaaaattttaaaagatcagacgagggaaggaagagggtgagggagtcagttatcctcgtttctcgagccgataagcccgtgactagtgaaattcccattctatcctctactttcttcactaaactgcgggtactaatgtaattctattcaaataatatttttttttgatagagttgaaataataaattatataatttaatccgatactattcaagttcaaacttccatttttcgcaggccgagccggactaactaaattgacttttattttttttaaggaaaaaaaaaccaaatttcggttgatggctcgaattcaaaatcgatggctcgaaaacatagtaacattacaaataacacatttttttcttaaaatataatagcacaatttttaaataacaaaaatacattttttttttgacgtgacaaaaatacataaatttgagtgagagtaaattcttctactcttctattttttatttttatttttttattttttttttatttttttgaaccaaatgtcaaatgagaattctattaaaaggcaaaaaaccaaaaaccaaaagtttgatacaaaacagtcaagaattagagacaagctggtataccaaagccattaaatttgagaactgggccggagagtaggcgagctaggcatgcgcctcgggccccaaccgccaggggcagatgtacacatggggttatagtggccgtggcccccccttattttttacaaatcatacatagtaattgatatacaattacaa

SEQ ID NO: 300988 - DNA, 715 bp, Cannabis indica
ctctctctctctctcagatatctctcacaatttctcattttaacttctctctctactgtgttttgtctctcttattattgcctttattcttatcttgtgaaacgagaaaagtagttctctatatatagaccaagggacccaatatacttgcttccatatttgaaaattaagttagttaaagactaactaactgaatattggttgaggatttaaggaataatacaacacatataataatctattttaattttaatttttcatgattagaatgaatcatattttgatatttttaaagtgaattttctcacaaaagttgaaaacttttttctatttggttattttcattcctcacactttttattagtattcatcatttttgcagcctttcacaacaaactatttttttataatccaattttttcttatacgtaataataaaacttataatgtaattttaatattttaatagcgtgacaattctattctatatatatttgataaaatatatatatttttgttttatacaatatgaaaaattttaaaaggtaaaagtctactaaattttttataggcttacacttctagtttccattacatagtaatttttttcaactattaatattctatagctttattgtccaagaaataaggaattagtagttgtaaagactgcttacgattaacactttgggttaattaataactagggtttatt

SEQ ID NO: 300989 - DNA, 3494 bp, Cannabis indica
ataacatacaagattataatttctttttctagatagcaaaataaatatcgggtataattaaaaacaatggtattatattaaaatttttcaaatattgtaatgaaaccctaaaaaaaaaaaaagtgaagatgctgatacaattgtcataaagagatagagatattattcattgttgaactaaaaaaaaaaaaaaaaaaaaatcattttcttgttatattatatcctgttattgctaaaaaaaaaaaaaagaaagaaagaaagaaaaactctttttcttgttacatcatatcttggttattgtccagatttttgtaagcgtggcacactaagataatcttcagctaattagtgcctttggccccatcttttgcaagggacttctgcaaaagatacatccatcgcaaggcagggacacgtggagcgttagtgtgcatgacatctcttattcccgggagtgaaagaaaagcacactacggaagctgaggacttcctcggataagcctatgtgagttgcagaaagacttaggatgggttttatccccatatgatgtcgcggaagatctctgcccgtacctgtcaaagtacaaaagtgacaacaatattttttttttggtacaatatcaatttttgtctcccatgttaggccatagtacaaggcatgcacaccatcgttcctgcccatggtccaacgaccattatcaaggcgattcaaaaaggaaaggcctttgagtgacacgtatggaatgttcgaacggtacgagtcgtcatctctgcaaactgtatgatggagtagccacctaccaagtcaacggtccgatctcttatagtaaagttggccctgaaatcatgtggattaagaagtcacctataaatacccctatatttcatgagcaaggggacacaattttcaacctagagaacctctttaaaattcccataagcttcatctttttcaagaagaacaaggggaatatgtaggggtcaagtccagaatgtaaacacttgtaatattcagtactcgcatataagaccaataaaatagactcatggactaaggataattaatgtctgaactacataaaaattgtatgcctattatttactaatttatatcttgcttacgctctaattattcagtttccaaaaatttcggtaaacattttgagagccgaggaaagatctagactcacaccatggctgttgtcgtgagcttggcgaaaaaaaagagaaggtaaacatagacagtctcgaaccctgttgtcgtgagctagccctatttttgctcctaaattttcctcttcagatcttgctcccagaaccctgtgcattctggctatttggggatgttccgtatcagtgtttgcacctatgcgaacctattttcttgggtacagtgcgacacagtccaggcgaaaggtgccttttggatgagtcgaagctgaggttctagaacagggcctgtaaaattcttgggacataggggaagaggcaggccaaagacaaaaaaatggtttcagaaaggtccaaaaaagtatatgaactgaagatgcccacatggcgaaattgacttagagaaacaacaagaataccacgagaagtgggatgttcctcaaaagtgtggaaattttgaagagtgaggccaagacgtcggtcagagtaggatatttaggataacgggcccgtgttcctattttatagcctagatagggggtcactcccaaagagatatttattttaggaaattaggataccgtaaaaaccccatcaagagtaggtcattctcgagctctcggaacacatctccctgcatcctttacttcatcgaatcacgaaggagcaatgctgcatgctcttaaacctggagccctatatcctcctggactgttccaccacctgtagatggccaggtggtcataatcttggaaagaaatacacatttgagacggaccgagaattctcggaagtgatggtaaagaaaattgtatgaaaagaatgaagtgtccacccatttaacatccgtgagcaagaacttttccagttatcttcgtgaagggtacaaccttcgatggtaataagataagtgtctggaaggtccctcaagaccaaagtctatccgcatgagcattagacacgtttgccccatgtctggagctcactcagcatagagtagcttccaagaattaaggtacggggagtaagggtcattgcggacgcattcttagataaggagaaactttcagctgacaaggccattacactaaaagctatacctcaagaacgtgtctttctgagtaaattctaagctcgtagataagaaggaccgttccgcgccaattcaaaagtatgatccacatcgagattatgccaggattccataggcgttacttgtaggaatgatgcaccatttctggcatccatgtaagggtgtcccaggcagcaataaacacgtttatggaacccattttgccaactcccgctcaaaatcataataagcttcttgatagaagactccaacagagcacccatttggtgggcaacagacacaaagcagttatcccaattgaaaccatcattcactcacatagataaggcttttttgactcaactgggagctattcttcgtcccattgtgggtttaggcgaaggattttgggaatagttgtaagctcaactcgaaatgtacacaggcaagatggccaagtgcttttgaaagttaagagccatacatttttctcgaggagagtcttcctagctttgtaaaaactatgcacgaaaggtcactggggactcaatacatcttcaaccctccttcccggagggaatgattatttgaagtcttttgaacgcccactatggttttcacctttggtcttgaagtgaaatcgttgcttgaattttagtgtgacttcacccttgcttccgaaaagctaaagtccgtagaataatttaacatggttctcatgagcacgtgtatttctgccatgcatggaagaccgctgaaggttcgatacatcttcaaccttccttcccagaggtagaattacttaaagtctattgaacacacactatggttttcaccttcagtcttgaaaatgaaattgttccttgaattttagtgcgacttcagccttctttccaagaagccaaattctgcagcataattcaacaccgttttcacgagcacgtgtatttatattgtgtgtggaaggcccctaggggtttgatacgtcttcaaccgtccttcccagagggaaagattgcttgaagaaaattaaactcccaccatggttttcacatttggtcttgaatgttcaatcgttgcttgaatttttaaagcgactttgaccttccttccgggaagccaaaatttgtagcataattcaacatggttcccacgtagcacgtgtatttctattgtgcgtggaagaccgctggggttcggatacatctccaaccttctttcctagaggaaggattgcttgaagtctattgaa

SEQ ID NO: 300990 - DNA, 2240 bp, Cannabis indica
ctaaaaacaaataaaaaattaataacatgcacacaaattactcttgtcctttagttatactattatattatagaattcattggaaaataggcgttaaattaataaaggaaaaaagaaatgcagctgtattcatgatttgggattgggtaatggcttgttttgacatttacacgttcccacttccaaattggaaagagaactgtttaaaccggttgactctgcttagggctagtgggcccaaactctatactatttcattattcctcttattcttttttaatttaatttaatttaataaataaagtatatttattctctcttttttttttttcctttttttattttttttttgctggaagagagctgagcaaaatgatgttgttattgttttgttctgtaactcttagacgatacacagattcctcttacatttcagattatgctctctgatcgaaaattaaattagaagaaggacgaaattgaggccttaaggagaatctgagggtccggagccgaagcccggaccccttcgccaacgccgccgttgccgtcgttgatcttagtttttttttattattattatttcgactgtgtagcgatttaatcgaaagttgagcagttttttcgtttgaaaaagaaacggcaatctgattaactctttagtttgagtttgggttttggatttgattgatgggttcgaagccgtggctgcacccggctccgacctatcgtcccctcgagacttactgggataccgatgaagatgcccctggtcctcgctgtggtcatactttgaccgccgttgccgctacgaagactcatggccctcgattgattctatttggtaggcgccaccgctattgaaggcggtgccgcctcgtctgcgcctggcatcagtataattctttcttactacctcttagttacacttgcttcactctttgcttttttttaattgaatcgattgttggaagaagtaaattaaaaattaatgaattgtgcttcgtttttgtaatgtagggttagcgggtgtgacgaattcggttcatgcttatgacgttttaaccaggaagtggataaggtaagttgggaatccaatctattatgtttctcttttgagtaactgattcgtgtatggagcaggatattgttaatcactgtggtgagtttaattttggaatatgcagagttaggcctgccggggacccaccctctccgagagcagcgcacgctgcagctgcagtgggcaccatggttgtctttcaggtgcttcaagcagtgtaatttaagagattaataaagaaaaagaaatacttttattaggggatttgtttcggtgtctatggatgttaacttgatttttgaattcatcttgtatggctagggtggcattggtcctgcagggcattctacagatgatctctatgtgcttgatttgactaacgataaattcaagtggcacaggtgatattaggcagctagaatcaacttcttttcttcactttttttttcttccctagtgtgattgtagtttataaaaatcaagatttatggttttattaatgtgattgtagagtggtcgttcaagggcaagggccgggtcctcgttacgggcatgttatggacttggttgctcaaagataccttgttactgttagtggcaatgatggtgagggcatttccatgttggatgacattaagattcaagattttatttttattgaaaatcataattgtggactttctttagtgttgttagactccttttcactaggataattgctaaaaggcacccgtggtacttagtactgtctttggtgtcataccgcgtttggtgtaattaaataccgagtcccatataacttaagaaaataacttttagggaatatcactaactaatcgtaaaacgccacctatagaaggtactaggccctattagtgcccaataacaatgctctttcactagcttatgtttagtaggtagtgtatatattcttctttgtatgtaatgaatttgttgttgacaatactaccaaagtatagagtaattagagtagaagcttacatattttcagtctaatggctgtcttagatggtcggtttggaagtcttcattgtacaacaggtacttagtttatactttattgcctttagtatttttgcttaaattagtattgcatagatttctggctggctgtaattgagcccaatgaagctagggaaaaagaaagaaagagttt

SEQ ID NO: 300991 - DNA, 2137 bp, Cannabis indica
ggtgcagaaaccacattgtacataacaaatctgttcagagagattgaaaagttggtttaaggttgacatgttgaatggggattttgtttttgtgattaggcttgtgttgtagaaggaagaaaggtttgaataagtctttaaagggaagatggtatttataaatattgagagttgaaaccaatcttattaaatggaaatcgaatttctgataaagtaaaattatgaaacaacactcacaacaattttttagtctaaacttctacttttgaggttaggctgccttctatgtcagtaagtaaaacaatcaaatggtgcttgtttgcttcatatgtaattgtctctctttaattgactctctctcatatttttgagccctttttttatgttgcatgaaagtgaaagtgcagaaattttgtcatttggggattgagggcatgattctagaagggtgcatgaaaagggtaaagaggcatcttagaatttgtttttcttgaaacagagtttgtaaaattgacatcatagtgattcacctcatttttctgagctatctttgtttagtaaaacttcctcctattacctttcattttaactcactctcatttcatccatgtgctttcaggtcagttcaaggccaagctgtctctctcttataatatagctcaggctcaaggtccccccacttagacatatgtatcaaaaatggaagtaaagctttgtaatcagtataatcactaaggacagttttaactaatataatttgacccattaagatcttcattcttttttcttagtgaaacatgttgaataacacttgtgaaaatatgatatttctttttaactcttaataaccaagaaacaaacaagaactaagcaagatgtaaagtaatgcacctcccaatgcattgttttgcagaacaattaatagtattggtttgtgtgaggtaagacaatattaaatttcatatgaagacgttggaatccaaagatagtgacaaggtttggaattggatgagtaagaaaattagtgtaatgcatttatttcactctacattggatggttgttgttgttcattaaagttagatcaaagtttgactgaatatgatactggttttgttatctatatactagaaagaatttccaggctcaatctttaccaattcaaataagactgcatgtgctacaatagaaatagataagcaaatagggtagtatactatcttttttaaaaaaatataattattttatggtttttagattgaacaaccattttaaattgtggacaatgccatattatttttttttaattattattattgtgattttgatatcaattatcaaatatatttttcatggaattaatgattttgtcgagatacctgaggttctgtggtgtagtgataggaatgtttttactaatatattttcttacctagtatggaattcgaattccattacaatctctcataggaggtttatgcttaacactatggagaattaacttgttgtggtagtgtcatctttaatgggatgagaatctttaaagtatatactgatgacccaattaaaaaaatgaatgaactataagagtactataattggcatgtgattctcgagattatttaagctatcgataaaatggagaaaaaatctagcaccacgtaatcctttattttatcaaaaaaataaaagaatacagaaattaaaaaagttgaaagactaaaaaaattagtagatataatataatatgactaatagttattattagtattttttataaaaataaaaatgtttacctcttgaactatgatttttagagttttatttcctaattttttttccaattgcaaaaatttccctaaaactacacaaaacattacaaatatcccctttcaattactatatagtcatgagttacatgtttaagctacttaaaatctaatttattgacattaaacatacaaataataacttaaaaaataatacatacataatctcataatttattattagacaacaagtagacattgtattgattttataatttaaagagaatcaatatcaatatatatatataaaggaaagcattagggagttgaggtggcaatctatatgtgttttctatcctactctttattt

SEQ ID NO: 300992 - DNA, 5383 bp, Cannabis indica
ctgaatgcctatgttgctcccagttgcagggaggacaataactctatctggtgcagcttccacaactcgactgcaacgagtaatagagcatggcacaacaaataatcactaatccaattcgcttgagcataaatctgaagcaaacatttcttttaatagtccatttctattggcactgtttgctaatttatttatgttgctaatacatttgtagattgctagcataattgcatgaaataagcattgatgatttagaaccattgtcttcatccattatttttatattttcgctcacccatttcttcatttctagtctttcttcactttttcttttgtctaattaactctatttccttttttgtctttctattcgtaagtttgttatgacatgtatctgtgtcattgtcaaagaagacagacttaagttctagcacatcaaaaaattgttacctgtatagaggaaacttgcaaccgcctcttagtatgaaatcctgaaatttaattttggtaaagaaaaattcaccatgaagcaaacaaattcaaagttaatctaaaattggaagtatgatcaccatcaagaataagaggtttcatctaaatcaaaaataaggctacaaatcaaaacggccgaaaatacatgttgagacataagacagcaagagtgcacgacaaaaattaccataaaactaacatcgtacatctttatgtgtgcgagatttaggttttatggtattttcagcaacaatatctgatcaaatgcagataaacctttcttgaagaagtgggattatctttccttggagttagttttgtaaatgttaaagtggagttctgaaggagaaatattgacctgggtaaagatagccttggcttgtgagacatgcaatcgacttgcaatttcctttggagcaaagctgtcagctattgatacaacaacaagacctgaaagtatgattgctaagtaaattataactgcattagctgtcattggcatgtccattgcaattgcatcacccttggaaaacatggcatccagcgacttagcaaccgagctgtgaataatgttgttgaaacatcaacaaacttatgagtgattagaacataagccaaggtaaagatagtgagagcatacattacttgctcccgaagttgctttagtgtaatcaagtttacactagaatcatcagaaccttcatctctccatacaatagccaaactatcatcatctttccttggatatgaagtgggcaacaaacaacattcagcaatgttcaaaactgcacccggaagccatgatccgccatgctttgacttatcagatttgtctagaatgcattttggttcttcttggaatgataccgaaagctcttttagggcaatcgaccaataaacctaccaaacatgtaacatgttaggacaacaagactatgatatctcaacataaggttagaagaataaccaaaaacttggattttacctcagggtgctcaacagagaacttctgaaagaggctataacttgttataggatccttatataaagggccaagaaggcttggaccgtgcttctccatgagacgtcccaagtttgtatctttagagtgataccttgcaagtagacaacactaaagtcacttgaaaagttaagtaaaagtacaaacaataaaatatatccactcagaaaattgtaagtacaatagatcaacacaacctattgatattaacaaatttgaaaggaaacattataaattcaactttttttgccctttttaccttcaattatacacagtgatatgtcccattcatagagcaagttccactctgcctacgtttttgttccaaaatacttgaaattttgttatgatattcaccttaatcaagcttgaacaaagagatatacatactgatatacatttagctcgatcacttgattccatggtgatgcaacaacaacacattagataaattagcagtttaagtcaaagagaaattacaaagaaggaaaccaataaggtggagggcctttggaggagacatcccaatgagcataaacagagtagtaaaccagctgatgtagcccatgtgggtgccaaggcttgagcactctccgagccaccaggtgcctccagacctcacttgggtcggaccctttggtgcagctgagtgagtctttaaggaccctttggaagccagtggcttcctcagtggttagaccagcctgaaccaagtcgtccactcctacctcacttatgctcttacttcccatttctcttgtttgatgatcaaataaacacagttgagttgagttgagttttactatgttaaatataaggaatttgttttgcttgttgtgctgtcaaagttaggcggtaattggacaaagctggaggcataatttaggagtttgcgaaaaactagaagcataacttaggttgggatatgttttttcttttttttttggaaggtgggcatatgtaaaatttcaaacaaacttgaaaagaatacaatatattaaaaattaataaataaataaaagttttgaacaatttcataattattttaaaaaaaaaatgtatcacaatataaaatgagcattgctattaggcggtacttcatgtacctaataccgtactaatgtgacgcattatgaataattaacaatttatatattatttattaaattaaaaaaagagattcgatattaaattgcacctgtaataattttgtagatttctggtaatagaaacagattgttataactggttccaagtttcttggacagttagttatttttgttatgttcacactctctagaggggtagttaagtttgttactctttctgctttttgttgtgatgtaagcctatatataaagacatgttagctattactcattgtgacatagagaagtaattagtctggttagagagtgaagaaacagagtggaagagagtgaggagtactgttcaagctgtgttcttggagtactcgagtgagagagttgggtttctcttgtatttctctgaagctgtgttcataccagtatgattgtaacattgatcatggaatgaatgaaatgaatacctaaaggggtagcaggaagtaggtaactgttcttggccgaagctggataaaaactctgttcttttctctttgctttaaacttcatgttttttgttaattattaatgtgatgttttatcgaattgtttgttgttgaattacaacactggtatcagagcttcggatttgtaggaagaagaagaagtcttcaaattcaacagctgaagaacatcaaagattcaagaactcaagaaacagacagcaatggcttcatcataacaagatttgatctggagaggttcgatggtactggagatttcagtttatggaaggaaaagatgatggccattttaatctaccgaaaattagatgcagagctcttgaagattgatcggagaaaagtgataaaactgaaaaactagaaaagggaactgatggttccaagaaagaagatgttgaaactataatgaagcaagcaaggtcagcaatcatcatgaacatggctgacaatgtactgagacaagtcattggagagaaaatagctcttggaatctggacaaaattaaatcatctctacatggccaagtctactgcaaccaagattttcttgaaagggaggttctatggctttaaaatgaatgttgttaattctttagaacaaaatcttgatgaattaaataaaattattttgtctcttactaacatgggtgaaacaattaaggaagaagaccaagctgtgattctgttaaatggtcttcctgatcaactcaaagagatgaggactgtaataatgtacaatcgagacactctaactctggaagatgtcatgagtactctcaggtttagagatgcagaactgaattggcaaaaggctggcagacaagaatcaagacaggatgaaagtctatttgctcgaggaagaaatctaagaaggaataagtcaaggttcagaggaaattcaagataaaaatccaggcctaaagaaactaggaaatgtcatcattttgcaaagttggacatctaatcaagaactgttgggagatcaagaacaagaaaaagaagcacaaagacgaagaagaaaagtcaaatgactctaatgcagtggtagatgatgcatactcagatggtgatctttttgctgtaatgaatgattgttgtgcaagccagacagatggagatgtctgcaataacctacaactagaaaaactatgatgaatggatcttggatagtggctgcacttaccgtatgagtcctaacagagattggtttactgattatgaggagataaatagaggaaatgtggtcatgggaaatgatcacaagtgccaagtaacaggcattggatctattgctattagaagctttgatggaactataataacccttattaaagtcaggcacataccaaatttaaaaaaaaaaactgatattccttggcactcttgatgatgagggatgtgaatacaagacaagcaatggagtcatgagaatcaccaaaggatttatgctggtattgaaaggcactaagaggcatggcttgtatttctaaatggccaaacagtcatgcctgcttatgcagcatctataaacaaatgtgtatcagaaactcagttatagcatgctcgaatggggcacattggtgaacaaggattagtggaactatcaaagcaaggtttaataaacaattatactcatgcaaacttatcattttgtgaaatttatgtgcagggaaagcaacacagaatcaaattatcaaacaacagttacagagccaagagtgtgcttgaataatcaaatctctcaaactttgaagagaccctatctcatgcccacaattgtcttagtcgagatcaccaaacttcacacacgatctaacgtccaatgaattaactgtttgcttctggggtttcgtatattatctatcagcttgcaagagaatgtttattggcaaacatgatcggtatgatatatattaggtagaaattattggctaatattatcttcttatttatgcatatagaaatatatatatagattgtgatatgacctaactattattaataggataagagatttatatatagtttgtcttatttatcttagtcttttacaaattgtttaatatgtactttgtaattttgtaaaaaatattatttaacaattttatttgattaattaagtctgagttttatttttaattcaaagctctatctttattgtaaagtaattcatgttgttttttatcggaaaaagatttgaagagttgttttgtgggaaaggatctataccacaagttttgtaccatgaaaggtatgctctta

SEQ ID NO: 300993 - DNA, 825 bp, Cannabis indica
ttttaattatttttttaatataatgagttttagtttttgttttctttattagtttttttattttgtattataaagtaaataaaaatttatatgtttgtaaactaaaagttaaatgattttacgctcaaaaaaaagttaaatgattttggttataataaaagtatttttgaccaaagtcagatttatataagcctgtctttgattttccagaaaaactataaatattaatgatttaattctacaaaatagggttctaaataagcaatgtattggcaaaacacgtctgaaggagtaaacatttttatttttatttaaaattttctgagttgtggttcatagaaagtattttgaacagaaacttatacctctgttttgcggtagaattttactttgttttaattaattagttagaagtttagtgttgcattccatatagtgcgttagtgttagttacggatttcggtaatagaagtgaaaagcctaacacaaattaactttgtaagatatattaagaaatctgattcaatttttttttcatgaaagatcaccatttatttatatttgatactctataaaaataaaaataaaatactaaaggacacttactattataacgtgtaacaatattgtgtaatttaatattatgacccacatttaaattttaataaaaactataaaaaactattaatcaataataagatgtcatctcatagtattgtagatattgtcctatataaaattgttgtccctaccggacagggacacgtggatcagaacgtcttaatgcttatattatttgctaaagtctttgtgatataaggcagc

SEQ ID NO: 300994 - DNA, 2891 bp, Cannabis indica
atgggaattaaacttttgaacatataatcatgattatattccactgtgttgatgacactataatcatgaacaaatatatacatatttatatatatgttctggacttaatagaatttatacattatgtataatcatgaaataaatcatgtgaaccatgcaacataaaatgcgattcctgatcttttattaattagtaaatctaattatattaaaatgaattttatttagggcacaaaacccaacacttgggtggtggcagatggtggagaattgtgagaggagcagtctccccctcctaaatgacggttgggtaactccacagccaaaggaataggtgtccaacaaggggaagatggctcgggtgaaaatgctctccaagtgagcgagcttccccactatgtcaatgtaaagtcgctagaggttgagaaggcgagcatctgtgttggcatgcccttgaccctccaaaaactctatctcgtctttgagcctggacaaacgttcttggaactcaaaattattccaagcattttttatgctcgagcgttgattggtaatatcgcacccaagggtcgggaacatccccgtccgagtcaaacgaaagttcaatgaaaggaaccccctcaagaacaaaaggtgatttatagttttccataagtgaagaaggaaagagcactctaaaggggtacaaacaactagcaagactcaaacaaaaactattataagataaagaagcacccacaagcataatagaatcacaaatataaaagacaaagtaatgtgtatggagggagaaggtacctgtcgagataagcattagtaaggataggtcagcaacgtcaaaactcatgggaggagcaagtgttgagagtcgtaaggcgcaagtaaaacttagaggaagtgaagagctaagaaagaaagtgaatgtagtaaaatgaagatggagtaaaattatgaaagggtggaaggctatttataaggggaggagctgatttaacattgtaggatcgagatgagatcaacggttgaggttaaacacatgtatttgtaaggaatcacatgtgcccacctacctcattgaatggtctcatcaatattgtggtgcgctattctaagtgtaataccaggtgaggtacactgtaaagacggggaaagcagttcaagtacagtcaaaaaggccacttgaaagtgctcgtttggactgggggaagtgtcaaccacgaagatctaaaagtgagtattcttacaaaaagcaaatggaaggataaataacttaagatgcccaatacaagcaaaagaggacaaaagatggccctctcctcttctatcctcaaatctccttttgtcacatcgggctatttcttggtacttgcaaatccacacgcccgcgcccgcacgcccacagccctgtgcccgagcgcccacaaccccgcacctgcacgctgcagccccgcgcccgtgtctctcgcccgtgcaccctgtagccctgcgcctgcgtgcccgcagcctcgcaccgtgctcactcccccgaactcggcctcttacatctcgtcgatcttcttttccctcctaacactagtagtctaagtaagaaaatattagacgagataacaacggcacaatgagtatagataatagggataaagttcatttcgtctgaggtacaaaaagaaaagggatattttttgtgtaacttaggatttcaagtgtgtcagatcacataggatacaatattatcatggatgaaagtgactttagatagtatgtaatggggactgatgagggtgtaaagtaaaaaggccacactataaatatggcccttgagttcattgtagagggagattttcttttaaatgaatgaaatagtaacgtcgtgagatagaaaaagtgtatgagattcctattctaaacattaagttttcttttaaaagtaacttgagttttaactgttatgttaacagtactaaaacaagattccagttacccatcatagtgtaggtagttatgccatttattttatattttcataacaaagttgagtgggaaaatcaaaagcacccaaaaatctatctcttgaaatattataacaaagaagagtcaaaaaattattagactccaaagatattagttaagtagttataattagttggacacgtgtccttgctgttagtatgttagttacattcggttatactattatatcaggagcttagctctatattaatgagaataaacattactcagtttactattctctctactaatacggtatcagtttgatcatatgctttgattttcttcttctccaatcatctcaagatcgacttcttcttcatgcaccaatagccaaacatcatactcagagctctacaaatgatgagaatggcgatacttcatcagatcccattccaaatcctgagattacctcagcttcaattcaacaagcagccatagaaacaagaaatctacttgctcatgaggacttatccagtccctattttttaagcacatgatatcattcaggtctcatacttgtttctgctcctctaacatgacctaattttcagtcctagctagtgtcgagctattactatagcttttcctgccaaaaacaaaactgcatttcttgatgacagtcttccaaaaccaatcccttgagatgttataattttcatttaacgtgtatataaagtaatgctttattcattgtgaggctccttcataacttttaagtgccactttatttttcaatttcacggatagattagtactaaaacaagattccctttacacataatagtgtttgtttaggtagttatgccatttatcttatattctcataacaaagttgtatatctttatatattaaaagtgcctatctaacggcatttctt

SEQ ID NO: 300995 - DNA, 6224 bp, Cannabis indica
gagagagagagagagagattggtatacattagtatgcatatagtgaaaaaatcttagttggctgaggttatttcatttcccgggtataagatatttcatataaatatataatataaagaaattgcttcgttaacagtctatagtaccctatatattccgcttaatatgtttttatttgaattagtagttatgcttaaaaaaggttaatttttttttttgatggtgaaagagtggttgaatttatgatatcaacataatacaagttagcttttgataacagattatttttttttcctgaaaaatgatttttactattcaggctcgctttttcttatataatgaattgaccaattggatcatcgaactgatctctctctttgatatataatcactttagagcattctatagggagttcgtttgtattaacacgtcatttaattttattttcgacaaaaaagtctgtcgtttcatggtttgtgtttaacttttttatttcagaattttttttcccacttttagctatgtttttttgtccttaagtctgattaagaagtttaggctgagaagttctaattatttgttatgtatatgtgaagagattgtcatagtagcattggaagctagagaggtctgccagccagccactgttttacttactctgttaaaattcacagcacccattattgataggaatgtttatcagaaaattatgctactgtgtcattttgctaagattgacagggtccgttatttataagaatgctgctgcatatttttaattaaatttatagtttgttatagttatatttttattttatttttcctaatttttttgtaaaataatctaaataaacaattttaattaataaaaactcttaaatatagatatggatgaaaacaatgaacacaaaggtacaaaaattaattgttaaaaaaaattacaaaaattaagatctaaaagacaacttggaaaggagcataatcacaatcacgtatgacgctgccaaatgatggattatctctagccaacttgccaaaacaagtcttttttaagccaagcacctttacttatgtccttttccttttagttctttttccacgtaatgggatgggatccctttgttctcttggttaattttgttcctccaaaatttcagccacgatagacattatcctgctccaaatttgagccacaaaatctactatccataccccttatcatactaatcatatcatatttccccatccaacacataatagcccatatatacatatactttcattgagctacctagacacggtctccttcctctccactacatgacatcatatatgagtcaaaaaaaaaaagataactcccctttcaagtcatccatttttggaaaaggaatcggtaagaaacttctaattgaatcgatacaataaatggataactttgctttggattttgattggtacacgttttcattctgatatatctgtttaatctttaaccactttctttcattatagctacccgagtagaaaatgtccttggcccttttctgttatttcccatgttatggaaagtgtgtaggtatatggtacaaaagaacatactacgataatgacattgatcatcttgtcattatctaaaggaccacaatcattatatcgagtggactaccatccctactcagtatgcaattacagttcagatgagctcatattagtcacatatatgtttaaatatgatatgataacaaagacagaaacttacaactaccagaaatgcctttcctatcaactctccaccacaaggaagaagctatattcagtcatattgtccaccctttgattcagataagccattttcaataatcccaaatgaactcttcccctccatatttggagggtaaagaaattaaaaaaaaatatactctaaacttgtatccgtaattaaaagaaaagacacaattcattcatgattgaacaatgcttttgcaaactaaatatgacataaaggataaaatgctatcatgccaacttgcctgaaaaggcaaaaatggaaagcaactgggagcaaaaggcctcccttatacatgtcgaaacaagataagaacttacctgctcaaactaattatttttcaataatcataaatgattgactgagaaacacaataagacgaactccgttcttactatatattggagttccttacaaaaactattcatcttaggattgaccagcttactctttgccatcagcagcacgaagcgagccaagttgaaccggggcttgggttcccaccacctttgatgacccataaatagataggtcaataccttgtgttttctctttctcaatttgttctttgatccagaagtatgtgattctcaacccatcctgaagagaaaagatgtgtcaatttagcattaacttttcattctcaaagcaatctcagctttaaatatataattggagttacaaaggaaatgaagtaataagaaagttaccttcaaccgcatggaaggagcccaaccaagtttctctttaatcagtgtgttgtctgagttacgaccacggacaccctcaggaccagggatgtggtggatagggagtttcttgtcctcaaagctaagaacaatctcggccatctcattcatgctaaccatttcatcacttccaatgttcactggctcgcggaagtcagacttcgtcaacctaaaatacaggaattattagcacaatgataaatcaagaggaactttcaaaatgaagccaaaataatgggagatgcaaaatatattatatgatttgtgtaatatcttccgtaaaagaaaaaaccgcacccaaatgatacatgtagagacccatctctttttaaattctaagaggtcttgattaaaggtcaataaagttaaacagagataccagcagccagcacaaaatcagtaactgcttaccggagaactccttcaacgcattcgtcaatgaaagtgaaagatcgggtctgaagtccatctccccacatctcaaacttgtcgacagcagtgagggcctttctgcaaaaagcggcaggagccttttcccttccacctacatgacaaacatatcaaaaattaatcaatgatatttgactgaaatgaggatttgtgcagtcatatttcttatttgtatcaatcaagagcttacctttccatgttccaaaggggccataaatgttatggaatcttccaactcggcactcaattccgaaatctttggtgtagtgcttacataactcctcagtggcaagcttctctaacccataagcatcttgaggctaatatcatatgcagaaagttgtttcatcagatacattcacacaagttaaaattctaatacaaactactcatgactttaatgatcagtaatagctacaaacctcagcaggccaggcatcagcttctttcaagctcacattagtttccagctgcttgaactcagggtaaatacaagcactagaggcatagaaaaacctgcattgaaacaaataccaaatactcaaacttagaaacaacaacatgagagtatcctttaaactttaaagactaaacagtgtgaggttcccattccaagagaaaatgtagacaacccaactcaatagtaaaaagaaacagaataattcttttgttaaaccataaagcggtacagaaattttaacagcaaaagatatcattgatcaaagaaaacaaaccttttaacaccgctgatcctggcagcttcaagcatgttgaaactgatcattgtgttgttatacatgatgacagagtgattggactggatgaaacccatcccacccatatcagcagcaaggttaaagacatggtcaacatctttagtaaccttcaagcaattttccatcacccttaggtcaacaaggtggaattcatggcagaacatgtcttctgtcatatgctcattcttcttccaatcagaggcaataatgtaatgcccttcgctcttcaaacgtctagcaatgtgtgatgcaataaagccacctgccccggtaatggaaatgcggagcttctccgatggccagtaaggctctctctcaagactctcataagtgtaagcaccatagctggttccatcagtactccccattctgcaataatattaacttatcagaaattgttccatgagtcaaattttacagatttacaaatgggccaagagaaaaatactcctctaatataagacatattacaattgagagaatatctatcataaaaaagaatattactaacaaaaggaatccaaatacataaccaacattttggtaaaagtacaaaccaaaagacatcaagaatggtaaccgacacaagtaccaactcagcaacgacacttctactatatcaaaatactagccatccaattgcaatcgtaatctgaattttttgcgctgaagtaataatatgcacttttccccctatctaaaaaggagcaaagtcattaactaccagtaagcatgccttaaaacatatagggattagttaaaatccaaacaataacataaagatacagtttatacttaaaattagtcagaaaatgatgttaacttagaagaaaaatgttcatgtgtacaaccccagaagcaaaagtaatcaaatcaagcccaaaaaggagagaaacaacattcagaaggtctctcaaaaccaaaaacccacctaaaactgcatcaataataaagttttatctgataatctgaacaaaaacgtgataaaaaacacaaactgaacttaactaagaagatactttcgaagaaattagttcaaatgtataggatctataatgggaaacgcaaacaattaaaagaaggaaagaacaaaacaacatttgtttacctatataaacacaaaactattactgaaaactataagaaccgaagaataggaatgtaagatttgaggaaaacgcagaagacccagttggggattttacctgtaaatcgttaaagttggaaactttcaaggagttcgtaggctgagaagaagatattggggagaggcaaagtgtttcagggtatgattctgaacctccaatgacactactatatataggccttgagaaagaacaaataaacaagaccactcatttataattcatttcatcccagaaatattaataataggattttcaataatttagagagagaacataagggagacagtacggagtacccgctcgttaaattgttttttccatttttttttactaaaaactgttcaaatttgtgattttaattttattttttggacagaaattgctgatgttatgtgattgatcacttttttggtggggtacatacaaaagagaacctagtgagcaaaatttagttggccatttttctaaggaattatattatttagagctatttttaatatttgaaaagaatctttgaagaaatattccctttttctcttaaacatgaaaattatgtttaaagttaaaaatcaaaacttttttgaagagaattaaaaatcaaatttaaggtttgattgtttatatttacgaatttggaaatattaatatgtgaggcacttgattgataacctatttttaaatggattatttgataaatatataaaaatggcacaaattttacatttttatgaatacgctatttttttatatttttatggattattttttttttacaaaaatactaagtgttgtttttccgttgttttagaaaaaaaaaaatagtattttaacgttgttgctatgaaaaagtaacatcatttgtttttacaactatacgaagtgttgtttttttttattaaatcaggacaatattattttaacgttgttactacgtgaaagtaacggtaaaaaaaaataagcgaaaatctataaaaagaagaaatctgtaatatgtaaataaaaacatatgtaaaaatataaagaaaaacatccgtaaagttataaaaaaattaattttaagtatattatgtaaatttttatttttaaaattagtacaaaaaaattaacattaaactcttattaactgtatctaaagtatattatataaagtttatttttaagtgtaagaagtccagttttaagtgtattatataaaaggaattatttcacaaaaacataaaaacaacaaaaaatttacaaaaatacggttttacggaattttaaacatttttactagggttgtacatcggtcggtttgggcggtttatcatatat

SEQ ID NO: 300996 - DNA, 3816 bp, Cannabis indica
gactaaaaattatatttaatcataaaaatgttatgataactaaaaaattattactaaaagtagctattttttttttatcgaacactactgatgcatgcctaataataatactcttaaaatataatatataattaatactcaagtaaggatagtaattataacacaactagtacttctaccacaagagtggaggtagctagaaagtgagcactatttttccaacactataattttctctaaaatttacaaatagttataaataattataaaagtatattattataattgaatattattatctgatattagtggtgtttagaattttttataagtgacgttttataattggttaataatattatctaaaaattattttattaaagtatataagactcaatatatatttaaatacaccaataacgttataataccgaaaaaagtagtgttagtcaccaataatacattttaacatttctcattataactaggataaaaaagtatcttaaatgttaaaaaccaaagcaaccgaaatgcactagagacttattactctttatagtattattttgacagaacatgaactaatatataattaattatatttgttatagtaggtacctgaatattaatgaatatatattataacattataatttagtgtatgtggctatattagctaataatgaattatatattcaacaatatttgtagtagttgaccagatcaattaattggaccattaatcaatgtggaaaaaaacaaaattggaaaaacatttgtttatatgatcctatatattatcatataatatctttgaaaagttatatttatacattattaattatcaaagatctagatcttgatctacatctaaatatattaataatatttatttaaacattacaaataatattaatttattatgcttgcatgaatcatgatcaattaattaattaataccatatacaacactaacctagcatatcataataaattattcataaatataacattacaaagatcacatggcatcatatatatctgattttgctcaattttgtccttactgaattcaattttttttttttttgaaaggaacttaagagttcattactgaaacaaaaggatgggtagcacagggggatgccctccccatggtaaacaccaacagaaagtgtagagtttctaatacttttagctaaaccatcaacaaactctaatttcgaacgattaacaaaagaaaaactacgagacataaaacttttagaaagatctaaaatggacaaagaaacactaaaaaaaaactccaattaggaacacatttccccttccccaaagcctgaatagcagccatacaatctgaacaaaccaaaattctaaatgagctcttccatcgataccagttctttcgcttgggttaaattaaatgacccttgggttaaagtaaaaagccttaaccattttcagattctttccattaaccgcccttggagtattttcctgataaccttccttcttagtcctctaataggatgagctcttccatcgataccagttctttcgctttctgttggtttcttcctttcatccactggtttcttccctttatccaccatcaccagtggtttctctgaaggttttctgggaggaatacaatttactccggcttcattattgaaccaatctaattggtttcttgtgttgaaacagctaatcaccgcagtctctgctttcgtccaaggaccaaaagccatgacagctttccctccaatggttatgcaaacgcagttggtctccaacacccattcttgtcatgtcctattctcccacaattatgacaaaattttggcaatttgaaatattagaattgaatccattccttcctacctcgcatgatatccagataagagcctggaaccaactgttgatctgtatcaatttccacttgaaatttgaaaaatccacgtctagatattgatcgttgatcccaagtgtcactgtttttaaataccccaacctttgccactatagtaggaatattttacctgtttagatagggagataaaagccctgtagcctgcacccagaataaggttttcttcatatcaactctgctccagctcccatcctctggccactccttaataatcagaagctttctattaatgatccacggtcgtttgtgaagtatctcgacacagtcttcttctaagtcgaagaaaattccccacaggcctagtttgagtgtcttgaacctccatgggccctttatcctttgtttccagatattgcctagtacttcttttaatctcgttctagatagacccttaccatcgaagaagcaagctagaacccctgttcttatcagctccccattaatctcgaaatcaggctctaggtccaaagccattgtctgaataaacgtattcctgagcttctccaactcgccatcatgatcccctccttcattatttccctgtcccttatcttgtattttctcaccattgtattctccctgttttccatcttctgaggccccagagttagaagtaaaagcctccttttcactaccacggggagtagataaaacagattcctccccctccattaattcttcaactaccccaccaacctcactttcgacattcattgcaactgtttcctggtgactatcactcatctccacaacctgcaaaactttaatgcactttgaaataatttcactgaccccaaaaattgtgaaaagtttaaaagacattgccatctagttggaaccccaacattttattgagggagaaaacacaatatagacttatctcgtcttgttgtcttgtaatcattgttttgtttgacaaatttaatactttttcaatgaataagatgattgtatttgtattgctcaattataacttgttacaacctccctttaacaacccctttaccacaaaaacacaaaatctcttttaatttttacaaattgaagcaaattaatctctatcactttgtgtagctttttttcacattacaagactaattttaaattgaatctcattttctattctttgtacaatatgtttgataagccaaaatttttgtgaccaaagaacatcatttccctcaacattaatgattgaaactcatgatgaaaatattaaaactctataacaagtcagatatgtccctgaacttaaaaaaaacttactgtccattagaatgtttaataaggttggttactcagtcaagattgaaaatgtagttatgggaatttgtcatggatttcaagatctcatcaaaggtcaactaaacaatggtctttactcttcggatgacaaaacattcattgaaagtgcagcacgtacctattgtacaaaaccctgcaacaagctaaattagactttggcatcttagacttggacatgttaaccaaaggggactagaggaattaaacaggcaagggttgttcaaggagcaattgtaagaaagactagaattttgtgatgaatttgtgtttgggaaggcctattcagtaaaggagaacacacaaccacagagaaacttgcctatgtacattcacatctttggagaccaacaagaattccaaccatgggaggtgcacactattttatgagcatcatagatgatttcagaaagaaggtgtggtgtgggtatacttgttgaagaataagaatcaagccctgggtactttcattgagtgtagaaagcttctagaaaaccaaactggtaacactataagaaatgttacttttgccagtacatttttgtgctggcaaacgtttggtattgcgctggtaaaat

SEQ ID NO: 300997 - DNA, 1844 bp, Cannabis indica
aaatgagcaccaaagacctccttttataatgtataggtgatcacttagaattcaaaatacacaacactcatttctctcatataaatgagtattaatatagtttgtaacaactatatttcataccatttgaatcctatcatcaaattgtgtaacaacccttttattacactaataatgtgtgatcaacacatgagttacaagtgacaacaaattgtaactcctctccaagttacaacatgtaggttacaaaagtgtaggttataaaatcataggttacacatttatttaccatacacttaatatatattattcacatatatttatcacattttaatctactttattattatattataaaataatataacaaaatgagtgtcatttgtttcctataattaacagctacaacagcatctctaattggggtactcatgattttcttggtcttatgctggagaaagctttcatgtttgagaaaggagaaaaatcctgctcagagaagtattgaggattttctaaggagctgtggaccacttcaagttagaagatacagttattctgaggttaagaaaatgaccaattccttcaaagaaaaattaggccaaggaggctttggtagtgtctacaaaggaaaaatcttacaagatggctcacttgttgctgtgaaacttttacatgaattaaaaacaaatggagaagaattcatcaatgaagttgcaaccataagtagaacttcacatgtcaatattgtctctttgttgggtttttgttttgagggtactaagaaagctctcatctatgaattcatggccaatggatctcttgagaggtttgtctttgaagataataataaattggattgggatacaaattatcaaatctcacttgggattgctagaggattagagtacttacaccgcggttgcaacacaaggattttgcatttcgatattaagcctcacaatattcttcttgacgcagattttgtgcccaaaatctctgatttcgggctagccaagatttgtaacagaaaagaaagtctaatctctgtgttgggtttaagagggactattggctatattgctcctgaagtgtttagtagagtgtttggtggggtgtcatataagtctgatgtttatagttatggaatgatggttcttgaaattgtgggagggagaaaaaatgttaatgttagagttgaaaatagtagtgaaatatattttcctcattgggtttataatagacttgagttagatgaagagtttagtttgaagagaataagcaatgaagaagatagagttaaagtgagaaaaatgatcatagtgagtttgtggtgcatacaaactgacccttcatgtaggccaacaatgagtaaagtgatagaaatgttggaagggagtgttgattttttggaattaccacctaagcctttcttgtcttcaccttcaaaatttacaccagctgatcaatcctcttcttctacatcaccactttctcattcctatacctcatttttgtagtggcaaagttgaaaaagaagtaataagttttcttttatttgtgtttatgaaacaagttgtaaatacttatgatactaaagcaagtttgtagtaacaacacaatgtttaatcttgaaagtatgtaaagtattcccaactggattcttgaaattgaaagagaattttagttagttctaatttgatgataatagcaatatattgacccctagtactttttgtagtggctaattagtaatttttccccaactttgacatgtactaaatcgtgtcccttgaatttttttggctgttaaaaattcccccgaactattgagatagttaaat

SEQ ID NO: 300998 - DNA, 2823 bp, Cannabis indica
gtttttcaactttcaaaaacaatttttttttctaatatattatattttatatttttgctcacatactcagatcttagatccagaaccatatttttaaaaattgaaaactgaaaaacgtacaaacaagctctaaatcttctttattgaatttgattcagaaagtaatttcctttcttttttttcctgatgtttttctctctcatgttgctagaaacttgaatgtattggctcacaatcttgcaaaaagagctttaggattagatgaagaggttgtttggaatggttgtattccaaatttaagtattatgtaacttatgcttattgcctatttcaatgaagttacaattttcaaaaaaaaaattacaacacaatagtagtagttgtaggtatagtctaataatttcgtctcaactcaacttcgaaacccctctcccaacatactaataaaaaaaattttaaaaaaacaaaaataggagaacaaatcaatatgccatacataaaaaaatgaaagtgcttaaaaatggacaagatgactagcaaaataataataccagaaaaatagcctttggagtgaaatctttaaaacaataataataatcattaaaaagactagcaaaatacacattaatgatataacagaaataacatctataatcaactagaaaagcctcttatgcacctacagaatgcaaataactccaatttcatatctataatatgccatgaggttcatctattaaagaataacaaaactgaacgaatcattgttattagttattacatttcactaagttccctaccaaattttaaaaatgaagtaacacatagtagaacaactcctgtaaatttcctttgctttctccttttccaatctttgctggaaaacattcttcagtcaagcttcactgaagagaacaagtagtgcacgaaccagaacgaagaaaggaacccaactgtgccggttgcaagcatgattgctagaaccatgaagagtgagtatcccaagtagagagtggcagaaacaggtccactcaaactcttcagatcaaagataaggtagtttactgagtacaagaaaatgtatatggcaactgaaccagaggcaaagaaggacttccaccaccatttccagtcctccacacagaggtgcatataggtcagaacaagagaaacctcagcacatacaacgacaaggaggatcataacaatgaagagaaacccgaaaacgtagtagacacgccccatccaaatgctagacatgatgaaaaagagctcaatgaagagggtgccaaagggaagtgtgccagcaccaagaactaacagccaagatgggtatttctgtggtgggatttccctaggaatttgattggttctaactgggaactcgatatgaggagccttggctccaaagtacccaccaacaagtgtaaggggaaccgaaatgcagaaccagagcaaaagcaaaatgacaaacaaggaaaatggaatggctccggtgctgtgactaccccataataggaaatttagagtagtcagaatcaagaaggcaattccagggaagaaacaagcagctctccatgagactgaaacccatcccttggaatctccacagccaattgtcctccacaggcgaactgcaacatatccagctacaatgccaagaatcatatagaaaaatagcatacctgtgatgagtgtccctcgagaagcaggcgacatgaatccaagagcagcaaacaaaatggtgaccactgccatcccaagaatctgaactccatcaccaaccattatacacaggagagctggatgacttggggcacggaaaacatcccctacaacaagcttccaaccagacaactcctcattcatctgagcttgagcctccttgtcgagctcctcatagcgggtaagatcccgccgaacagtcctcaaaaggattacaaggacaataccagcaaggaaagtgatgaccatcagggaattgaggatggagaaccaatgaaccttggatccctccattttcaaataagcatcccaacgtgaaggccactttatgtcactcttctcaaattcgacctcataggtgaaaacaatgggctgcccttccttaaccggaacagacacagaggttggatcacatttaatgggagatgggtacttttcatagatcttcaagttcttcactgaatcagcattatgcataatactgcaaggaatgacctcaaatcctacaaccatgtacccaggcacttcatctcctttcgctatcgttgggataacctctgctgcatcaccagtacccatcacacgtgccatattggcatcctcatactcatgaacaagaaccttaaacttcaaatggttaaagatatagtatgagtccttgaccttaactccaacagggtaaccagtccaccgcaaggtgtaaccttctttctgggtatacctaatggcaggcaagttgtcgaggatcaagttaacctggtacatctcatcgatcctcttggtcaagatcttaaagtgatcaggcgacaatgcatcagatttgcatagaaagatatccgattcgtttttgtacatcttgaatttataaggcgagttctcaatccgatctcccatgagaagctcaccgagattctcagcactatccttaacaccctctggaggcttacagaagggtaaactatagtaactgaacggcatttcggtatcgattgaggtcagagaattcactttcacattcaagtaatctccatcaacatacttatggggataactaccagggaggtaaaacccatgacccaaactaaaaatcaagcaaat

SEQ ID NO: 300999 - DNA, 4139 bp, Cannabis indica
ggggtttcaacttgcctcccatggatcttccaccattgcccactcctggtgttggatcgtcattgcctgttcctggtgctggatcgtcatcacatccttccgagactcagagaaacaacgacgatgacattactgcctatagaactttactttttttattattcaattcgaacatcttttaatgttttgatgttggtttttttgttaatataaaatttaatatagaaacaaaaaggtattaattaattatttttttaaaaaaaatagttttgcaggcgtcggcaaaaggtagcaacaaaaaggttcccgccaatcctcagattggcgcaaatagttttgtcggcgcatctatagagtcggtaaaacttttggcgcaactctcaggattggcgcgaacctttttaccggcactatattgcgccgacaaaagcttatcaaagcaggttcatagtggataagggtattctttaacaccggaaattcacctttgtcggtgccgtttcttgtcggtagttttaccagcgcatttcatctacgcgttggcaaaaagtcctttaccgactaagattcccagacatgttttgccagcatagtattgcgccggtaaaagtaagttttcttgtagtgattcaaaaaggtttcacatttagcctccacctatcctcatatcatatgagaggaagagtgcaagcttccataacctctagagttcggaagcttgggaggtaaatgttatttgtgtttctgaatgaggacacgtgtaattttcaaagccaattacaactcattaactccaggcccaatagcaagcccaatgaagataataggccagatccattatcgaagtcagctcttctgaatgatggattgacaactcatccactcgagacaatcctccaatatagtgatgagaatctggaagagatcatttagagtgtccaaagagttagttagaaagcatccaaacatccagctccatgtcacacctactattagatcccatgatattaggcctcaactctctagatcttgttcgaggatcatatcttctcaatatggaaatatagtaattgacaatcagatatttaatgtgtctttattctccacaaaagtaggacacaattatgaaaactattaacatgatgtgacatccatatcaacatatagtcagcacctcatgggccaggctacaccaaatgagtcctagtcgatatgttattgatatttatcccatcagtggataaagtgaaacaaagaagaagagccctagcactataaatataagaacacttattcaagcaaagtgttagaatcccattccccaatttatcaagcaaaatctagaattcaaacacttgtgtaactcattaggcttttccagtcttatcgtaataacattgactaatggattaaggcttgttaatgtctcaaccacacaaaacctctaatattatttcttcataatttatctatttctttagctttcacatagaattttttggtttctgaaaatcttggtaaactctcctatttgaagatcttatcaataattatggaaggaataatatatctcctcattgtactatcaaaaaagatctcagcaaagcttatgacacaatttattggtgcattcttgaagactttctcaaggctctttgcttccctgcccattttataaggtgaataatgattcgttgaaaaatcacttcatactttctaatgatgaatggtcagcttcaaggaaatttcattgggaagaaaggacttaggcaaggtgattctatgtgtgctttgctctttgttctcatcatgtaatacttgactagaatactaaaaatgtaagctgctaaaaaaacttttcactaccagtacccaatgtgtaagagtcttaatctaacaagtctctattttgctgacgatctaattttttttattttgcaaattaagttactaaacaagcagttcatcaattaatgattctcttgaagagttcagctttgccactggccttgtagctaacaagtctaaatcttaatttttttttttggaggagttaatttggtagaaaaattggctattctgtagaagattcattttgagaaagattcattttgaggaagtgactttttgtctaaagtatttggaggctcctttgagatctggtaaatgcctaaggagaattgtagagatattattagtaatataaagcttaggatgctcacatgggcaataaggcatctttcttttgctggccatatgaaactgcttcattcggtgcttttggggtttaagaattattagatgaatattttcatcctttctcaaagtgttatcaaagagattgagaagctttacccaattttttatgaggtagagtgttacaagaagtaatattcatgttgcttctcagaaaaagctttgcatacctaaagccttttgttggttgggtttaaagatggtctaaaatagaatcgaactatccttgccaagtatgtttaggttgttatggagaaacataatttgctttgggtaaaatgggttaatactatctatctaaaaggctttgggttttgggaatacaaattcaaacaatagacgagttggtattggcgttaactttgtcagtttaggctgaaatttaacaagcaaagtatccgagcagcaggtatttgagacaaatttcgagcaaccaatctttacaatagtgtgctttagtaaacccttgcccattataaggaagctagctatttggtgtagggtaaatccccctaagcattgatttggtttacgacaggttgtaaattctcatctccttactagagatattcttcctcgttttcacattctgttggattttgtcttgtgcccaatttgtggtacataggaagaatgtcataggcacttgtttttttgagtgtcttctctcagtttaggtggtaaaaggtatctttaagtggatgagttttaatgcttagcctttgaaatatgatgactagcttattgggcttactgaccattgtttggggcgattgaaggctattaagtatgctacatttgcagcttcagcttatagcatttggtttaacaggaatatgtatatttatgagtgtttttcttttacaattgtacatataattaaaaatattcaataatttgttaaaatataaattgtatagcttacaaagcaaaaggatctacagttattttttgcttattacaggatagatagaaaagtgaggggcttgagataggttggttgtgccttagtttggtttgctatttgtaatttgtttggttgattattgaattccttttcttgattaaaaaaaaaaatagatgacatttgtataaaaacaaaatccattgaatatatgtataagccccttcaaccacaacaatctcaagtatcggaatgtgtcccttcgtcaccgaacctcttatttatgtctccaattttcaagggcaataatccaagtggtgtccgaataatcagccttttgtttagaaaatgcgtgttacatttcccacctagatcataactttacttaaggtgaacaaaaaaaagaggaaagatttgacaccaaaaatatagttaattgatcaacaaccactctagtattttgttataaaaaaaaaaccactattatttagttcattaaatttattaagtgcatatattttttttgaaagtaatgattttatcaaaccaacaaattaactgtttgttacagaaacactaataaaacgagagcaaatattcgtccagattgacactattaacgaagacgtaatagatttaactagtacatggagtacactatttgtaaaatgcaaaataacataacacggacctccaccaaccgcagccactgattatgaaaaatcatcaatagcattcaagataaattttttaattaaacagttaatccaagaaagaacaacggaaaaatgacacttcaccctaagcccaatgaatcccagttagaccgccccactaagtgcatatatttatttttggtgtttaacttcttagccccccattttttaggtacgatgtttgccactgattgcttataattttcttaaccatatctttatatattaaaagtgcctatctaacggcatttcttggtttaaca

SEQ ID NO: 301000 - DNA, 2438 bp, Cannabis indica
tgtttttttttttttaaatttgttgacttgttttcatcaacactatttaatgagtaagatttttgttctttacccttaaaataaatgaaagacccaataaaattagagaaatgttaaaatacactagtgatgtttagtacttttttacgtgtcaatattgatattcatccaattaagtattaggtcccatataatttaatataataacttttaaggagtattgttagtcaattgcaaactaacatatctagaagtactaaacactactaatacttaatagcaatactcatagaattatagttaatacatcgattaataaagtaattacattcaattctaatgagttctattaattacttttcttgaaggataatttacaataagataagatcgagagagtaaatactcatagttatttttaagaagtgcattgctattgagcacaataccttctataggtaacaccttacgattagctagaaatattctataaaagttattttcttaaattatatagaattcaatacttaattacactaatagcggtatgccatcgaggagggtgctaggcaccaatggtgtcttttaacattttccttttaagaaaggtactaaaattattttttttagagttaaaaattaaaatttactagttacctaacgatgtatttttggaattttgaagaaatagtttttaaaaacctaacatacaaaatatttttttctttctttctcaaagacctaaacaaaattgcttgtttctcattttatttttctttattttctctattttgtttcttcttttcgctgcccagaaaccctcccaagaaaacccaccagccaacaaccgccacccccccaaaactaacaccatctccacccgaccctttttcttctctcttcctttcaacaaaaagaagaagaagaataaacaaaataaagaaaaaaaaataattttcaaaataacttttttgttttaaaaaatattatgatttaaactaataatttatcaacacgtgatattttttgtcgagaattgtctgcatcaaatttaaattttttaaaatttatgccacaatttttctttattattattattattattatgccacttttataaatttttagggagttatgtcgaatccaattgtagtaaacaaacaatgaaactttttccatattttgaataaatgttggtataaattctaaaataaatgctccaagataagtaatcgtgtcattattgatgaagtgattccatgctttgtgtttaggaatatttatcttaataactagcaaggattaattagtattataatgatttttaaccttcatcataatttattgagaaaaaaaaaagaatcacacacaaaaaaaaagactcataccaaacttatttggtcaattagaattttcgtgtttaaactttgatacgtactaaattatgttttttaaacttttttagattattaaaaattactgagattgttacatttaaaaatttttattcaattttactaacaaaagtctgacatatataaaagtttaggcgacatgatttggtacatgtcataattcgagggtatgatttggtaaatattatagttcgagaggtacgctttagtatatggacaaacgtcacattagaaaaattgaataattcaacaatctcaataatttggcacctataaaagttctgacaacaaaaaacctaattagcaaaattattttggagtgacatacaatatcctatttttcttaagggtgcatttcgaaaaatcatattgtaactaaatgttgatctcgtttttaatcgacgacattgtgtctttaaaacgataagatcatgactaataataatgataatgagtaataaaaacacaagaatttatagagatttgaccccgtgatagtggtaacaacctactcctcaaactgttgtattactttagcaacgttattaagagcacaaggagctggccaattaagtttcttaataattttgagaaagagtgtacaaatattttgacaacaaagaaactctcacaaagatgaattttgggtctctaaactatgagacaacttcactatttattgagagatcacaaagtttgggacttgttcagatactacttgctcaagcactatacttaatcatttttgagcttgaattcttctggatggaacatcaggtaagtatagcccttcctgatcttgataaattaacactaaaatttattgtcattcctactttcttagtaatgactaaatttgcatgacgtgtttatttaaccgaataattatatagtaagtacataattagagataattgagagatcaatagtaccactatcaagggattattgttgtggttagattcagattattaattactgagtatctggccgttaaatgaagtcaatagccatatgacagtc

SEQ ID NO: 301001 - DNA, 3224 bp, Cannabis indica
atactatgcacatgattgtttcagcaccttagttgacgtgctaagtgggagaccttgttcagcacattgatcactcgggacgtggaagtaggaacacaaatcctgagttttcacgaatcaatggcggaggatcaatgtcagctatatctacctgttccattgacttggagatgtcgtctactgagaatggtatgctgcatattgttgacgtggtatgtgtaaataggtggaggacatatttttagggacaagtaaaagtaatttgatggaagacagctaaaccataccttgagtcatcatccaacaggaaagaactgctaacggcattgttagagtcctcggtcatcataactctcatactcgaaattacctatgtcattatggaacatattcagaaaaaaattggcaacaaaagattcacctgtcaggagaacagggatttcaaatgcctaacacaaataattcagctaactcgtggtatagtgctttaagggacaataaagttgacattttgggtcgttaatggtcaaacttacatctgaagacacgctgtgtgtaccatatttgtcatcccagtacattgtactgatcctgtataactgctggatgctcagcacctgaagtggtggcaggaattaatacagaagaagggaacacaattaaggatcggacatttaatgttagacaaataataatgagagatttagtaaagatgaagcactaacaggacaaagttctttcgttatttcattcaaggtctttttcggcttttggtgtatgacctgaaatgttaagaaattgacaaaaaataaactgagtctataagcaacggtaaatatcagtggtgaaaaggttatatgcatcaaacataccagaaaaccaacggcctgtctaatgtgcttcaattcatcccacgctgtgcctgcatactggacacaaaaagatttcaggtctaagaaacatggaatgcagcaaaaaattcatgcagcattgaacgatactcacttcttcagaggccaggcaacaccattgttctaattcagccaaacccgcttttacatactctccgttactgaatgaacaacactcacgacgcaaaagaagactgcaaaaaatattatggatgtgatgtgatctttgaaaaaagtggaaacatccttgaaattgaaacattttaagccaatgcaggatacagttgaagccttgaaggtttggagtcaaacaaaggcatgttaaaaggatataaggtatacctattgaataattgaacattgatgaaagagaatatctgagtgaacactttacgaaccaagaaggccggaacctgtaaaagccaaaaggcattaagtgatcgtacttttttcacatacaaaatcagaacatcagaataaacttaaaactcacatagttccctttcatcatctttaaatagttgtttaaacttttaacaatgctttgccagtgagcaatcaacgcctgctgtgctacagcattagcttgagaacgccctttcactaaacttgcccgcgatgtccttggggcctgaatttttatttgcagtaattcagtttcaaaatctcagctttaagcagaattaaccacaaatttaaacacttgtagcaatctaagttacctgtcacgctaatgtgatcataaactagtttttttttatctacatctagcatgatataattcttatgtgatcataaacgggttttttatctacaaattatttttgtggctagattaactctgtcaaacccgtaaattttgtgattactgattaccaactaattaaaaaaatagtctttctctttctaagaaaaattaggttaattgctgcatagatattagaataactcttaacagccaatcacctggatacacagcccaagtaatggggaaatctctttctttaaattgtctctaatcattccatatatcttctcaaggaacgcagtaagctgctgcttaaacagcaatgctggatacttggcctcaacttgccgtaagtcgtccagtctaccaagtcccccccgaccattaagaaatgagagtccagcagtttgaggagatgctcgtaagccctggggttcacagtaaggaaatattggaaggagaagaaagacaatatcataagataactaacttcacaaaatgatatatttttttttatttattccaaactatggcctacttgagacatccttccaaagagtgatgccgatgctgtccttcgacgctgtggtgtcaagctagctgctccactagcttttagagtatgttgaagcagcaacaataaagttgatgtatttgctaaccaataagctaacctatcattattatcctggaccttaaacaaaacaaagaaaaagcatcagtatcatttaatgggttttggaacttggcataagtaatttatactgccaagatgttgtaatttatactaccataggtttggttttttaattttttgtttttttttttcgttgataagatactaacctcaatagatgaagctattgtttggataattcgatcaaaaatgctagtcctctcaacttcaaatgacctccagtgaagaaggcatttatatatgacacaagccgccactggtctgcccccagagaatcccaaatcttgtgatatacacttgatcagtaggtcctggttctcctgaaacagaaatgaaataaaataatttaaaagagagtggaaactaaattccagggaagaaactattaggggctgcactctggtcggattttttgggtgcttggaaaacttttaaactggtgcaggtttacagtcccgtttttttttcagccttttcagcagcggagcggggcggtgcggggcgggtagtcgggctttcgggtccaccaggcccaaatgttcagccctgaaaactattcccaagtcaaagggcactcacctgttgtttctcattgagagatttctgtggtttttcctctgattcaggctcacgtgcatttgatgtcgtaagagccatatcctgtaatacaataataattaagagataaagttgtggtaatttttttcacaaaaaagataaacaaaataagtgttcttactgatgcaagcctgggttcaccatgaagaacattcccattttctggtgtcctctgcaattggtttaaaaaagataaatcaaacaaaaaaaaaaaataagttacctgcatttctataaattacaaaaacga

SEQ ID NO: 301002 - DNA, 5138 bp, Cannabis indica
aagcatattctaattaaaccactcgaatagagtattatataatacccctaagatgtccaataggatattgttaaatagagtattgttttcctagcttattacaaaagagaattcactttacattattattttaagagatcaagacatcaactctatattattattattattacaaagtaagggtataaaaattcgagtgtaacgtttgtaaatatataattcaaaaagttaatacactatgaataatatatactaaaaaatttggtgcaattatatattagtttagtttttttttaaaaaaaaaatctaactttttgtagtatatatatattttttaaattagactttttgtatattaaaaatatgtcaatatatattaatatgttttaattattgatatttaccaatcccattttaccgtaactttattctaattgttgaagttattcaagtattatattatagtccacacacactacgttgataaataaatgaatttctgattgaattatcattgcccctatatgacatgcgtatataatatatatgtgtatgtataacgtgtgcgttctgggtgggaaatactctaaggagtattattattgtcattccattctccacataataggcagaatttgttgtatgcagaaatgttttaagacgagtgtcaaagaaaagatcaggtgtcattattataacatatataatggtgttttgcattttgttggcttcttgctttttccacttatgtattcttccattccactctgtttcttgttaacatgtacaatgtttggtaattaatagacattcatttgagaccctctctcatcttggctacgtgttttaatatccactttcgctgcaactactatatttctctacttaaaacttttctttctttgaaattaaaacttgatcagctaaatgtgttgtcatgttttgatctcaaacaataagtaattaatgctgaattttgtttttcaatccttaattttgtcagtgatttatactttgattatctgtacaacaatcatggttgcgtttggaaagaagttaagagaatcgcagattcaagaatggaaagggtatgtttgcattagatgtctttcttgttcattaaggtgtttgttaatttcttcatatatgtcacatttgatgttctcttgactattctgaatttgtgggcctatttttcagatactacattaactataaattgatgaagaaaaaggtaaacagatatacacaagaaattcaagttggagaacaaaatcgtcctttggttcttagagacttctccagattactagattgtcaggtaaaatttgaaattccatttgcctaaattcttttcacctatatgcattttcactacattaatccaacatgcatatgtcattaatctccagattgagaagattgttttgtttcttctggaacaacaaggattgcttgcaagcaggatatcaaatctcagagaccaatatgataacatcatacaacagccagaaggaaaacaagtatgtgatcaagtgcaagaagcttacagagatgtaggcagagatcttctaaggcttatcttttatgttgaaatcaatgctattggtctacgcaagattttgaagaaatttgataaacgccttggctataaatttactgattactatgtcaaaactcgttctaatcatccttattctcaattgcgccaagtcttcaagcatgtggtaataatctcatgctcctaccctatagtaccctacaacttcatcttaatttgtctctaattagtttcatctaattgagatcttttttgtgaccatatggtgtagagtgttggggcagttgttggagccatatctcgaaatctagcagaacttcaagaccttaaagacaatcgtgggagctatgtatccatatatgatcagcctgaactttccattccggtttactctcataatcgatccaagtatcatatgcattttaattagttcttgtcatatatatatctaatgatctgtttcaacaggatcctgtcgttcattccataaacacagctgttgagaggttatcaaactcaacaaattttcttcaatttttgggaagacatgcacttattttcccagatgaactaccaacaccgtctgctgaggacgatattgatgatgaacagagatatcatttcatatcacttctcttgaacttggcaaacacatttctatatatggtaaatacatatataattgttccaacagcagaccactattccctaacccttggagctgcagccactgtgtgtggagttgtgattggttcaatggccgtagctcaagtgttctcttcagtttatttcagtgcatggtcaaatagatcgtacatgaggccactagtatttagtagcatcattcttctattgggaaacaccttatatgctctggcttatgatcttaattccatatcagttcttctaattggccgattatgttgtgggtaagtaatttcatatcctataatgctcttttaagttgtttaaaatcattggcctattgaaaatctgatattatatatgttgtaatttacagattaggttcagcaagagcaattaatagaaggtatataagtgattgtgtaccattaaaactaagaatgcaagcatctgctgggtttgtcagtgctagtgcccttggaatggcatgtggccctgctcttgcttgtttgtttcaaactaacttcaaaatttacaagcttacattcaatggagacactttacctggttgggttatggctcttgcatggcttttctatttgatctggctttggacttcttttagagagccttatcgtgagaactattacgatctatcctcccacgactctaattctggtttgtttgttatatcttttgttttttttttctttgatatttttctcaattttcttgaaatttgaatcaaatgatttcaacaaacagggaaatctccacgcaaaattcaggccaaaatagagaaggactttggtaagtgactttcaataccccttttcacttgaagtaagcatttttttttatagctaatgttggttttattttgaaggagaacaatgcataaatgttgctgtggagaatggttgcacacaaccattactaattaactatgaagctaaccaagaagaagaagaagaagaagatgatctccaagattgtgatgatgctgatgaagattctgacaaagtacagaaaccagttgattcaattgtatcagcttacagattactaacaccatcagtaaaggttcataaaattagttctatggttttgttcatataccttttcttctatatatgtttccattgactagtatgttttattcttttgctttccatttatttgggctctaaatttcagtatatatacaatcatctctctcacttgagtcattatattttggctaaaccaggttcagctatttatatacttcatgctcaagtatgcaatggagattttactggctgaatcaagtgtcgtcactggatactattttgtatggtccacaagcagtgtggcaatctttcttgcatgtcttggtttgacagtgctcccagtgaacattgttgttggtaactatatcagcaacatgtttgaagaaaggtaaacattcaattttgaaaaaggacattaaaaaaaaaccaattataattcatctatttatttcgcaggcaagtattactagcatctcaaattatggtatgcttaggcatagtgttaagcttccaaatcgtggtaccttactctgtacctcaatatgtgggctcggctctgattacatttgtgtcagctgaagtactcgaaggtaacttataatttggtcatttctgatgaagcacaaaagttaatatgtataataagataattgatgagtataattgttgatcaggtgtgaacttgtcactgttgtctcgagtgatgtcgtcaaggctttctcgtgggacttacaatgggggattgctttcgacagaagcaggaactctggcacgagtgatggcagatggaaccataacactgtcagggtacttaggccaaggaatgctcttgaataccaccttacttccttctttcttcatttgtatatcctccatagttgccacttgtttcacttacaactctctttactaatataataaactattgtattaacaacaccttctcttaattaccttttctctcttctaccgtgttgtatagtaatagttaatgttaatattaaagagcttaagtatattgtactgtatgacgataagtttctaagcatatatatatatatagctatgaagtagttttcctcttcacctgccttataaaatgctatgcatactcaataaaggttcatgggacagtcattaaaacaatctcttttgccttcttttcttttattctactaattttttattcctttttgtagctgagagcctaattcggatgagattaatttatggaatatgctgttttgttctactcagcagtactaggatttaacaagcctcacgttgattttatgaaaatattggaaatgaactatcttctttgaaattataatacgtaatacatgtcatgttgataaagagtcggagtcgaaaatcatgtttcggaaaaaatgataaaggaaaaccaatttgactcccacattggtatgtaaataaaatctaatgttaacttaaggtaataaatagtattattctttgtttcatggaaataatattctgttgatgataatgataatagagataatagagaagaaatgatgacaaatggggagatagcaagtgctgaaccctttctatgataaatggttttatattgataaatgatcaaaaatttgattttgtccattgcatgttattcaattattcaatatgataagagttagaaacataattaacgttgaaccagacagttatccaaactccctattgtatgtaatcaaagtgaaggtgaagcgctcaataattaactcttttatctaagcagtaaatccatgaagcatgcaatttatttaagctttgagttttatggagatagattatttaggcaacaaattaatgaaacatataattcattttacttaggttctattcttcatcac

SEQ ID NO: 301003 - DNA, 2375 bp, Cannabis indica
cataaaaaaattacgaatttactaaaatattgaagtaaatagttttgaataagttagatattttggtatattctactatttattcttgtatatttgtagagttacttttttaattttatttttggtaaattatttttagtgtttttaaataagtatgacgtacataataatttttttttataaaaaattatcttatttttggtaatttttgtaagaatttttttgaaaattttcaagtaatattaaataagtataatgtaaataattatttttaaaaaatagactaaaattttattagaaatttttgtagtagaacccctaaagggtccatctagtagactctttatctttttcggtatctaagaaaatattttagttaaaaaaatttcatggtcacatacattgtaattatttatttcaaaaaattctgaatattttaaagtaccaaaaataagttttaaaaagttacttatcaagtataaaaaaaaatagtcgtgcaacaaaatatgtaaattttacttttgacaatgtaaactactttttttttttttttgagtgaacaatgtaaactacttattttttgataaatttacaaataatcataaatagctacaacatatacaaaaaaaattacttaatttttttttaaaaggtaaaagtttattgaaacatttttttatgttttattttttaagtacatgtttactatatttcaacaaaaagtacatgttttctataagttatttcaacaattttcacaaaaataaactttattattattattattattattattattattataccaagattaattaagaattttatctcttaaactttaatatgtactaaatcatactttttgaattttgaagactgttataaatttctcttgaactattgaaattattgaatttaaagacttttgtctaattttaataataaaatctaccattaataaaaatttaaaagtatgatttatgaatatagttaattcacataacataatttaataatttagtcatcaaacatcctaattaatcttataccaatatccaaacacgttataagtttttttatttttcttaaccgaaagcagaaacaaacagaatctgttatttttattttatttaaaagaaaaaagaaaacatttgtcttaaaaagaaaagtaaaaaaaataaaataaaataaaagttacattggaaaaatgagagagaatggaaaaattggcagtgagcagtagatggagttgtagaacaagccacgtcccctcattatgtttgcatggggaagtgtgcttcgatttatacagtgtacaacactcccaccgttactaccgtgtcatttcatatctgtggccatttagtctagctcggtaagttgctttgcgcgtgtctcacacgctgggtccattccgattctgattggtgggagtttggtaggtggggtggaggagagcgtatggtgcccagtttgtctggtgtgtcaaaatgcgtgcaatgcaacccttctctaatttcgatgtgagaaaggagaggggtcggcaaaatccaagggttgacttttgactctttattggacttggaccgcttcaagatttgggcttctctaacctaaaagcccataccgctttgtccaattccatatattgtagattattataaattatttatttatttatttggagattatttcacaaatacataataaaaaaaaaaaactacagttatacttttattaattttttgttatctatatattattttttattgttgttttgatattatttttctattatttttatgtaattttcgagttatttttataaaaaatatatatatataaaattaaacataaaataattttttttaataaaaaatagtgtttgatatataattatttctttatttcataagggtggattgttataattataaattaatgaaaaaatatataattcttctttcaaaatgatcttttcggtatatttttttataagtggaacgaaccaagaggtgttttggtggtggtattcgattggagaattagacgggttcgaatcttggtgggcgatttcgcaagcgaaggtttatggactgacctcatcttcgacatttctttgattgagaatcaacgaatgagaaaaagataggactgagagaagtagggctaaacatcgggcaagtttaccggatttctggtttacaggttttgggttcaaaaaaatgaaaccgaaaccgaacccgaatatatagggcacgggttggcgggtttcggttggccggattgactcggttggcaggttgacccggtcaactcgatcaactctttaaaaaaattaattttttattcaaataattatttcttttattttt

SEQ ID NO: 301004 - DNA, 2968 bp, Cannabis indica
gtgttaaaatttatagtcgtaataattaatacaatataatattttatccaaagatagtattatttgttatttaatacaatacaacccttatacgacctaccaaaatttaccctttctgacaatagtaggacattggtaggaagacttgaagttgaagtacactaaagaaaaattttcacctttagaggaagttttaagttccaaagctttctacaaaaacccgaacattaacctcaatattagacaaaccatctaattcttatttaaggaattaagcttttttttttttttttttttttttttttttgaatggaaatattgcaatttattggaaagataaatcttccataacaagtagtcataaaaaatacgaactgacgaaaaataagagcgtctcgcaagaaagttcccgagcccaactccattgatcctcaccataagcacttataggaatattcaatattaaatctctctctcatttaacgcagaatgactagatatgacaaaatgattttgagagtaaggctgatgcaacacctctatacttgggcctaacactccaaataccacatgctttgagaatagattgagcttcaaaaatacttttccatataaagcttgaattgtttcccaacacagcaaataaacaatctccattagggtaataccgtgctttgataattctgccaaccaagctatcttgaaatgttaccagcccacacccttgttttagtagcatgtctaaattaaatgcgcttatgaactttttctttaagatgtaaattttattaacctataaactttaggtagaaaatttatgaaataagtgattttaatgtatgtatgtataagcattgccaaaccaagtcatatcttatttcaaagtttgctagggacatcactataattgtctttggattgttttttgtgagatcttgttctgtggttactgtagttttcaaaggatcataaccaagtttgatactctacattgggaaatcattaaatctctcaacatgttgaaagcaaggatcccaaaaggagctcctagatctatgtttcttctattatgcctaaaaaaacactcaaaatatactgtagagaaaagccaatgccgataaaagcctcatccccactcccaaccccacgaatataaaagtctttctctttgaaacacattttaatcaccagacatacaccttagacaagtgcaatgaaaaccaaacccttgggacaggaaagtttgacgagcatcgcgatccatactagcatctatgtagcatatccgaagctcttcacctgcaaaagaaaagaaatccacaattagatatccttagaaatatagatttacaaagtacgctaatcaaatgagtcaatagatagataggtgttgatgaattcttagtacgatattagctatttctgagtgtgaaccacagtggtgagcagcaaactgcttcactaaacaaagagcttcatagagttattcacacgaaagatagcataatgtagctatttgtatttctattcagtcactctactaattatttgataataaaactgttttttttccttttttgttcactcaaattcaccaacagttaaggggatgttaaggagaaagcataagcgactgtcaggacaaactttcaattcgaaggaaaaagagcatttgaaaaaggaaaataaactaatacacatgaggcaaaccttcctccacatcacgcagagccatcaatttcgcatctgcactctctatccatatgatgtgggtgttgggatctgtagtgaaaataccagacaattcgaataagagactatgacaggtttttcagaaagaactcaggaccagttttgcttccttgtagcatatagttaatctcggaaattatggataccaaatgttttttttccccaaggaaagtctattaacaatttattattaatttgtagcaaaagtgtataaacaaattgattacatatacttcataataatcaaaaattgcccctctaccatattagttccgaacatttgaatgaaccccaaacaaattgattacatatgcttcttttgcttttgttatttgttttttctttcttaaacacaataatataaacaaaatttttggtcaataatcagaaacaggaagaaacaaatgcagtctttacttattacattaaacggcaagaacttagttacttaccacagtcatgattatagaacgaaggaagcatataaacggcatttcctgcagcaccttcagcttctacagaggctgcagcagcttggagaagatcttcataaagtcctccagcacactcaattcgaaacgcattaattcgaatccgtgccagaattccagtgtaccattgcttggttaaaacttgaaacgttaaaggaaagtgatttctaaaacagtgatacataacaatgaagctaaaaagtaaaagggcaaaaaatcacattaaacttcagccattgggaggatacatgccatcttttcatcaggaaattttgccactttgaaagcactcttcaggatatcaaagccttcttccatctgaaattcatgacaaatttacgatgggcacagaaaagtaatgtaaatcatggacatgaagagatataactatgccactgacctctgaaatcatccgaggagacaacatagcaggctgaagtatgtcgagaaggtcagcagatgtggctcctgataggaccatacatgcaaaccgctttactaggagtggatattttaaaccatgagacctttacaatgagactagttaaatattaaaacaacaagaaaatatgagtttgtttttcacacaaataacaaagaagaagattcattaccggcaatagtcattaaaatctacccaatctgctttgacctcgacaccaaggaaagactgaaaaaaaaaaattaaacaatgtttgaaataaagctgattgtgtgactaaata

SEQ ID NO: 301005 - DNA, 744 bp, Cannabis indica
tacgtgcattgcacgttttttttagtatatatatatatgcttgtatatataaatatatatatatgcttgtataaattaggagaaaataaaagacaacacaactgtatcgatcatgacttagcagtttcccaacatatatatacatgtttacattaatttaaatcgaataaatcaaaggcaattaattgcaaaactctacaaaatcattcatttattttactctaaaaaaaaaacttattggtttttaagaaaccgatcaaacttaaaataacaaaattaaggaactaataattatgtaattagtagagaattctcttctatttataaaagtttattgtttatgttaaatttttttaattaaatataaagccctagtccatgatcgaatttcttcgattacacgttacttaattagtactaattaatatattcatgtcttctcaaatattccaaatatatatggtacaaaaaacacaattatgcttttactcccttaagtaaagggttttgttctttaagcatattatttatagggctaataagtaagttgcattttacagcatgaaaatatcaaataattgaagatccctacatatagtgttgagacaaagaaatataatttaactaataataattgatatgacagaggaattaattaatatatgagaaaataaatactttttaatataaatttacaatatatagggatatgatttgtcccgtgatgtacttttatggaatgta

SEQ ID NO: 301006 - DNA, 1478 bp, Cannabis indica
taagtgcatacgaagagctaatcgcataattaaaaagaagggaaaccttgaacattaggattcccttcattgaacattatatttcttaagaaactgaaacagaaagaaaattatatttctaaaggacagaacagaaagcacttccttcaaaaacaaaataaaactcaattttgacacaaaattctccactaatattaacaaattttctacatctgaactaaatcttcagccctaaaatgctaattttaaatggtttacacaaatttaaaagccaatgcctaacaaatattatggaattgttgggtaggggaaatccttagtggttaattttgactgaattttcagcttcattttaggtcttcgttacaagtactcttaaagaaatcctctgtttcttttaaaaaacacatctggtccttttgagctatttctattgatcaacatttttaacggtagatgaacaaatagagtcccaattaagacaacaaacgtatgaaaccatgtaattgaaagaaagcaaaatctaaaattcatttaacataatttattgtgagtaatcataatgaagcgattaaacataattgataaaaaggagtttaagaagaagaagatactgactgatataacgagaagagcacggagagggctacccctccgagtccagagaagaatatgcctggcggtgtttttcgaagcatcgggaagcagtggagcgttctcagccagggaagttttgatccgttgcagcagcggcagcggagtagcagagtcggcgtcgggaaagaggatgaaagagatcatacggctgagaacggtgtagagtgtgtcattactacattcacgtttgttgctgttgatctctacgtagacgccaccgccattagacttctcttccatatttcttcttcttcttcttcgtcgtcgtctagtcagttattgaagctgttactgatttagagaatcagattcagatatcagaatcgacgaaccggattagggggaggggcacgtgatgtgatctcgaatacacgtgtccatccatttgtggcggggttatttacttcaattaaataaacttgaaacttggcaacataatacgtcacctcttcaattaattatacttcttgttctaatcctttttagttgtcactaaattgagatgctttctatttattttcatttaagtcacggaccaattgctttaatgatggacaactgtaatttcatttcgaaatgaaaatttaaattttgtatgggaaggtatgtttatgaaaatgttggctcactcttgtaagaccatcttaatgcttggagtaaaataaatatgttaaattcggcctaaaaattaggggttttcataaaaaagacgattcaattcaatgtgcacagtccaattcgcgaagtgcagatatgcgcacttgtgcgcattggattggattggaaaatacaaaatccgcacttgtggggattgaatgtta

SEQ ID NO: 301007 - DNA, 4974 bp, Cannabis indica
atttagattaaacatgattatcataatcatataaaaataattagtatactttttaacaattatacatttttaataatatgttactaactaaatttattaaaatactaatagtcttaccttatactcttaccaggtgtcccattataaaactaaaaatattgctgactcctaattattggagatgaaaagtaaaaaaaaaaaagctccattgaccaattatataaagactgatttggatttttgcccctgaattttaacatgtatcaaatcatgtcacttgaacttttaacatcgttaaaaatgcttcctgaactattaaaattgttagatttaaggacttttgtcaaattttattcaattttactatttcaaaaattatttatgtactaaatcatgctcccaaactttgatatctaccaaatcatgcctctcgaacattgccatgtattaaattatgccctctgaactttcatccatgttagattttttactaaaattcgaaattttttttatttttaacgaccttaaaagttcaaggggcaggagagataaaaatcctagcatagatatatattgcatcagcagtttcttttcttattgtttgatatatgcatcagcagttttttcacggaaattacaagtaccttaattaagctagctagagaggtactactactcaagccaacctcttttctctctctctctctctctctctctatatatatatatagtagtgtgattaagtgcaaaaatagagtcatcgtctatttcttttggttgattccaaaaagaaagaattattactctaactatttgttcttattggaaaaaagtcgaaaaaaatagaccatatattttctcttggtttttttttttcctatagaaacaaactctcttaccttatcgatcaagggaaaggtaattaagtgatcaattaaagttaaaaaatgatgcattgttctcaaccaccatctatgtcgtccatttgtcgcccttgtgcagtttcagtcccaaatctcaccaggtatatatatatatatactttgtatatatatatttatataattatgaactgaacgattcatataattaaatcctctatctctacttcaactaattaattatatgtatatatataattaaacaatatttattaattatgaataatataaatattgtcaggtcattgcacaagtgtctcccgcagtgtgaatatggagagcctccgtagtggatatctgtttcctgaggtatatatatatatatatatatggcttaattaatttgttatataacacatataatgattaatattaataattaattaaaacagataacaaacgggagttagagcatagacagaaatacccacaaaaaagttgattaggcttggtatcggtgataccacggagcctataccagataccataacatcgtccatggctgaggtaatttaattaattaattatatgaagtatatatcacattattattcttttcacatcagtcttcctttattattattattattattattgttgttgcatgttgctgtttaggaaattaatggacacagaaaatataatatttattaatttatttaatatatttataattaaacattatgatatagttttgttatattaattatgatatattaacataaattaatggatcgtacctcacatttgcagtatgctctcgctctctcaaccgtgaagggctacagtggatatggagccgagcaaggcaagacggtataaataaatacatttaacttttacacattttttctttaaaaataagtaccaaagagtaaaactttattagtaaaactaaaaggagaatgcaaaataaaaatttgaacttaatagtagcccataaagtcttaatttgtacacattaataatgttgcatatatgtaatgaacttaatttaatcaacatcatgatttaaataattttaaaatgtacaagtttatatgctttgaatttcaaagtcaaacaatacttttctcaattttcaactccttaaataaatcaaccttgtacgtataagatgatgacttcaaaatttcgttacatgttctcagtattttgccttctttttaggtactttcttagaaacttagttttatatttatgatcaataaagtttattctttttgctaaagatttatgaaaaattaataaaatcaaatacggaaaatatctctttcaaaagaaaagaatatatatcaatgtataatatattatatattatatcatgatgagtatgtcccacaaatatcaaatggcatataagataatattagagagaatttggaatttttttgatttttgtatgagataatcttagagagaattagtttttaacattagccaaaacagaggattttcaagaaaaaagatgtaagaagttatgaatattaaattgaacacaggaattaagggtggcaatcgcagaaaagttatacagaaatatgggagtaaaaggcaatgaagtttttgtatcagacggcgcacaatgtgacatttcttcgccttcaggtatattacacagtatatttttggaaaaatatcaagattaaggttcaaataaataatatgtttataaattattataatttttttcatgatcttctaagttgtaattactacttagtattacttataaatttttaaaaaattctagataatttagcgtataaaaaaaatagtcgcgtaaaataatcatcgtacgatactaactagtgctagcaatgccttatttatctatataaatatatatatatactaaggttattattaatgtacgtcaatttaattatatttttagtttttatttttgttattatgtgtattttaaaattttataaattaaaaggaaactatttattatttttttattttttaaaaaaatattttaaattttaaaaattttaaaaaataaaatttaaaatttaaaaatactaaaatagaacatactcctaatattaaaaataataatattataaataatatattaatatttatatttatttataaaattaattttattaatacggttaaatttaataaaatattcttttatttttaaaatatattctactaaactaataaaattagttagataacaaatttttatatataaatataaaagtagaattgttgttttcatgtatttattggtgttattattattaaaataatgttttacgattattgtggctataataattttatcatttaattttttacaatatttgtagatgctttttggatctgatgtcacggtggctgtgcaagatccgtcttttccggtaatgttgtttcagatgtttttgttttatttatatatttatgtattgggtggttttcattgctagcttctctttcacttaaattgctcattttttgttttaactctaattatttctggatcatctttagttctcaaatcaaataagtctttcttctaacggttgacatgtatcacgaaatacaatctgtgaaagtacattacgcacaaaatcatgtccctatatatatagtagtagaattattataggtttctgaaaacgtattatttactgttagtttttaaaattaaaataatatttttgcaagtataaataatgataagttatcaaggatgaacgaatgaaaaagaaaataagtggtttagcaaagtccgtaataattcttacccgtcataatcatatcatatatattattatgacttatcaatttatgtggagttgaggcaaatgagcttggttggccatctggcccatacataatccattaaagggtatccaattaaaagggtataaatattaaaataattttattttattaatcctcttcagatatactttcaaaattaaaatgacatttttttcttcagaggagtgactcattttaattaaaatcatttcaataacagtcttgattcttcttgaaactagatagagaagacacaataaataatgaaataacttctgccatgtatgtatactttacccataaaaaaaaaaattactgtactctgaattaataatttttaaatttgacatgatatgatatgaatcctatgatataagtttatttattattttttttatatgatataagttattatctctgccgcgcgcggagagctttgtcatttgagctttgcttgtctaaactttgttttgatttggtaatcttgtttcttttttctttgaatgaattatctttgtttcttttaaacttactcgatatgatacaatacttgattgaaaatttcaaaaaagtcttatacgactttgccaacaactaatgtatgtctaaatcatcataacataatgtatgttaaccataaaatataatatattgagataattcttgtgttatactagttagatagtgctttgtttgtaatagtatattgaatgaatcttattagcttatttataatatatatgattaatatatattggcattattgacaggcatatatcgattcaagtgtgatatttgggcgaggtgggaattttgaagagaaaacagggcagtatgggaacatttcgtacatgaaatgctgtccagagaacaatttcttccccaacctatcaccatattacacacccaaaactgatgtcattttcttttgctccccaaacaatccaacgggtaacgctgcgacacgtcagcagctgaaacgacttgtggaatttgcaaaaaccaacggttccatcataatatacgactcgtcgtatgctgcttttatatccgacgacagccccagatccatctatgaaattcccggggcaaaagaggtccgtccatctctctccatatttattatatcagtaattagctactctttattattttagttcaaatagagacttctttctattattgttgctctaataatacttcttaatttaattattttataatttaaatttattaaatataaatt

SEQ ID NO: 301008 - DNA, 1411 bp, Cannabis indica
ttgggcaaaatcaggggtaacatatgtattttgaggaaattttctcaagtggccataagtgggtgtgtgagtgttggagatcctgggttcgagtctcacataaattgtaatatataaacgcttaaatcggaaaaaaaaaataaataactaaagccgcctcgtcccgaactcgaacttgagtcagtgagtagtacagattcgagaacagagcagactcttcgtctcaaaaccaactcttggaaatccctatcaaagccacgagaaactcgatcaagatcttcacatgttcattctcgtcttttgattcacccaacaacttcctcacaagatcaatgaacgatttgatttcggtttcgatagctctggcgactcggaaaactttgtagacggttattggacggaagaagagacatctgatattaaagccctttaatttttcaaggttttggatcagagaactgaggtcgtagagtaatcgagagagattcaggatatcgaaaaaaatggcgtttgcttcggctgtggttccgagctctaaaagttcttcaatggcgggttttgaatcgttttggtatagtatatcgcgaaagggattgggagagagatgctttgaagctttttttagggcatgtaggaggaaatggtgggtttgaggttgagcttcgtccatagtgaaggcatttgttcagtgacaattaatcgagagaataaaaaaaaggaaggaaacagagttaacgtaatgaacagtctaaagctatataaaacccaaacaagcaaaccaagcaaccattcaaactaaaatccaatacctctgattttgtattatatattatttgggaattttcattacgctttaaattttatcattttcgtttttttttttgataatgcaacatagtcataatgggaaatttagttttctatgcattttttatacttaaatttattccccaaactaataattatagctattgaaaaaataggtatagttttccctaaaacctaaaatactcctctcatatttttcaacctctctctctcttcttcctttctctctcaaatcaaacccaaaaccgacaaagcctccatgccgagccacctcctccactgcacaaaacccacgccgatccacctcctccaccgcacaaaactcatgccgatccacctcctccaccgcaccgctcgatcgccgcaaccagcgcaccgctcgacgccatcactaccacgaaaaccgaccaaaacgaaaaacccacgcgcagtccgattcagtccaattcaggcgtgaatgggttggggaagacgaagacccaatggagctgggctgggtccgagctgggctgggtccgatggggctgggtctgatgctcgtgttgagtcagatttgaatgagggggtgttgggttttatgccc

SEQ ID NO: 301009 - DNA, 2078 bp, Cannabis indica
ttagggcacaaaacccaataggtaactcccccaaaggaaagaagcctttcactggtggcaagcccttaagagattatgagactctaatcatgtcagctaccatcataatgatcctctagttgttgaggttcaaatagctaatatgatggtggtgagggtaatgatcgaagatggagcatcatcaaacatcctattcaagcaagccctacttagaatgggcttaactttagataacctatgacaatggacacaactcatgtatggtttcagcagagtttacattcttccatgtggaaatatcaaactgccacttactgtcggcaatgccctaaagaagaccaccatcatggacacgttcatagtggtggacgtgaagtctccgtacaacataatgctcggaagggctgtcctttatgacctttgagccatctcctgagtatatcatttttccattaagttcccaacggcagatggtatccattgtctctttagaaatcaaggaacaacccacgagtgctataatgcatcattatcactttccaagaagacctcctctactgctacagctttgaaggggacgaacaagacctcctctactgctatggcaccaagggggacgtgcacaacctctcctacaaaatctagagagatcacaaaggccttcagagaagacgaagatgatacctaaagccacttaaaggtgtgctcaagacggagatgacattgaccttcattttgcggatatggacttgggagtttgtctaacctaggaactcagagaacttcccctcaacacattagacccgaccaaggttatcaagagtggaacaaacctgtcagaggtcttgagggagatgctaatggcttgcctcaggagaaatcaagacatctttgcttggtcacatgagggcgtgataaggatcgacccccaggtcatctgttatgccctcaacattgaaaaagttaacttctagcctgtgcaacataaatgtaggctccttgaaaaagagcattctaaagctctcaaggaagaagttgaaagactacgggagaacaacttcattagggaagctttctaccaagtttgggtatccaaccctattctcgtgcctaagctgaatggaaggtggagaacatgcattgaattcaccgacctcaacaaagcatgccctaaatattgtttcccattacgacaaaattaatcaactagtggacgccacagtcgaccatgaagtcctcacattcatggatgtctattccggctacaaccagattagcatgcacgcactagacaaaaaacatacaagtttctgaactggaatcgggatttactgctacaatgtaatgcccctcagacttaagaatgcaggtgaaacttatcaaagagtagttaactgtattttccacaatcaaattggaaacaatatggaagtttacatcgatgatatattggttaagctaaaaatatctgaagaccacattaaagatctagaggagtgcttcaacatcctacagaaatattgaatgaagctcaaccctctaaaatgtgccttcggcgtctaggaaagtttcttagattcattgtcaactcaagaggtattgaagagaatcaagaaaagatcaaggccttgcaagacatgaagtcaccattaaagataaaagacgtgtaaagcctaacaggacgaattgctgcacttagcaggttcatcgccaaatcaacagacaagtgtgttcccttctttaatttacttaaaggaagaaataaagggtttgaatggactaatgaatgttagcactactacaatttggccttttagtgacactatttagtgacacgcacaaaagtgtgggtcactaaatagataggagtaatttttagtgacatgcaccattagactctaaatgttcagtgttagtctcttgcaatgtgtgtcactgaaaatatagagtgtcaataaagattaaaatctattttttatttttatttttattaatttgaaaaattgagacttatagtgacatgccaagcgcgagtgggtaaatgtacactgacacacctggcgcgtcactatatcaat

SEQ ID NO: 301010 - DNA, 3893 bp, Cannabis indica
atatatacatattaatattattatttaaaaaggaaaaagtgtgtgctccataaatttataaggaaaagtagtagaagtgctcaaattattggtgccctttggtaacaaaaatgctcttaattagtttgccagcaaatagattcaaagtgggttttattatggtgctaccttccacatataatataatatatatatgattaattaaacgacatatatttaattaaggacttaattaattacaattaattaattaattaatgatggtaattggaggaggaagcaaaagagatacatcattactagtacggatcaataagtcttatctcatttagttaatccttaatgtcctctcaatctcaaatatttgctataaatatgagaaatattaaaagacatgagtgttgtgtgatgcttttttggtgtcatatccttatttatacaattaaatattagttagaatattgttaactaatcatagagtgtcacctctaagtggtgctaaacaccactagtacataataatattctttaaatatgtatagatatgagcattgctctctcaaaagaaaaataatttatacagtagttactaaattaaaatacgcaagatttaacatttaattacattaataatattaggacactttatgataatgttgaggctagggaagcacattttccatatggggatgagactcgcgagaacctgctccaagtggatattccctgtctaaatggagaacagggtgtggacatgaatcattttttatttctaaatgttaaacgggacaagatcggggatgacactctctgccccaatgggagctcgtttaatattttagttatattttcaataatcttttataatttatgtttatattttttagtatattagtatattttttttataaaaatttaagttatattttagatgataattagtaaattgaataataaataatgtatactattttattttttatgtaatttatatttttataatttcaattttttggaatcggtccttcgtagaattggttttgtggataactagattttgttggtgatgaaatgtgttagctcggctaattataaggtggtttatggtggtagagtcatgaggccgattacttctacccgtggaattcgacaaggtgatcctttatcaccttatatctttatcatttgtgcggagggtttatcttcattgatcaaaagatatgaagagaagggattgatccatggttgtaaagtggtgaatggcgctccaaaagtgtctcacatgttattcgcagatgacaagtacttatattgtaaagctactcttcaagaaactacacatgttagagacctcctccatcaatttgagagtgcttcaggtcagaaagttaatttggggaaatcatctattttctatagcaccaatactgtgggtcacattagggatgatattaatgcactactacaatgtccccaagaaaatgacatgagtatgtatctggggctccctagtactatgggtcggaacaagtcggttgttctgggattcttaaaggattgggttcaaaaaaagcttcaaggttaggattcgaaagtattatcacgagctagtaaagaagtgttgatcaagtcagtagcacaagctcttcttagttacactatgaatgtgttcttactacctatggagattagtagagatattgaaagcacaatggcaagattttagtggaaaagttcttcgggggacaataaaagaatctcatggatgtcttgggagcatatgtgtcacaataaaaacaatgggggcctgggtttttgtaatcctcgtgattttgatttggctctattgggaaaacaggattggcgctttcttacaagacctgagtcacttgtttctcgagtctttaaagttcgttatttccttactggaagctatccttcgacatttcttagaaataatccaagttttgtgtggcatagtatttgggaagctcaagctattatccgtgcgggtgttcgttggagtgttggaaatggttctacaattaatatcctagacgagcagtggtagcctgatcaaaatcagccctttgtggcttcgtgtcatcctgccctccaacaagctaaggtgtgtaacttgatgagcattgacagatgttcctgggatagtgaaattttagatgatctgttcgaagatagggataataggttgattatgcagatccccctgtgttcaaactagtcaagtgatgtattgaactggtttaaagaactggtgtgtactctgtgaaaagtgcctaccagttaattcaatcgttgaaaggtttgtgcaatgaggtggaagcatctgagttttagaagacattgtggtctttgaaactgccaccaaaggtaaagaatttgatgtggaaggctttaaccaactgcctaccaactttagctcagcttgctactaagtgagttgttgttaatcctcactgccctttgtgtgatgagtttcttgagtctataaaacacagtttgatcacttggagagtgattcagcaagtatgggaaagagtcggcattggtacaatggtggctactgctagtggagaatttttggattggtgtgtgactatttttaagactttgactacagatcttcaatgcctagttgctgcactatgctgggccatttggggagcaagaaacgatttagtgtggcaaagtaaatcagttaatatttcaacaatagtagcttctgctaagagctatcttgatcaatggcagcacgctcaaaaaactcaaattgagtcatcatggtttaatcttcagcattatgatgggatagagcgttggcttaaaccacaggttaatagcattaagatcaatgtggacgcagctatcttcgaaggacataatcgttttggttgtgcttttgttgtccgagaccataatggcttgttgctggaaaatcacacaaaattacatttgggcaatgttgctccgattattgcaaaagcttttgagctttcaggaagcgttgagttggattaaaacttaacctccttgctctatttgagtggagacagattgtttgttggttgtccaagcattaagaagctcgactattttagcttctcattttggtggtgtcattcaagaatgtaaagccatgttggctaatttatgtaatgtttcattttgttttgttaagcgatcatgagtttgcaagagcgtctttattttaccctgattgtactttcagtttgaaaaatattccaactgaattgtcacttactttggtgactgaatttgaaggttaataaagtttgattttcctttaaaaaaaataataattattataaaatattgttaatcatgccacacctaaaagtgttattcactataattgcaattggtagttaataacagtactcttatttatacacaagaagaaatacaagaaaatagaacaatgaagaacaataaaagaagaagtaaaatacactcaaaagaataaccaaccaacaattaagtaagtcacaaacttaaccctagtaaaaactaattaactaactaattaattggattctgagagtgagatgtattctctaattaactaaatcgacatttgcatcttttgttttaacttcacttattttattcagaggacataaaagtaattaaactcttaacaattaattggtagaatgccaaatagcttaataaatgtggtatttatcttatttatgaggctgtccatcaaacccatttaatttcttctaataataataataataataataataataataataataataataatactttgtaagttaataattggataaatattatgtttttttttttttttgaggaaaaaaaaactgttattataaatcaaa

SEQ ID NO: 301011 - DNA, 5100 bp, Cannabis indica
gttataactaaatagaattatacgtagaaaaaaaatcaaaatatcaaaaaatatcaatgtaacaaaaataccaataaacaattcttaatactatattatattaaaattattttcgagtacatataatatttacttaataagatgaagtttatgtgtacactcttatacacgtgacgtttatattgatacacttaatttaattatttgaaaaatataaaaaaaatatataaatataccacatgtgtaagagtgtacagataaaccgtctatattttagtacgggtgttgttcatcaaactgctcaaaccgcctgtactgcattgcaccgcaaaaaagtgcgatttaaaattctttgcagtgcggtcgcaatttaaatttttcctaaactgcgcggtgcggtgcaatttgcagttttgaattgtttatatgcggttcaaaccgccccataccgcacattataaaaataccaatttttatatttatttaggtctaatatgtgaatatccaatccaaagcctactaattattttattattgaaacttaatttttttatatatatttattttcaagtcttatggtatttttgacaagttttgcccaagctttgttatatttgtgatagtttaattattgatgataatccaaaccgtaaaaaccgcaccgtaccattttttgcagtgcggtttctacgattttttagttttgtaatgcgagtgcgatttagaaaattgaaaaaactgcatgtgcagattgatttgaaaaaatagtcaaaaactgcaccatccacaccgcgaacactcctaattttcagttaattttttatgttaataatacttaatttatatttctgaaacttccgtaagtacctagacaataaatttcaagtcattatctacgtgttattttcttattagtatatttaaaataatttttaaattacgtataaaaatttaataaaccaatcaagaattgctgacaatttacttcacttaacaactaaatacttataaaaaaatttatagttataacttaaatattattacagtcaaatattaaatttaattattaatttataaccgaaaattaaatttaattatttataccacaaattacttttacaaaatactacttttaaaccagaaggcagaggcacaacttatatttaagggtagttgctagttagtttagggttggtttagtagactaagcagatgagcccaacgctagtttcaaaaatgggcctcgattggccgaaaatggactttggaaatagctccaagaggctgggctgaataattaatgatccaattggttgtctgattgaaattacgtctaatgcacatcaattttttttttttagaaattttcaaattattataaatcaatggtctgtttacaacaataaaaaaaaaaaaacaagatatagaatttctccaattcaaaatacatttttatctagctctacatcatactttgttaagtcgcataattagcatgcctaccaacacgagtaaaaataactttaaaaaaaaaggacaaacaacaacaaacacatcaattagatctcaaaaataagataaatctatatgtcaacctcaaagttgaaaaaattcttagtgtatccatttcaacatgtactattaaaatttattgttgattaggccaactgacactatgaaagagtgcttttacttccatttcattatttctaaaatagccttaaactgacttgaataacacagtaataactttacctttgtagtttcgaaccactgctccaatattcagtacattcatctttagtataatgtacatcattactcttatatgtttatacccaattatgattttttccaagtaataatatactgttatttgcaaccgtctattatataatttttgtttatgtatatagttcgatttattcattgattataaaagagaaatttaattttatatgtatatattactttaaaattaatcccctaaacttatatgtattaatatttactaaataggtcaacatttctccttttcccaaaataccctctcattttcaaacagcaattatctctctactaccaacgagactgtgactgacgacccaaccaccaccaattttccatatgaggattcacgcaacccaaccaccaccaccaccacgacccacgatccaaacaacacccttctccaccacccacgacccaaacaacactcttctttaccacccacgacgactgtgactgacgaccaccgtgactgatggactgaagatccctttctctacgaccactgtgacccacagacccaatgtcaaaggttagtgtttttaaatatgtgatttatgggttgcaaatacattttttaggcaagtccgatgcattctcgatgcatcgtgatgaaaaaattggatctgagttgaagacaaaaacccgatatagggtccgatggccaatcaatatgaattatgtaagaatactcacaagtagaaatgggagtatttgtccagattggcgaatactcgaaaaaaaagggggaagtagaggcataaatacctaaaattttaaatttgtaagcgacataaactcaatatttattttagtgacataaatactcaatatttgtaaaactataattttttttttttactttcgtcagtacaaatttcgttttgaatttatttaaaagatatttgaaagaaactgatactacatgtttatgtttagacctaatgatttagaacttgggctttatatagcagagtctgtactgacaaaattagaaaaaattggtctgcttagtccatttcttaaagatggtttgtgattagtcttatttgtatctaatcattcagttacataaccgttcagacaggaccgttacacacattaagtatacttaattgaaaaaaaaaaacgtttgtaaaataaatgaaagagttttgaccattcttagttagtactcaaacgagtgcgactactttgatcacatatcagttgttcatattctcggtaacatgtgaacttgagggttcactcgagttaccgagtatattaagactttggaccatgtgaacggataaacctttcggagtttgtatagatgtgtgatatcaaggttctgatccatattatagaatgtatgcgattatactggtcgcgtattgaatattcacgtactgacaacataagactcgtgggtccatcacaagttgtcgcatataatagtcatttgggttaatcgctgtaaagatgtgatctttacatagagtgctggggaaaaataccaagtcatcgcatatatagtccatatatataaatataaattgtgattgtgctaacttctttttgtatgttccctttttttttttttttttactatgtagtgcatattatgcgattagttcatatcttcttgcatatttctagcatgcacaataaaaaatcctattagaggtttgcccttgacatgccattttttttactagaaactgagtcgtgtcaaatataaatatcatcataattttggatgaaaaattcatggcatggaaagttttcatatttgtatatatttatatctcaattcaatattaaatgcgcatgctttatttgcaaggagacagaaagtagcactaagatataggacttacgtactttacctgagttgcactctcactaacagctttttacaatttttagtttaattttaagaagaacttttaaacctttccaccatggacaaggaaaatataattggaggttgtcttgtcaccctaaagaaaagcataacacaataatggaagctttttttttcttctttaaatagagttcccctattaaattaatgtacgtctacctctatataagggcagactcatataagagcaagacgggtaaatctcggcttttaaaaaaaaaatcaaaattacaaaagatatgtattttaattaattatgatatatttataataaaaaaaaataatatctataagtataatattaattttagtgtaacaataaaattagataacatataagatagaagtgaaggatttaaatcccaccaataatatgttttttctttttaagtttatttttgcccttgtcttatcaaaacaaatttacgtcttctctcactttaaattctatgttctctctctaattttttcaattgtatgagttattaagaacaaggtaagaatcgtatagagaaatgttgcataaaaaggcatataataccaaactataaagagataagatttaaagattaaagtattgatcaaatgaaagtatcaaaaagctatatatcaaagttactacagtggctaagatcaatattactaaagcaactcaacaaagttaaaattattagctttcgattatattcctttgtgtcttttaatttcttttggtttcttgtaataaaggatcgtactttttgatttattgcattgtatatgatacttggatgactactttttttttcagatctatttggatgacacttaattccacttaaaactacacattacaaaaagaaaacaaaaactacactatttaattttttattaaataactaataagtattaatattatatatcattttagacttgttttagaaaagttactaatcacactataatttttaaaatatgtagtacaaaataatacttttactttaattttttcataataaaattaatctaaacctaatttttagcacaatcatacgatctcaattgtacaattaactaatttaataatattgatatgtatttttaataatatttaatttatactttatatttttaaattgtacatatttggtacctaaagtaaaatttaattaatacacttttatcaatttaaccaaagagatctcaattgtatgtaatttaataattaaatttgaattcaaaatttataatatgttaggcagtttgattatattaataaaattttaataaaaaaaaataaatttagatattgtttggtaagacttttattttctaattttttaatcacaaaataaaagtaaaatttttatttttaaaaattttgcttttgaaaaataaaaatactttttgcaactacttttgtt

SEQ ID NO: 301012 - DNA, 2446 bp, Cannabis indica
gacaactaattgccaaaaaaagacctaacaaaaattagtgagacatattgaaaatggagtaaagaagttgatgtgagtgctttaagagcacttcgaatgtatcttcaaaaattggatttggtgtaagaaattggtccaaggtatcactaaaaacttacactattattatactgtgtaagctacagtatgttgtgcacagccacgattttttttaaaaaaaaataatattatatatatgtaaaatatttcaatgcttttaaaggggtgtactaatacaatctgatctattttagcagttagaaattttttttttaatttaattttctttcatggttgtatatgtagtagttgtttaagatattctacaacaatattaagaaatttagagaaatttagcaagcaagaagttagattcaaacagtctattgtacgaataactttttctacgagtgtgaaatagattgtttcaacactattttttatattttaaataatttttaattattgtggttggagtggaaagagtttttgacaccaaatttagtgttagtgtgacaccaaatttagtgtcaatgttagagatgctctattgggagtgctctaagactatcttcaatcctaactttactttaaatcatttttatcttcattttttaacctttttcactctaaattattattttatctccaatcactactttaaattttaatttaaccaagaatattttttttgctctctttattcatcaatatgattaatgtatttaggaaatgtttatattaataaatatatttaagttaattaataataatttaattatcattaattttaaacatacaatatattgctttttaaaaaaaataaataaataaaaatatttttctaggttatgtttgtaatagtagtaataattgttgttattttttgttgatgtagtttttttttattatttttaattttaaatttaataattctatttgtattttatttttaatagtaattttttggtgtaaatttttatttattttgattattgaaaattaaaatatgaaatttgaattattattataattacaaaaataataaataaaatataataatattttattggaggatataagtgtaaatgagtaaaataattaagaattttttgggataaaacttttcctttatataaacactgattccttcagtattgaaggtgcacaatgtatttctttttaatgaagttaaagattaagcatgattggagttgagattttttggttttgtagctttaaaataaagaaaatgggttttgaagcattccatttgagattgtacctaatcatgctttctagaaggttaaggatttgtttctggatgaaacacagaatgaatggctgatttgagagtgttttgatgaggagatagcgaatgatattttgaggatcaaacctttgcttggaggtacaaatttttattctggaaggctgcaaaatcaggtattttttttttttggctaagagtgcttgttgggtaagtcaccaacaacgttttaaagttccaagcgagatgtgggttaggccatggaagctgagcctttaccctcacttgaatttactatgttggaaaatcttatctgatatcctacctactaaggcacgacttggtgtcagaattagtgaacaacaagtgtgttgcttctgcaatatggaaattgaatatactttttatctattttgtcattgttctttcactcgtgggatttggtttagaagttattgggagcttcgaattgactgcatgaattggacaaatcttatagacgttggcaagtggtggatcaacttggaagattttgagctaatcatttttactggttgtgtttgtgacacaatctagaaatggagaaatgacatgatcttcaaggatcttgtaatctggattgggattttacagactatatcgtgagatacaaggaattttcttgcgaccgctactggtttgaacaagaggaggtactagacttatgcttgcagagacgtattcagcaaccgaaggagaatttctagtgctgcaaagtggatgcttctgtggtgaaggcggaagctggttttgctgtttttcacttaaacgcgtaggtgtttgaggagtcttgagtaggtgtggatttctcgtcagtttatgtgtgttggaaggagaattgagtggtattgccctggctttacagttggcaagggataaagaggtaacaaaagttcgtattggaaatgactcgatggcaaccgctactgcgtttgaggttggcacattaccttttggttggagtacctatcatttgttctctttctgtttgaatctttgtaagtcttttaaggaagttgttgtttcgtttaattcctcagtcagagaaccatattgctgattctttagcttgttgggctagagtggcaaggatcaaaa

SEQ ID NO: 301013 - DNA, 2053 bp, Cannabis indica
taacagttcaataattttgaagattttactgttaaagtttgaatttaaaaaattaagtacaagtgaaatgataattaaaagaatttaattgtcaaaaactcaatatacttagaaagatttacactaactagtgcaaactttttcgatttgccaaaactctctataaatcgtaggctaggaaatcattgattcatcatggagaccttggattcactttgcaactttaatttttggagtagaagagagaataattgagtgacttaagcatcaaaatgtctttttgcatgtattccttattgggttcaatcttttagttcaagtaaagagcacatataatgattgatcttatcaattaaatacttaaatgtgtcatccaagaactcatcatcaacactctaagcatccttaaagatcattcttaatttggaaatcaaatcgagtaagataattatgggatccaaaatataacgctcttatttcatctcaactgatgctcttatatgagataattaccaaaatatcatttcagtatactttctttttattaggagggtgcataaattgattcaatctaatgataaccgattgatccaattacaatctactaacaaacattggaaatctaattatgttctaatcggattcgatgttatttttgaatatctaattggatcagatcggttattggatggggtgtgcaaaaatctaatatatctaatatctaatcgaaacaatagtattttcatttagtttagacgagtaattagattttatattgttatacgtaaaatatatatgtatatatgaacattaaaattttattctttttttctttgattggatgaatgcaaaccttaaaccctaaaccctaaagactcagttaagttcataatttgaaatgaaagatctttgagaaactaaaaaaaaattgggatggagatcacaagaaacagagttgcaagaacaatctatctaacatagactcaatacctgaagaaagtattcaaaggtttgacataaacgagaagactaaacctgtcagtacacctcctgcacctcatttaagttaagtgcaaggatttcacctagcaccacaattgaaaagaagaaaatggagtgtattccatagcaaatgtcgttggtgccctaatgtatgtaatggtatgcaccagacctaatatttcacatgcagtatgatgagtcgctacatgcacaatctcggtaaaggtcactgtcaagcaatgaagtggactctacagtatggtactgtatatattagtttgaagtttgagagagataagactaatggtaaacatcttgtcggatatgttgattctgactacgttggagatttggataagcgtcgatcaaatactggttatgtgttcacaatggcaggtggaccattttgctggagatccacattacagtcaactataactttgtctactacataggcaaaatatataactgtaacagaagcattcaaagaagctatctagcttctcgggttgaccaaagatttgggtattgttaagaagaatgtggaggtttgctgtgacagtcagagtaccatttgattggtaaagaaccaagtccattatggtcacactaagcacatcgatgttcaattttattttgttagtgaaatcattgatgaagggaatgatattctccaaaattttggggctgtagataaccctgtagttatgcttacaaaagtggttacaaggattaagtttcaacactatttgaacttgatcaacatctcttaagcttagagcgcctaaggcgcatgtggaagtaacgcttttggtttttttctttttcttttataatttatttatagttgtggttatttttcataacgacatttcttctaacgattaaagttagctattttcattcaattttttcttaattaatttgaaagactcaaagaaaaaaatataaaaaatatgataaatatcggcataattactcaaagttttaaatttgtaagtgatataaattcaatatttatttttagcggataagtacccaatgtttgtaa

SEQ ID NO: 301014 - DNA, 1888 bp, Cannabis indica
aattatgaataatatatataatttaataatttaatttaattaatttaattaaacttactccataatatcttttccaatagcaagaatcatgatcagctgcttgtttcatgatttatttttgatctttgattattttgtaataagatctccccaagctttcattattagtagatgatgatgtcattgatgataaattatttaatccttttgtttttttattattattattaatcttatcatgatcatgatcatcagctaacttaggaagctcatcatcattattattgttattatctatgatcatattcatattaggatcatctatattaatgttcacaatagattcttgattatgatgagttggaaaagtagtaatattgttagtaacaaaatgattatgattatgatgatcatgatcataattaacaatatgattaatgttgttgtaattatctactcttattccatgctccaatgatcttaaatactcatcaaccataaagggttgatgatcttgatgagtattgttaatcatataatgatttagtgatgatagtgatgatgatgatgatcccaagagattgtgaagcattgcttgatccatattagggttagggttagggttagggttagggttagaagtggggcctagaacttggaagatattttgaagaagttggagtttggatagtgattgattagtagtattgttgttgttgttgaggaaatttgaggcaaagttggctgcaacaatgagttgtgggagatttgagagaagattgagatgaatatctgttctaggtctatgtgtaactggatcaattcccatttgtaaaagcttcttcttcaaatgtgtgttccataaattctttatttcgttatctgttctccccggaagatgtcccgctatagtagaccacctattgtttaatcaaaacaaacacacaagtaataaaataggttacgattctgatcactacaagaaaaatgatgatcatcaggaatgacaacagtcgtccctgaaaactttctttgtcgttcctaataaaaaatggttgttcctgaaaacaatgctctttgaccaactagtagaagctatcagggacgacttgtgagtatcaagaacaacaaactattcacaattaattaggttacgatcctgatcattctgattctgtaatactgtaaatgaaaggaacataagagtttgtcgctaaatatagatcgtcaagttcttatagaatttattactaaaatgcccctaaagaaatacattattcaatcaatcagaatagaagttgaaagagggtatttatgctcgtcatgtttctaataattctatatcataaaatatatatgcatatatgaacttacttgttgccaagaacagcatggagattgatgatgagcttctcttcatcctcagaaaacttgcctctcttgatatccggcctaagataattggtccacctaagcctgcaactcttgccacacctattcaaccctgcaagcttaggaagagctctccaacttccatgcccatttcttgttatgtaatccacaagcttctcatcttcttctggtgtccatggccctttcttcaatccattctcatcacaacttggtgatcttcccataatataataatataatatatctatatataattagttatttaacaacaaactctacaagaaaagatcgagattattgttatatatattatggtgggaattatgagtaaaaaatgaatcttgttaaatgaagatgcttagagagagattgatcaagctttggaaacacatgtcaacaacaataacaatatgtgtatataggtatagttatatatatatatatttatagagagagagagagagagagtagtagt

SEQ ID NO: 301015 - DNA, 5336 bp, Cannabis indica
atatatatatatatatacaatgacagaagaagtttttatacacacaaacatacattcctctcctaaaaatgagcaccatcaccatataccactagccgcattttctcataaattcaagagatttatttccccatgttccaaggctgaaaaactctatcttttggagctatatagccagtctatctatctgtcagcattggttcccttttgtattttctttctctctctctctctctaaattaaactcaaagagtctgtgctcaacaacacaaactccttcaatgtaaaacagttcaagcagttatgtttacacattttcagcatgttaaaactactctactactccaatatagtagatattcttaatcaaaaggattatattaagggggtatggtatatagaaatggcttgccatgttctttccacgatgaatatggataacaatggaagatagatagaattcagacagaggataacacatcattgtcaatgaggctaaaaaccattgacaatcaacaaaaggcatttcattttggtaagatgttgacccctaacttaaaaaataaatttataaacatgtgaaggccatgttactttgtctgcagaaagttttataaagacaaattagtgagggggctgctgctatgagcatatgagcattgacactctaagcagccagccagcttagcatttctgaccatatcaaaatactctctgtaccttgatattgtacaatcatactcatatctactccttcaactagttcttgaactctactactttgttcattacattcaaacctgtagctattacagtgagactgagaggaatataaactacactttgtctcttaattcacaaactcaagtatatgtagttactagaaaacaaaacagattggtgatgtaatatcagtccaggcagagatatgattaagactttattaaccccatgtgcattgacaggacacagttccagaacattttttttccaactcacaaagctaggtgaattgcacccaagatagatataacaaagttgggtattgtattcttttcaattattctcaaatcggtaaagagttgttttcataattataaatttgggattaacatttttcatacaagtattcagaatatcaaaggacagcaaacatgagtaatgtgagttgacaactaaaacagaacatgaaaagagatggcctcagtttaaacatgtataataataatagcaacagatagataggttggttacctgaaattagctctgttacaaagaagtaataactatggtacacaccaatcccagtttcgataatgtgatgatgccatatacatgttgatccttccatttctgctagttccaattctagctttgattcaaaagaaaagtcattctgtgaataaaaaatttagtagaaatagcaccagagcctctttgcactcatttcaccaagtattaactccgaagacgggagaagcaatgtacaatacacataaccaattgttaatccatttcgatacatgaagagagaagcaatattttcattaggactaaagttctatttctcttttaaatgaaaagagaaaatgaaaattaaatgcaaatccataggttacattgaaggcatcattccatgtagctaatcgttgttgtttgcacattaaattttagttagctctaaaagcttcacatactaatacaaatttacacatactacatacttctaaaatcaacagagaatacacatgatcacatctaataatcacaagtgctagctaacactccaatgctttacactgatgagaaaactcgaactacaatctaccatgttcatgtatattcattcgaatccagagggtggttttgacagctgaggtaatccatccattgagctcaactgtcttttcagcttcataatgtgatcttgcacctaccagatagattgtatacattgttaggactatataatccactactttccataaacaacaatatgttcatgcacatcagatgaatcaagcatgtacttgagatagagccaatgaatcacaagcatttatgcaaagtgaattggcatgtgcaacaagatatagctctaagtgaaaaaccaattcatcaaaagtaacttaaacccaacaagatgtattaaatggtactgaattagacatctacaatccagatttgacttttggagcttgaccaaaaagtcgagacctacgagcatacaaccaaatacaactagaacaaaaaagaaaagtaacaggattttattttatctcccttcatgcaaaaataaataataagatatcagagcatggcagaagatttaccacaaactccctcttgttagaatgtccacacatacatcagtaacattggtcatatgtcaacctttttattttagtttttttcatttacgttttttttttacatagctagcacacatggtgcacatagcaaacaaacaacaaggaggtcccatatgttcaaacctgagacgtccaccttaccccaatcctcccctcaccaccaaggtcataagtcaatcaattgcttacattattatgttaaattcgtacttatttgttttgagtgtaatagtcaagtgttatttcttctcatttaataataagggaagtccaccttacaaataataataatgatgataataataagggaaagtccttgattcaaatcctaagaatatgcagagagctaaaggaaaaactttgttatttctattaagtgcagccaatggaaaaggatatataagccaattacatattttaaataacagtgggacaaaaaaaaacaacaagaaagaaacttgtttagtcatgggaataagtgtgatgcatataaaggaagaaagaataaataacctgttgccgggcagctgcaagttttaagagttcatcagcctcagagaaattcaagaaccactgattaaggggatgatccttggttatatcctttttccctttcggtattttcaatttgtactgcaaaatcataagaaaatgtaactcaaagcatttgtaaaaagataaagaaattaatgagaacatcatacttaaaaaaataccaggattaggtaaagtaagtccagctggtaaacggggcacaagaacagcagggtgattctgcacacgagcgaaaaattcctccgatggatcaggaaaaacaatctcattgtatgattccataacaacaggtttcttagtcgactggggaccagattcatcttcaggatataacttcaaatgatgatacctgcaaacgtttttataagctccaataatatcaagatttcacctcaagtaaacaaaaccattacagagtaataccacatctctctagagttatctcattttttgaaatttcgattgaaatgataacaagttcattaaagattatattttatttttatgacattttcacacagtcactgtatcatttagtactgagataacagctcattaagagaaactataaccaaaataaacaacttacaaatccaactgtttatcacatatttcactgtggaaaaatagactgatagcaatttcaaattcaccccaaccacactctgttaactcaaatggggccgattcaacaactcttgtaggattattgaaactgggatgcaattgaaatacaactctctttaacaccaccccaagatcctcatttgtggccccacgaacataaactgtccacttatgagattgagacctaattaaatgaatgaaaaattttggtgaaaatatccaaataataatgtgtcagaatttaaacatgaattcttaacaagaaaacaacacttactcactagcctttcgacccagatagaatgcaattgttccatatacaattgggacacaaatttcaacatccttaagtctcttgcttgcaatctataaaaaacaaaaaattacaatattacaacaaatagaaaaccaaatgcaacaggagaataattaagaacttttgataaattcttaatgaattcgtttgatatgccatatttgatctattgtgttgtgtatcatatttttctataatattatattaaattttgatttacatcaaaatagtgtatacttatatgcacatacaaatcaatatcaaacatggtacgacataatcactgtatttgatcgtattgtgttgtatatcatattttcctataatattctgctaaattttaatttatatcaaaatgttatatatttatgtgtacataaaaatctctatgtttatcaatgaaatgttgattgttcaaaaaaaaaaaaaattaatattaaacatgttactacataaacatgtacaattcaattcaatataatattatacaataacatacgatgtaatacggtatacaaatcaacccaatatcatcaagtttttatttttcataattccctgaaattattttgatagaacataattccctatattcaacaccagaaatttatactcaagaaagaaaataaaatctgggtattggaggaatcgagcagaacataaaacataccttcttatcgttatcttcagcaggtttgggaattctgataggctgcaatactgggacagagtcgccatcgtcaggttgagcttcacctacttttcgagacattgttgaaaaaaaactcgagctaattgtgtttttaatacagaagcaaccaatgctaacaaagaattttacgtataaagatcagaaagattgtagcttgtggaattcagattcttgcattttaggtttcaaaaatggcgcggtagacaggaagaattaggggttagggttttagtgaggtatttttttttttggttagtgattaatttcttggagaattaatcatatatctattttttttatttttttttaactttaccatttgtgttatttggttgttctaatatagattttagttgcgatttaaatttttcgactggttgttatgtgaattttcgtaaaaaaaaattaattttttcttccattttgaattgagttttttatttgttgtgaatttttactttatttttggtaaatattttatgaattcttgatttgtgtcaaaattacattaacacatcatgcatactttttttttatagaataattacataaggcacaattttttgtgaaatatttatatttttacgttcaaagaatatttttttacatatttacggtttttcaaaaaataacacgaaaataacataaaatcaacaagaaaactatataaaagtaacatgaaaattacatcaaaataacaacaaaaaataaacatacagataacaaaaaaatcaataacaaattaacaagatta

SEQ ID NO: 301016 - DNA, 4252 bp, Cannabis indica
ttttttttttttttgctaaaaaccaaaactttattaaaccaaaacaaagagtttagggaacacatggggacttacctcccagaaacacaacgcaccattgcaagggtgagacagaccccacctcgcaaaggcatgtgtagccttattgaaaatcgaaaaaacccaactaacaacactatctcccaactgaagagaatgaaattgattatctattttagttttttggctaaaaaatggagagtacccttcgagttggagacactttaataaaattgttcattttaattttgtgcaccaaatgagtttggacattgaaattatcataagaaaattcgcaacatattagcatgaaaaaatataaatttgaacacgacacaatactaacttaaataaagagagcaataataaaaaataatgattctcaaattttagttaaaatttagctaaaatacattaaaaagggatttgtattaattagaattgtattttttcttttaaaaaaaagaatttaataattacgtaagtattaggtcatataattttaaaataatgaaatactttagaaaactacataagcaagcaaataaaataaaagtcattgataaacctaaaagccctaaataaaaagtagatttcatacagaagaagaagaagaagattacagagtcagaccacacactcttctctctctttccttcgcaactccaactcatccttccaaccaaggtattattatcatctcagtcttcttttgctttcttcctatattgatactattctattctattgttttgtttacctttaattgttgagttccaatgtagtttaatttccttgtgtattgctttcttgctctttttctctctaaattagaatcttttcctgcgtttagaagaatgtttttgatgcccagttagttgtttgaactaaattgtttgtggagtattgatttttggttatgtagtttaggtgtttgattaaatgtttcagtgaaatttattgttggtgagaaaaacatatgaatgattatggtatttaagcaatactcacacacaaaacaaacccttaaaagcttaaatcctacgacccaaattttgtgtcaatacttgcagtttcaatccaacaaatggaaggagttgaaagcatattagataccttacacgaagaagatgatatctttgaagatgatgttgaaatggttgatgtggaagaaggagaacttgttgaacaaaattcacacagtcatttggatcaaagtcaaaccaatgaaaccaaccaagattctcagagtaaaacgcgcaggcgaagggctaacaagaagaagaataagcgaaaaagggcaggtggagctcctaatgtcacagatataaacaggtaaacaaggtttgggattttcatatcaaacagttactcaattcggaaaatgttgtgaaaataagtctctgtcttttgcagatttgtgttagatacatgtaggcgtttgaaagagaagaaatcgtacatggtttatacggcagttggatgtcttggggtctccgcattatgcgatctcatcaaagaggtatggagttcttcttcatgcattgtgttttaaattcatatcggataccaatagtgtttaaggtttatttcagcaacttgtctttatcatgtttcgcagtcctatctgtagactatgctcaattgatgtaaaaatatagcatattgtttttcatagaaaatctataaaaaaatggttgtctttagtgggattttatataccttgcattgctattcacagaactctcttgaaactggtaatctatctctttgtcttctttcttcatgctctgtcaaagactctttcttgttgctgtatcaatcttcttacccgttagacggattatgaacttggaactgcattgccctttaaggtttatctgacctccctagccttctgtctactccttaatctctttatttccccatttggtttagatattcatggtatagttagcccttctaagtgaaggtgagaaactggttgttcttgattttgaaccagcaggggagctcaaaatatttatccactctagtagccacaacgattcataatttctgatgctcaacaatgtttcccatcacttgcagatttctattgtagatgtaaaagctattttgctccttcaagtcctgtgctatgtgctttgatgttccctggccgaatcttcatcgtttgctttttctgtatgttgctaacattttatgcgggtaattttattagccaattaaataaacttaattttaatttttaaacatgcatggttaacaacgagtgttggttctctttaggatgccagtgtccacattttgactgtgaaaactcgtactgatctagttctcacgagacaataataaataggtagagaaaaggcagacataggaaaacttttcagttcaagaattgtattcggtcgaaaatttggatgcccatgattttgtgttatgacaaggatggttagcagaagcatttctgattgtatgtctctttaattaattagattgtagagatgtagggggaatgttttcatgaaatcatcttgtttctgttatcaatcagaagaacgggttacttgtttatctcccaatctgaaagtagttggaataatctttttgatatgtataagaaaatattgtaggtggaagcagtccaggcttgtggaggtcagatgacttctgatggcagacgatatcgaacaggtggtggcatattatggagcatccttaaaacgcgagaaccaaaagcctacaaagagataatgaacaaagcgaaagagtttgaggtgcgttaaatctgaaatagtgaactaatattcatattcatattaggacgacatacatattcatattaaagaatgtaaaattaatgcttgattacttgtattatctttatgcgattggcatttcttgtttaagaaacataatcattttaaaattgaaccttactaccacattcggagcacacttgggaatattccatgtgaaacattctagtatcgcgatcaagcgaaaggtttccacattctttagtatttgactcagtcatccaaatctaaattagaatccaaatttttctcacataccatatttcttgagtggcagccaaaatttttgtcttgttttcatttactagttcttaacaagattctttgtccttctgcagaagcaattcaagcaaccaaaaccaaatataagacaagaaacagaggaagggaaaggtagctcgtctcaaagcattcccgatgtctccttgaacaagacaacatccgaaataaatatttcggatggttcgccagtcatggtggaagtgaagaatcgaagtgagcccgcaaatgatgagaagaaaacagtgtctgtccatgagaggttaaggatgccggtttcttatgatgatgatctacttggtggcgaccttaaaaatgattcaacttgattcctggtatattttatttgtctttcaaaatgccctatggcgtcggtttcgataaagatggggttcggaatagagagaattgattccttattggtttttctggagggaacaattagaatacagagttctctgagtaaaaaattaactgttgttgagtgagaaaggtgttactaaagttttgatgtatttttttttccatacattcatgaatattaaatcattgtgtggttgagcagaacagtaccattgctaatgatagagaatttttaagaagtagattaatcaggctgcatgtcttattggatgctgtcttggtaaattttgaacatttttcaactttttaaataataatgcagcaataccataagtttgatcaaattaggaattatacccactataaatctctctcaagtactaatcaataatacttgtatctattaatttgtttttctttatcttccatatccccaatataatattatcctcatttaaagataagttgaaaaatatttattttttgtatttattaatcaaaatatttttatattatatattaatatatatccacttttttgagtgggttgctcaatatacacgcactctctacttaagtctagcatataatttactttaacctaaggggtctaatggagatatttataataaaagttgttgctccagaattcgcccaaaatacgtgggccagtcgagaggggacacgtggatcagataacttgtaaacatttgctaagtctttgtgcgccacaaggaagcgctgtt

SEQ ID NO: 301017 - DNA, 1600 bp, Cannabis indica
ttttcaaaaagtgacttatatttatattcacacgaataattttataatcttgctaatattttttttctatcattttaacttcgcatctaatattaaacaaaataaaagagaacaattattttctgcaaccttcgtactctccatctccactaagttctctatccatttaaatctctttctttcctactaaacttagtattaatacataataaataatctatattaacttgtattattatatttagaaagaattcggagttggaaattaggccaagactttaatcttgaccctaacttcgaattctaaactccaaacctgactccatatctaaattcgaatcaaaatcaaacctaaatcgaagagaatctaacacaatattatactatataattcaatacaaatactataaatataaaaggagtgctaattacaacgtcttagttaacctccacgtttaaaattacatgttgaaatatttttttttcaaatttaatttcataggattattcgttatagttacagtatcatcattgtaaatttttgaaaaattctgaatagtttagagtactgaaaacctaatattctagtttattatgtgtgttcaaaaaacttcaaacatatttttagtattgtaaactatttaaaattttttaaagatttacagagatgatgtcgtaaatataacgaacattactgtgaaaaaaaatatatttcaatatatattttcgggcgtaagaattaattaaaagattataatagtagattgagagtaatactaagtactctaaatgcaagaggcacaacgtagaagtgaccgaataattataagttacacatcaggtaaaggcaaaataagaacaatggaactttacgctgaagaagcattgattcacttccattttgtatttcttttatctcttgagaaaaagaatatagaaaagaaacattaaacacacctggccagtgccaccgacaacatatataattattttcaacggttccttattggtaaatgaccgtatgagtcactatcgtcggttgcactctgactattcccttaaaactctcatgcatctccttcaaattccaattttaccctttcactactactcaaccaaaacaaattacacatgccaactaaatgtaaattttttcagataaaaaaaaaatgtacttaatcttttgtgtccatgtttttatttgtttatttattatgaattgcatacaaagcataagtcgctaacatgttaatttgatgacaattctttagtgttggtggcatgaatccttttgttttttttttctttttaaaatataggataaatgaataatttctctttttaaataaataaaaataaagctctatctatactctctagagtaaaccagactctagctaatgtaaaatggatggtttttgtagatcacttggaggccagattttattatatttatttagttattcacttgtatgattataataatagatataaataattattaaggagtcatttggaacattgtattaaattgtattgtattatattgaattatattttatataatatttttatgtaaaattatatgtggtattaattt

SEQ ID NO: 301018 - DNA, 2406 bp, Cannabis indica
ttatatataattaatttattattatgttttaattatttttaatataaagtgattaagacaataaaaaataatataattattttgtgaagttatttttatgtatattcaatacatgtaaataattaattcttcgatgaataatattctatcattctttataaaaatgtatcttctaatgcatacatattatgttatttgccaagtaataaaatatttactctaatgtagtaatatcttaaatgttctgtctaaaaagaaacacatagagatgataggcgcttacctatcgtggagctcggtagtcttccttaaaattgctaccgattcttgaatagattgtggtatgcttgcaaagaccttttcgggtctatccgtaattaatccatcccgtgaaacaaaagatagttcattcttggggtgaataaatagagactaatgctacggaatagaccggaacttcgggatcaacctacataatatataaatatgtatttctatcaaaaagaaatatatatatatatatatatatatattttaatgaaacacattgtaaaagatacataggttgatgttacgtgcaatgcacttataattagtttttttttaattaagttcaattaggtgatgtttagtgcaatacatgtatgtttaattttttctttaattaggcaatgtatttttttaatttttaaatggggtttgagattttgatctttaacaaaaaaatttaaactattgctataatggagtgtcatttggatatgattatatacatatatgtattttttaaatatttaaaattttcttaattaggtaacgtatttgataatgcatatatatattttttaattttactatattcgtaaccaaaactcacataatcaaatttgagtgtgtttatatagactggattcgtaaatttgatataaagattttttattcccaaattttacgaaaaatatggtgtgtgaattagtttaccataactaaaataactaaaatggaaagcaatcaattttttataaccatttcaatttaaaatataaaataaataataataaagttaaaaatatggttaaaaatatttataatattttaaatttaaatttctttatataaatatttatattaattttttttaattttaattcaaagttaaactaataaatttaaaaatatgattaaaaatatctataatattttaagtattttaaatttaaaatttaatttttttcttgtaaaatatctatataattttatttttaaatatatatatataaaattaatagatattctgttaaagttaattaatagaattattagttaaagttaatgtagatattaaaaaaacattattaaggtagaggtcattcggacttggtgttgtgtcaccgcgttagggtgcaattggacaaggttgatattaatgtaggaaaaaagttgtatacatgaattgataataataaaaacgtcatcacaatcacatgaggttaaggttagggttaggtctatttaatttattcaatgataccaaagattcaataatacaataaacactcaagatgtagatcgatgccattcctaaactatggttatttttttcgaaacaattgttaaactatggtttagataacatttataatttatataatatgaatttatatatccttagttgtcgttgtttttctttttttttaatggataaacaaaatctctagctatcactttgacttatatgtttaatatttatattaataagttctagagaactcgcttaattacctcatcttattaagtatatattacgataagaagaaaaaaaagattatgcatgtcatctttcaaaaatgctacaaagcaactaaatatttactaaaaaaataaaagaaaaaagattatgtatatatgttaccatttcacagaatagtccttccttgatacttgatagagaacgtaacttcctttcctcctcttcgttctaattaaatccatgcaatatatatacatataattatttagattgaagaagtttcaatagttatatttttaatgtaattacatgtttatattttgttataacttacaataacaggttgcaacggatcatttttcaaacaaatttcaatattaaaattgaaatatattaattataataaactaagcaatttaaataaattatttcttttaatcaaattatctaataaaattttttagcaattaatatgtacatagatttcttttatatttataaattccctcatttgatattttacgatgaatatatatctttatatattaaaagtgcttatttaacggcatttcttggtttaacattcttgtttaatagaatatacttaaaaataaaaaaatattctgttaaatttaacgattaggtttgatctcccg

SEQ ID NO: 301019 - DNA, 3631 bp, Cannabis indica
tatgtagatattgaattaaacagatgaatttattaatcattacatctaattctattaagattttgtatgaaagtattatttattctatttacttttaatttgagaattgaaccggttatgattgggcgagaaaaaataaaaaaaaggttttttggcaagaagcttagctcatgttcaaaccagtaattacaatccaaaataaaatctgttcataaatggctgctacttatttttacaaaattatcaaactcgaagtatataaagaaaggaagaaaatagaagaagaagaatagaaattcaagcctaatgaagcttgtgtcctcctccttctttcctcgattgatttcctcttttaggtacttgatcttgagtacttttctttctacaatatttcttctctctttctacagctcatgtgtgtgtaatgaatgtcaatggaggctagtacttctttttcttctcttcccttagggtacacctcatttaccctaattagaaagtaaaacatctctctttggcccacataatctctttgtttcctattctcacattagccagtcggtatgaatttaaatgactgccacatgggtgttgatgtggatggattcaattatctttgtaacttgaccatgtcactgcccagaatgctgaattgttatagcattctattcagcgattcctcccacttttagcttcaataacccttttagccttgcatcatttccattcccttagcactttaactttcattcctaacaactgacaaggtttaattaaataaacatagtcaaacataactagtttacaaatctcaaaagctagtatactatataaaaaataaaaaaaaaactaaccgaacttaacaaacaaacacactttcattactctttacacaacaaattagtttaaagatcataacaataaccctatatcgtagagttatcacaccccaaacttagtgtatttcttgtccttgagtattgaaaattaaaaacaaaagaacaataacaacaaagaaaacaacaacaccaaaaaagtttctaaccgagagggtactgctcattcagaattagtttagcgaagaaaattctctcacaaatacgtgaatatcttgagttggtcaaggactggctgggctggagaactagtgtgaaaacagtggagcgggctattatttgtctagggaaagcgaaggtgagcaagatcaagataaccatgcttactgctgctcttgctgcactggtttactcggtttcgagctgtcgaaatgctaagctttgggctgttaaagaaagcaattgcaaggtgatttttcaacaggtacaaaatgtaactaagagtagagtatcatgtatatggccaaagaaggtttctaatggtgacaaaatgtggtttgattccttgtaaatattatagaagtgaggtcctctctttttatttgaggatgctctttgggtgtacaaaaggtctattggagtaatgaaaaatcatcttattcataaaaaaaaaaaaacgtgaatatgccttgaacttatgtgtctcaatcaagtttcgaatgttatagatatcattaatgcctattttgagtaattcaatcaatagagtgtggaaatacttcccacaaaaacctttgaatccctattataactaacctcgatcttcaagtttaaaaattttgcttccacaagttgaattagtgcaatcctctccactaatgtagtctacacccaagatttaaaggactttattaggcttgtaatgtgaggcttaggttagagtaggataaaagttaatatttctatgtctagtaacctaaccccctcaatttatcaaggacctttctttctctttaaagctttcacccaaaatgcacttttaacccacaatgaatgatttgattcaactttaattctcttgctattgttactttccaataaacacatatacagagcgagagttaacacaaattagctttgaaaaaaggttgtacactccaaggaactctctctcattgataatatattgtttcttctaacctgatagatatagtatatgcgtgtatatatatatttatagcaagataattatgtatatagtcttatgagctcattcccacacacctaaaacttaaatctcatcattttccccaatgtggctatataaataaaattaggaagagctcattataatatttccaagaggaacccactcatctaaccacctgcatctaatttttcctcgataaattttagaaggtatgttcgattatttaaggataaacgaaatcatgagtaggagttacaatcattgatggttgttaagaataaatagggaaattggctcaaataagtgtgacttagggaaattactattcaacgggatagcttgaaaggttcaatcatccaaaaatgtcctagatcattcctaaggtgtaatgctagctacgattttaccttgaggaccacactaaacaactctagtcacataaactttctcaatgtgtcgttattctaggaaactcaaagcaaagttggattatataagcacacacctatttagagaatcactactagcaagacatttagacatcaagaacacttaaaaacaagcacataagacacaaagagattaggcacatcacaaatggagggaaacaacaatttccatcatcgtgcaacatgctaaacatgactaaacaaaccaaaatcctctcaaaacaaaaatgaacacacaaaaacaacaacaatagtaattcaaacaacaacaaaatacaaaacaatgaacaaaaaaactaatttaaataaactaaaaataaaagttcaaggcaaagaaatccccctcaagttactcagactcttcaccagtagagtccttgtcctcctcaatagtgttactccaaaaaaactagagaggagctcaaaatggtcaagaatggtggctagcactaattctttgggccttcgtgagttgctgttattgtgaaagaacactcagagatgagaaaatggtggggacaaagctgctgctagggtgggagctcgctggtgaagatgagatggtgttggtgaagcacagagaggcagcttgaggctcagggaagaagatgaaaatggtggatatgggggttagggtgaagaagatggtgcggctaggtgtttactggaaaggaaaattgaaatgagaagaggatatatttgtgaaagggttttacgattaaagatttaggggttttagtttaataagtaaattttacttcaacattttcttttcaaaacccccaaattagtgagaatagatttcgaaaacccccgaaaatgtccaacttcacatgctcccagagactacaacattacttcaacatagaattttcttttgtctttttgcttcaaaatgttgaaataatgctgaaacattgctgtaaatcctagaacctcctgattctaaaataaaatcctactttcaccacacttaaccaattctctttttttgcaatttcttattttgtacttgtaatgaatcaccacaaccattgcaaaagcattagtaacaacagggaacaaatatatatatgttattatataagtatgaataaatgtatttttcttttttatgtttttttcttttcttttta

SEQ ID NO: 301020 - DNA, 1614 bp, Cannabis indica
tcctggtaaaataatttctaatatatttttgttttattttttcccttgtaaactttcattcaatactatacactgtccaagtttttctcttttaccacctgtaatgaatcttcgtcttctttcctcttcataagattacatattttattaagaaaaaagaaagtattttaaagagaaagaaaatgcaatcagaaatgtataatgtaatctaccaatttatatgttggttttattgtttcttattttcttaattacagagccaagtgaagattgtttcttattttgtgttttatatctaaagttagtttgtattctttatgctggtttaatgaatttgttttctctggttgaggcatctttaatcaaaagatatgataaatttaaatgatatatatgtatatatataaatatatatataggagtttctccatgtagatgacgtcttgtgacttttgtggaaatgtacattctatactttttgacttggtgttggtggattgttgaattaagtcacattgatgtgtttgtcattacttatatgctctttagtcctgtgaatttaatattttttaatagggagattgaaacaagtttctatgcttatgcagttatgctttaaacatgtcatttcctctgttttctctgtttaatcaatggggttaagtttttagtcttcttatagaatccatgataaaatctctcgtatgaatgaagcagctcatgatcgacccattttagttggttaagcttcatgaataaatcatagtactaaaatttggactgaccattttgtcttagtcactaacactggcaaagttttgttttgtttcacataagaagtttttcctagttatgaattatttgacagtaaacagcagtagagacctctgaattgttactgagttcacgcaattcatttaataaacagtaacaagcagcagtgatctgaattggttcattgaacaattggttatccttatcaacgcagaatgtcaatagaaatggtggcatggcatccatagcttttgaggcgatatccatattggaaaagatgcattataggcgatatctattttggaaaagatgcataaaaaatatagtatttttgaaaaaatttccactagtatgtagtataaagttctcttatatatttacatctacaatcaaacaacattatagttcattgcgttttattttgttgaagcctcttcatatagtgatatgtattttttgttctatcttggtgtttgcttatattttattgttaattaaaggagttttatttcttttctcatggtggttgattgtgcataaaaacacaagcacaacaatcactttcaattaaactggtcagatagacgaattttatctaaaatgatgtgtagttctacaggccattgtttattttgataataatggttctatgaattttctgtcgttattcttgtagatatgtacaaggattgttcctgcagatatattgttggaaatgttgtgaatgttttaacaaaatatataagtgtcttagtgtgtgtgagttggaaagagtcccacatgggatatgaaccctcatttacaagggtataaagagtgcaactttggcatttgggtttg

SEQ ID NO: 301021 - DNA, 2290 bp, Cannabis indica
ttttttttttattaattgtcaattatatattgagatatgtaatatatgcaatgcaagtatatgaattatatataatgtggtttttttctcaattatatataggttcaacttcttatgaaagtttatcacagaaacttgactagccttgttggttattgcaacgaaggggacgaaatggcacttatctatgaatatatggccaatggagacttaagctcacatctttcaggttcaatttttcttacatgcatcatgaaaatgttctttttacaagaagaagttattatagcattgagctctgatttattatttctaagtacaggcgatagtaacacaaatgtcttgagttgggaaggtaggattaggattgcaatggatgctgcacaaggttaggaaaagtacaaattttttttccacctttataaaaaaaatagctttttctgtgtgtgattgacagtaaatttaaaaaaatgtagggttggagtacatgcactttggttgtaagccacctatagtccatcgagatgtgaagacgacaaacatcttgttgactgagaattttcaagcgaaacttgctgattttggtctctcaagggttttccccactgatacaggcactcatgtttctacagttgttgctggtactcctggataccttgatcctgcgtaagtttttattttatattttcagttgaagaaaggaaaatgatatatatgtttaaaaactatacactgaacaagaatattaattcttttttttaggtatcacataacaaatagattaaatgagacgagtgacatttatagttatggggttgttttgttagagataatcacaaatcaaccggccataattaaaataaatgagagtactgatgatgaaaggattcacataagccgatgggttagctctacaatcgataacggtgcaattacaagtattgttgatccaaggctgcagggaggctttgataataactctgcatggaaagctgttgaaataggaatggcttgtgtatctccacaccaagaaaaaggccaaacatgagtgaggtcgtgaatggacttaaagaatgtttggcaatggagcttgctcgaaataaccatggccgactgactaattcctctttagacgtgtctaccgaaattagtccattggctaggtagagaagtacaaaaacatacatctcaattgctgtttcatatatttctttgaaaattttgtttaacgagttgaatttactcgattgtgatgcatcttatctatcaataataatgactttacatatacattaattcacatgctatacgcacgcgttaacgaaattttacaatgttataaggaaaaatagataagataattatttttctggttctttgggttcaatgaattagtctctaattaagatttaattgatgctgaaactacttttatatatataattaatttgatcatcaaattacaataatatcatttcgagtcaaagcactagctagcgtttaattttgtgtgtgttatatataaaattaaatcaattaccaaataaagagaaaaattggggcaatatagcaacataatagtttggaagctagagctataacattgtgattttattttaaagacgggtatcactgtcagcgatctctttcaaatataccgaacttcaacgaattattcggtcgacattacaaatgaaaaacccactgatataacaagtggaataatttaatagatgttaagactgaattaatattatgcatagacgtgttattatttttgtacttataagcatccttaattagctagggcacgctggttttattgactttggacttgcacgtacgataaagaagttaggagtgactttgttcattttaaattaagaatacgtacaagaataatgtgtgctcttaattgtaatattccctagaactaaagtttggtcattactatgtatagtaaatattgacaataactcactcaaagcctcaaacttatttacgacgtcgatgactttgacttagagcacctcttattatttggacttttgtattatatatgtgttatatatttgttgttatggtctttttccttgttgtttctatcaatcaatataatatacatattctgaagcttaattacattcgcgcgtaatatgaacaatcattctcttgaccaattaactacaattaatgcaaaaattcttaattattttctctaaactacaattaatgcatgtagttagttgaataatgagcattgctattaggcaccagtagtgcttagcac

SEQ ID NO: 301022 - DNA, 1084 bp, Cannabis indica
tttcttatttctaacttttttttaaatattttatatttttatagaaattaaaataatagtaaaatatcaataaatatcaatttgtagatttatgctttaatagaatatcaaaattaagattaaagagaaaaaaaaaagataattttaaagtgattttaaaatgttacgtgaccgtctcatacttaaataaatgtagataaaatctttattttttttctttatttggagtaatactactacatggacccaaaatgaaaatatgcatgaaaagacaaaataagctatcggatcgtacaccgaacaacgacaatgatgattcatctgtcatttttatacaaaattttcaagatctatctatatatacacatgtctataatacgaactaggttttgtgataaagtttttgtggccataaataatcgatgtaatggtcataatcataaacatataaatgtataataatagttaaaaaatgtaccccatcaaatcatttactatattgttttaataatttttgataaataaatatctttatacatatataaaaacaaattaaatattatattttctcaactcttctcttctcttctctctctctttttttttgtttgtttgtttgtctgtacactattgtacacattttccatgtaaagtttcaagaaggcagactgtaatggttggagattagatttgtatgcacttaaataaaccataatggagcatggaccttgttgcagtattattgtaaattaattaatgaaacagtcggaataggtggaggaagagcttattattcttattttatgttagaaagagacaatttttctttcatcttgttctccttctacaaagatgaaaattgaagctcattttatctccaacccagatctactttacttacttttcgatattgtttggttcaattgcattagacaattcaaggatatgaaaagtactaaaccaaataataataaggttaaatagcggcataagtacccaaagttttgagtttgtaagcggtataaactcaataatttttttagtggcataagtacccaatatttgtaactgatactacatattt

SEQ ID NO: 301023 - DNA, 573 bp, Cannabis indica
aaaactaaaatatttaaaataaaattggattttttttggttgttgtttatatgccaaataaaaattaagcatatagtatttaatatttttcttttgaatgaatttaaaagttaatactgtatgctaattactaaatatatatatagtattttatcattcaaatgcattgaacaacaacatggtagatttgttatactaattgtagtgttgttatgtttctttcagttagtctctagttgaggctagagtttgagatatagaggggtttttttttgtttgtttgtaggaagcaatgtcttcgtcaacagtgaagaattatgatatattagtgaacatagattcagattgaataaaatgtgcctgccttagccttagcaagtagtcctacctaccgtcattactggttacagtctatcattacaccaaatcccactttggcttggaccccttgctctatattctattatgaaaatggaatagctctaaacacaaatcatgatggtgaaagcaccatcaataataaaagaaacttatcactaccgattcaactaaagcaaaaaaaaaaaaaagcaa

SEQ ID NO: 301024 - DNA, 3874 bp, Cannabis indica
ttgatgttgtcataggaggagtaagacgtacaactgtaactcccctcaacctatttcctcaattcttagggcatgttggagaaacctcggcactagcagctacagtgggacgatttcttccaatcacgcctgctgtcacctctgagtgaatcatccaactgacaatctcgcagtatacaactatttaggaacaaatgtgtgcattacaagcagagaaagagatcgggttcaagcacgacgtccaccacgagtcccaaattgacgtcgcactgataattagttaattaatgatacaaggcatcataacaaacattctaccaatactcgtaattgcatgggaatgttcaggtgagactgaccacgctatactcgacctgaatcaacctattcgtgaccctgtacgtagtagactcttgatacagcacccgtcacagcaaattccatggccaatttcatagtaattgaccaacattctacatacattgcagtaataggttgcccaatcctaaaagagatgaagatcgtaacttcaacctgccacctcacaatggaattccctacacttgcagaagtaggatttgtaagaggagtccaattggactcaagaggatgttatagcactacagtcaagattgcagagaaaaataagtcgtgcaacaagatatatatgctcgaggtgccgcatcctcaacatgaatcattcaaaatcgatgaaatctcgcacgaggagaaactttacttagaacccagagtcctcgatcactcaaatacaacacaagccactgaagaaacaatagaggtaccaattgattccttcgataattggaaagttttaaaaattggtactaaacttagtatgcagtagcaagaaaggatggtcaattctctcaagaaaaacacggatgtctttgcatgaaaacattcagatatggtcaaaatatcgcctgaggtcatgtgtcaccgtttgaacatcgaccgtgatgtgcgagaagcacgacaaaagtgtcacaaaatggaccctatgagataccaagcgctgaaagaggaagtggatcgcttacttgcatatgatggttcataaaggagtcattctacctaaattaattggttagccaatcccgtcttagttgcaaagcctaatggctcgtggtgcacttgcgtcgattttatagacttaaataaagcttatccaaaatacaacttttctttaccgagcattggccaacttgtcaatgcaaccgcaagtcatgagcttcttagcttcatggacgtgtacttaggatacaatcagatcccgatgtacgagccaaactaggagcatatctccttcatcactgatcgagatttgcattactataaggtaatgcctattgggcttataaatgcaggtgtgacatataaaaggttagttaacatgatgttcgtagatctgcttggaaaaatgatggaagtatatgttgaggatatgctcataaaatctcaatatgtgaccgatcatgtcgttcatatgaactcaatgttcaaaatccaacgccaatacaaaatggaactcaacccgcttaaatcgtataaattagattagattgagtattttttaaatacccctatttttcatgagttagtataagtaacattttcatgagttagtgtacgtaacactttattttctaattgctcacaacaaatcttctgatatatttgatattatttccacaactagtgatgatatatagtgaagccgcttggcattgatttttcaagctctatggcttttttttttcaaaaaaaaattgtttgcatacgtggggacaaggctttctaaattaacacaaatatttgagcacttttcatgttacttcggcaactaaatgcagtgtcatatataatcatcattttggcttttactttttcttttttgttttcttttcttttttttttctgcaaagagtggcttttacttaggatgttgaactataattatacaagtttttttgtccccttctataagacttggtggtttgcacatgcatattacttactaacacagacaattgtgacgaagacacacattagtacatcatcatattttcttatacacataaatttatataaaaacagtaccctatctaatttcaactaatggaactgcccaataagttacatacacgagtctcagcaaaaaaaaaaaaagttacatacacgaaattaagcatttgtccctcccaaaagaaaaaaattaacactcttaattagcagttttcagaattgagctgcttgtatttacatatctaattacacaatagcatccaacattgtttatgctgatgcgtatgtgatcggtgtcactatcactggacacccactttttagtcttgaaaacattgcccacttctcaatgcttgagtcttggtcaatcaccttccacctgaattcaatttcattgtcagtgtatgatacatttaatgtaaataaatacgtaaggctccttgctgaattttatataccaataaaaaaaggattagtgttaacactacacgaaaaatatacactagcgccggtcaacatcgttaaccgacgcaattgattggagcataaatttagcgtcaattcaaaacagaagccactactcaatcgatagcatccattataataatagcttagaaaatactaagtttgagatactcaacaccatctgtttgtgcctgattaatgctcatctgaatcttcaagctgaattaactaaggttgcttcactttctcgtgaacatcatccaatggcacttgtagctttttctcaaattttcaaagcatattatataatgtaatttcgagttatatcgatatagttatgacaaaaatattatcaatagtcgtaacaagatttcaaagattctaagaaaattgcaaattgctttaattagagacgggtgttttcattatgtgtgcaaaacaaatgtgcccatacgagcgaagttatcttctcacacatataattttttaagacaattatttaaacattgtcaattgtgattttagtaagtttttgacctctaaaaactctgaaaagcatttgatgacaaatgaaaggtcaagattacaagtttcttcaagtgcttttcttctttccttcttttattgttttcaattttaaattaatggatgttattatgcttattatgaattaaactttatctctaacgttttaattaatgtaatctctttatactatatatagatatttagttaatacagtttttatgatttatccttcttcattgtgatttatttaatttatgtgtaagactttcgggttctttctcatcatctacataacttgtatgaatttgaattaaaatctgagaggaagtgagaattaaattgtaaagctcccacttcagctgtatagtctcatacttatacagtatatacaagtatgtcattttgactgctgtctagaatgacgtctggtcctacaaaacaacacgagtctttccaatgtgctttgtcctcacttacaagtttcttaggaaaactttccaagaggtcacccatactaaattttttctaggttaaacacacttaactttagagttctcaagggataggctaccgaaaagaaaatatatcttgttggcataggtagtacccataaatttatttaagtcctttttatctctgtagtcttatacctacatagtgttagaatcatcacaattgtgatgtgagattgcaaagcttactgaatctttccctatatggactgttatagtgacggtcagtagtcccgtgatccgtaagagaaaatactgggtaagctgtgcaatcctacacagcctgggaaaggtcaagtgggatgattttgagactgtgtagg

SEQ ID NO: 301025 - DNA, 2817 bp, Cannabis indica
aaaaaaaaaaaaaattactttaacactaataatatattttaatctttatcaaaggaaaaaaaaattaatattaaagaggaagtaaccctttataattagttcataatatttcttaaaaataattagattaaattattaaattatatagatctgaatggtagctatagttgctcatctctgacacgtgtcacggaatgttaacatgcagattgaagtggtgtcatctgggtttagtaccgtgtcatgctacgtgtcaagttccaacctctctcgctttgccaccgtttaaccctcacactattaatataaattaaaaagaaaaattaaaggattatagtactattacttgaccatccttagctgataaacgaaatcgagatcaacttagaaaaccaagaagaaggaaggaaggaaggatgataaactgggttgccctttcccttgttctaacttcacttgccacggccgctctttggtctccggccccaccaaaaaataaccacaaaagcaatgatcacgaccaagtaattgtcaaagaaggccaccgtgttgtggtcgtagagtacgacgaagaaatgaaaccaaaaacaagggtttcaatctcacctgaagacgacgccactcgctacgacttccccgagcaaaccgtagcgacgtcgtttctcggaaacgcaaaggataagcttaaagaagtttcttcaagctttatcccaaacctaggccaacaaggaggtgaacatcatcctcgaacttcaagagaactcttttgcgacgcttacgggaaatgcaagcacaaaatcgcagtggctattgacaagaccatggggttagcccacgatgacatcgatatgaagattcgagcggcccatacagttgaaaaggctgctgtgaaaggcaaagaggccgtagtaaataaggcccgtaaagtcgaagaggctgccgaagaagcatacgataagactaaagacagcgtacgacatgtggcccatgaagtggaagaacatgcaaaagaatcggcccaagtgacgaaggcagctataaagggcacaaagaatttggcaaaaacgatcggcatcgacgtggcgaagaacgttactgggtttttggggtatgcggggaaacacgtggccaaaaaagctgctttctttagtggccttgcgtctaccaaggctttgagtcctgttccaggaatgatgtatttaattggatacggtatcgcgtacgggactagcgtgtgggtgacgttcgtatctagccacgtgttggctggaagcttgcctatgcaacagttcggcttggttcagagtaagctttacccagtttattttaggactatggcgtcgagtattgggacagcgttggttggtttcgtggttagccatagagggcgggccttaacccgcgacttccacaaaattcaattttataaccttttggcttccttatctctcgttttgattaatatgctctacttcgaacccaaagctactaaggtaactctttataataactttatttgttttcatagtttttgttaaaaagtaaataacatgtatatttaagaaaataaattttaattatttatgggttttgctcttttttttttgttctattgacctcattttaattatttttctttacctatatgtgtttgtgtgtgatatgaagtcatatgtagaaacctataaatataaatatatccacatgtatgtcaattcttaaaacaattttctctcttaactttatgaaaactcgtatacacgtacgagtcttgtcttaacttgataattcataagatctttgtactaaataatcattaatttaatatgcttatgatgatgaagtaatgagtaaaaagtcaatgcatatacatcgatcattgaccatataatgttgcttacaatattaatattgtttgaaggtaatgtttgagaggatgaagttggagaaagatgaaggaagaggaagcagggaagaagagctaataaccaccactgaccattcgccaatgtcatcaactattagccctacactgaggaagaaaaccgctgccaccacggcttcggtggcaatcgaaactccagagcaggaggccgatattcggaatcgacttaaggcattgaatacgacgttaaagaacctaaacatggcttcatcatcggttaacatcctatgcctaatgtcgctctcttggcatgtctattaccttgctcaacgacttgacctgacctgacctgattattcatgaaagtaaaagcgacagtagtagtgattttggtgcattttggctgtgtttcttttctgggtgcatgcttcgggtgttattactagctagtattaagagtagtaattatgtatgttttggttttgttagaattattaagtgatatacatgcttggaagtttccttttagtattaataatattagtgagtaaatatatttcctcgagtttatataaaaaaatgtatagtgttgtgattcggttggtagtgtatttgtttcctcctgtttctagttttatttagtaaatattattttagatttatgttttcaaaaaattactaattagattttatgttttattgaactttatattttttaaaataattaaaataatatttaaacttgttataataattaagtaagaagaaaagaagaaggagatgaagagtgataggaaaattgaatgataatttcttagttgtttattttaaggtaatttttatttatataaatataagagttaaatattaagaaattaagaaaaagagaatgttcattacaattaatggtaataaataaaagatttggacat

SEQ ID NO: 301026 - DNA, 2071 bp, Cannabis indica
taaaacatcaacagtatttaatatcagcaaaaatgacaatagtaccaacaaattaaagagataaaataattagaaaatcatatttggaacctgtttagcttttctctatggataacaaaagaataataaagaaaaaaagagtaataaaaagaaaggatagcctcctatcataatattcactttcaatagaaggaagaataactaagagagtttgtagaatgaggtgattttagttgtacatgatgtttgtgtattgtgcgatttactagtatcctgctgaactggcttaggtgtgtaaggagagtatattagcagtaagaaacgacacttattaattaggcagctattaactgaaatatgccatttatttacaacaaggggaaaagagtcctcttgaagcaaccttgtaatacctaagttagtctcaaaattagcctaaaatttgattgtttcttccataaagagccatatcagtatcttctaagacagaaaataaacacagtacaataataacaataataatctaaaagtagtttccatcatgatagtaaattagaattaaactaacgacccaaaatagttcatttttttcccatttttggttagtaattccttactactacacagtgcaaaacacaaattaagtttcaagttcaaccaacgcaaaacaaacaagaatatctaacatatacagatggagtggcaaaggtctgtctaaatcctaccaagcaatatgaaacactacttatgtaagaaaaaaggtcaagcaaggtattggacagaccaacaatggcgaagtgattcgcttctcaactgcaagcaccacaccttctttcgtcttcaacccaattgcagttgaacccaactgtatttaaatcagaatacccaatcagtctatatgttatttccaacaccataaaacataaaataaaatacaaataaacaggacaaaacactatctcaagctcagatttatgagtgtctatggtaaccatcattttcatcattcatttccaaaaataatagtgtctacaaagaactaaacagaaagaaaaagttacacaccttaatagcctcaatggcatattcaacctgaaacaatcgaccttctggagagaaagtgttcactcctctgtcatactcggtccttcacatgaattaagccccaaaaacaaaaattatcacaaaaactataaaaattcgaaattgcacaagaaaacccaaaaaaccaatcagtgcacgaaccttgtaagaaacatttttggtaggttggattaaaaacctgaagaaactgcataagagtaaaaacccataaacagcattagcataaataacactacaacacagaaaattacatcattgcaactgatctgagccaaacagcaaaatgggtccgattggagctaaacaattttagaaaatcactgttgattaaaggctgacactttaatttcattctttcgaaaccttcaattcagatttgtcatacgataacatgaaaataaattctcgcattcatcgaaactgattcttaccaaattgaaggaagaatccacctgaagccggagataagagaagatgcaaccgccggagagagatcggagaagaagtgaagaagagttgagagtgaggaaattagggttatttatgagtctctttcttctttttaattttctgtgtaaagttttcttgttggagaagaagagtaggaatattatgattatttgtacatttgcccctatatttgtagtaaatttcaattgttctttagaaatagaataattatcttttttaccccctgtacttatgacactataatattatgccccttaatctattcagcttgttataaatagtccttgtataattttatatgcatacatttagtccttctgtttattttgtttaaaaatactgtttgtattgatgatgtggtattataacaaaggatagagtagtaatttcatctctttttagagggaaaattgactatgaggtggcataataactgacaatgaaagatgattaaaaaatgatttcataaccttttcaaaaaatttaataaaaataa

SEQ ID NO: 301027 - DNA, 2747 bp, Cannabis indica
gtgaattggaaatttaaactaatttcataaatttaagacacaattcaactatttatgcaaatattgagcaaataaaaagataatcacaagtagatattagatataagcaatagtaaaatagagatagtatttagaaatgtaaactcttgattttagaaggtttgggaggactcaagctccgtacatccttggtcttcaaagccccaagctttgggttcaactaatgagccaagtcaatgggcatgactaacccttactttatcgggaaattttcaccaaggactttcccaagcctcttctaatagtttgagaattctctcaaggataaccaacctcactggattattgaagtggcaatcttacttataccaagttgttttcaataccggtgtcaaacttacctatatccaggttgttttttaatatctgtgccaacctcacctccatacaatgaataaaatttgatatgatgatacccaacaaactctctatataaaatacaaagtaagaaactagagagaaatggaagcacactagaagagataagtacaagtgtgtgtggttggtgtctttttgaaagaaaggtggaattttggtttagaacacttgtagggaattcatatagatgagtaaatgctcaaccaactaatttttaagtgtaaaaattcattatttaaagtgctcaataaaatactagccctttatgactgttgtgcacgtttttaaaaaaatctctgttgtctgactgacacacaactggagtgctagttacaaggaaccgggcgactagatggggacccgagagcatcttctatttttcaacaaaaaatcgatttgttcgccatttttccaaaatattttttcgtgttttaacttggaaaactcttaaatatatgaaatactatacggggaattttttttggaaaatatttattttcgtgaaataacttgttgcacaagtaagtgagctaaactttgaacttataagctactagtatgatgtggagttaaagggtttattgtttgctgatttaattggagagattggtgttttatgttttaattttctggtttgtggatgtttaagagtctttctggctgtaaacttatgttctcagacttgcttgtattgcaagtattatttgttttaaaataataaaaattgcacaaaagtggcatggtatgcatgctagaagcttctaactgttaatcccatggggtggtctactggtaaggaggagttttggaaaatgcttgtgtaggcatttgttccaaggtttgaatccccacagacccaggaaagaaccttggggtcactgggaggtctcccagtcaaactgctagggccaaaaaaataaaaaaagaagagagtgagagagaagaagttgttcttaactgttgaagatattgctaacacattatttctaatcaaaatttttccaggctcaaatttcgtcagttgtatcttccattttcttacgtaggctgctacatcctggagtatatcacaatattgccttgcgtgcaactttcctggactataatagacactggactgactctgatttccagtcattgactgctgatggattgaagaaggaaattctttctctgattgaagatgaggtttccttttcaattctatttgttcttatttctcttctgtctctctgacaaattctgatgcatatgtgtagtttttcccccattttctagttgttatttgaaaatagataattgaattttaatgtgctgatgataacaaaggaattttgtggcaggatgtcagtcaaaatttagtgtcaattcattgctcctggaaaaatttctgttcacgctacttccttaattggtgcaaaagcaatgcaccttgcggtttgcttgttgagtcaatagctggctctgtcggtgtaataagaaagagttcagtatccctattccgctgttcagaagacattgaacggttactttatggtatgtcagcgatctttcttatatttgaagctggaataattcttattttgtttgctttcaacttttttttgctttcttttctttaaacaaatttctgaactattgtttttatattctcattttaggttattcttccgatgaaatcggtgatagtgctgttagttttggcatagaattttttgacagtaagtatgaacgtgggatactagttgatctgctcagatgtgtcattagtatcagccaacaactaggaaaaacagcttctgctatattttatgaatcacttgttagcagacccattttcccaagtgaagaagttgttccacatgtattgaagattttagaaactggatatagttcgacgttagcggctgtgagtgtatccgagtttggtaatgatgatgcttgggagaaaaaactaaaggatcacaaaaacttaaggaaattttctattgacatgctcttatctcttcacgccttgtgtgagaaagctactacatggagcagagttctgaatattattgaaaattatcttaaatttcttgtacctcggaaaatgatgcagaatttggatgctgacccttccttaagcattaatgctaccattttggtccaggccacttctcaaattgcgaagacaatgtttgagtctgcattggacattcttatattcctaagctatcttgtaaacaacagtggccaggttagtgtttcaattctcttttgtttactttttctttgttattattgttgttttttctttctttctttct

SEQ ID NO: 301028 - DNA, 2433 bp, Cannabis indica
aaaatacccttctccaaaaagcttaactagatagtttaagaaaaaacttattttccctcttctctgtcttccatggtgaagaaacaaagggtgattcgcaagccagttacttggacggatttgattgatccaagatcgattaagcaagatgaaactgatgtagtcgaagactcatagtcagcttcaggattggatttcattgttgagatgttgatagagaactcgcaccaagaaattttgcgatctgaaatgaaggtcgaaacagagaaagaggaccaaagcaatatgaattgggccaaagaggtggaagatgagaccgaacatgatgaagaaaggggcaaatttcaggattcagcgaggaatcaccgaaaatcgtttaaggaggaaaagatggtctatcgagacctaatgctggtttatacaaaacctatgattaaaaatagatgcaaaagagctcatgttgatccagaggaagtgaaacaataaactacaaattggaatacaaacgtgatttgtatcgtccttagggctaaccttcctatggctgtttttgaaggctacatcaagagaatttggggacattggggaatttctcaaatagccaggataacagtgggtttgacaatgatcaagtttaacgatgaggcatcgagggatcaagtcctagaagcatgtgttctccaattcaataaaaaaaacagttatagtgagaccgtggtcaactgatctgaacgccatcaaactgatttgttcagtttccttgtggatttggcttcaagatttgggtctccaatactgggaaaacaaatgcttgagtgcgctagttagtacgattagaaaacctataatggtagaccaacatactaaggatcgcacaagggttcaatttccaagggtcttagttgagatggacataactgacactccccccaagtcaattaagttcataaatgagtatggccagtttattgaacaaagcatcaattatgaatggctcccgatcaagtgtaaaaattgttaaggttatggccacatcatggtagattgtcaaaaagaagagataaaaaagaggaatcagaaagctaaggtggataggccagcagcaactaagaacaacagaacagatgtggaggaaaaaattgagaaggaagaagagaaaactacagtgcctaataaggaagcaaaccaggaaaaggaagctggaagtgagaatgataacaaaagattggttacacataaaagaacagctcctcaaaagcacctttgtgctacctctgctccaagggaggaacaaggtgctagtaatagaaagttcaggtatagactctttttatcatggatagctgaaacatttcttgatggaacattagaaaattaataaaaaggagaaacaagatactgttttagagttctatagtatcaatatattggagttggtgcttttgttgaaacaaagttaaaagaaaataaggttaaggagatgatggagagtaaatttgttatttgggatcacttttcgagtctgactattgagggtcatattctaattgtttggaggagatcttttgtcaaggttattgttatagctaaaactccatatcttgttcactgttatgttaaaatggctggccatctacatgcttgctgcattacctttctttaaggtttcaataccattgatgataggaaaaacctttcgagggatctatcttggttgaagcaccttgttaaaccctggttaatattaggtgattttaatgcaatgttcaacttcgacgataggtctagaggcagccttatcagcagtagtgatttggtgggttctaatgattggatatctaaggcttatgttgaagctctcatgagtacgggatcgagatatacatggacaaacaaccatgatggggctagtagaatttattcaaagattgatcatgtctttgcgaatgaggattggtatgatatgtttactaattctatagcacattttggttgggagaccatatccaatcattgctcttgtgttgttactaatagagtcgaagtgtctattggggttaaactttttagatgttacaatttttgggctattcactcgaagtttagggacctagttttatccaattaggagaagcctatgtcctcaaatggcctaaagggtgtgtatctcaaacttatgtgattgaagcatagccttaagagattcaatcatgagattataggagatgtggggaagagtttttagcaagctaaagacaacctaagggaagctagattgagggctcaaaagaaccctaaggatcttgattttcaaaatgaagaaaatgtacagataagcaaagttagttggctggaaaaaggagatgataacactaatttatctggaggtaatgaaatggaatggaatggaaaggaaacaattttcattcaatt

SEQ ID NO: 301029 - DNA, 5379 bp, Cannabis indica
  modified_base (20)..(20): a, c, t, g, unknown or other
tgttgtgatcagccatgagngcaggagctgaacgatgaatgtacatgtccgggccatatcagaccaagcgggttagggtctaccagtgttgtgttcttgagactctgtttaccgcttaggccagctgaaagaaaaggacttgtaatatatttgtaaatgtttttagggatcccaatttccgtaacttttagatcgtaaagttaaattattacaagttttatttttactccgtttatgattaaagttaaattttgcgctaatttctctagtaatcctatttaggggactagggtttcataagtatcctgggtagcatgcctaattagttttcggcgttacatgcaggttggttagccatgcacctaccagttgctggctggttagccatgcacttgtcagatggaggctggctggccttaaaatgtttggaggctggttgacctacactggccaaaaggctggccaagggtggtcagccaacctttctaaggtggctggttcatcattttattgcccctcctaagtactccgaccttccatttgctgaagtgttgagttcataacatggacttcttgttgacaagctatactcccacgtgggattgatcttggccacatggacattctacgtcaagtgggcaaaaattgggataacatttgcccagcaagtccctgtgcggacatttgtatgcatagggacttttgagcttagtttggactgatgtagccttaaccgggaagattttgtagtatatttagcctttgaaatattttctcttggttgtcttatgcattcctaggcaaaaaattgataacattacatttttgcatgttttctgatatatgatgcatggcaagtgagtgagggtcccacaaaagctatataagcttatgggagtaactcagtcctcatttcccacatttcgttctaactcttgaaaaagcaagtcaagaaagctctcacttcccttgaggccaacactcccttgtcttccaactcttaggattttcacgttatttcaacgatgcaagctttccaccatcttcctcaatagtttatactagtgggtaagctttcaaatcccattattcacttgcttatttggattttccatggttactttgaagcttttctttgcttttaacattctttgattttcacgttagattgtagtcttttttcgtattttgatctacatgatagttttagaatgcataatgtgtgattttctaacaaaaaagattcgattttgacctttattgtgatactttactatttcagtcacaaagagcacgaagaatacgtttgagtttttcaaaaacacacacattaattcaacatcaaccctggccagccataggggtcttggttaagacttggctggccatagggtctttccatgggagctggctggccataagggttcaccatagagggttggcccattcatgcctaggcatgggaccctagccgaccctctcatagcttgggaacactggccagcctaggcctaggttccaagccgatagccaattttctatcctcttttgaccttagcaagcatctcgttaaggccttgtaggcatgtacaaccttagtctcatatgtggttcccttacgatacttaatggtgagtctattatagttgaatgctcaatttaagactcaatgtttgtcaaagttattgtacctaagatgatactttgctgatactcaaccttgtacgatgagattttttggcaagtacccttggctacgattcgccagaactttgtgtgcacctcgttgctttgtcaggttcctcacctcccctagtctcttttgtgcaaatgatctcgagtaatagttggaggaagtgacaatggcattgacagagattcagttggtcttcgctctatgaactagtatctagtccattcctctagcagcttctcgagtggtattgagacctgtagttgtccattatggcaaggatcaaacagacatgttgtagggcaccaccttttaaccctcacattgccagggtggctactagaggtagggcttgtgtagttgaggaggttgcacagccttcggattgtagagagccagaggttggctgggtagaggcacctatcgctgaccaggatgcggagagcttggataatgagcccgaggtcgatgaggttgtacttgtcaggaggatttagtataggacatgttctattttcctcaacagccctctcggcttgtatgatgaggctggtgacccttgaataggcttagtcaaccttcaatggttagagtggaccacgttcttagggaggttattgagcctcatgttcttgaccagggggagcagcgggaccgatgggtctctcctccatccattatcagtggcgagacacttgacaggattagggagattggactggtatgagatcataagtgtgacaagccattgagggaccaacgagcacattggttggccctcaactagatggcatggtcaaagtgccacatagagcatggatcagttttggccctgcacccataattcagagacatcaccgcatacttcagtgtgtgcccgactcaaatcactccaaaaggtataaagtacccttcagcgatgttcattccatatgttgtgttaggctagcctcagccttccccttatgagatagggtacatctttgacttgaagtctatcccaaaacataactagacaagatacttctactttagccaaattggctatcggttgtttggtgaaacatttagcacgcccttatcgaaggtgggaggatatgtcaagacctattttatcacttaggacatccaccaagtccgtcaatgccactttcagagagtaccaacctataaacgctccatccccaccctccagatgtgggatagagctaatcctattctatccctctcgctgataggaggaatatattgaggcttgcatgtacaggtaacttctagagatatgatctatctcccttaaagtttggcattgcaagggttgaaggactgtcgggaggtccagatagagccccagtggttgaggaggcttgccttggagggggacgtactcttgacaaggatgacgatatccccccctccagaattgcaaagaacttggagagaagagaaaaagccctccaccaatgcttgtttcgtagaggcaatattggcgatgccactttctgagtaggcctagaggctaaggttctggcagggttgcttacccctttcctacgtctagagacaagggtaaggcgaatactagctgtttagatgactcctcttccgagggtgatggtagttgatagttgatagcatcaactttttgtcttttttcttgtattaaatatttgtaacctgtactctaactttgttactttcttttttacagatatggcttccaggctgagagattttgttggagtgccctaaggtggggcttcatgtcatcccagggccaaggtggcccagaccactcgatctagtgatgttgtagagtcttcactacctccccctcctccggggcctgaccagttggaatgatgatgattgttgatcctccattgaggaagaccccaccaccacactgaccttcgggaaaggtgcctagagatctagccgtggggcatgcacgaccactagacagagagttgcagaggctgctcataggcatatcaatagaattctacccattgttggtggtgatctctaagaacttgacgatgacgggccaaagaggttgtcatctagtggtctccaggacttgactttggtaagttacacatccgattttgctcaaattattgtactatcaaaggatggctggtcaagaatggatctttgcaaagttggctagccaatgctaacgtagtgagaagctggccggccaagcaccacaaaggggatgtccatcaaggtcctgtttctggcactaactcgattttgttttattttcagaccctattgaagttcagcctttctcatggaaagaccaaggggtccttggccgctcttcaggaggaacataaggcctaagagtcagagcttctagcaaggaaggattcccttaccaaggctcgtgctcttgtagaaaaaaagtagggcttgatcaccagtttggagcacttgcttggcacaaaaattgaagaaaacaccacttttgctgctaaggcccccaggatgggggtggaactcgggaagaagaatgaagaactaaagcttgctaacaaagcattgaaacttgcccttgatggccagcaagccattagggacgagtatcttggcttgttttagaggtcttgtacgaggttaagctgcacaaccccaatgtgaacctctcctacatgagagcttcttttcatgaaagaacactagcccagggtagagaattgtataagagaagcatgcaaacaaacaagaccattgtccattttgaggagtcatcatcggaccacttcgatgaggctatggctagcatacctactgaggaagtggatggccaagctacaaaaaaagtggccggccagcctgcacatgccatggtcagcctaattttttcgcaacatagatgttgcagcttctgactcgactccacctgcacctgcacacgattagattgactttctctgtattttgcatttataattttattttcatagacatattagtaccatgttatgtatggcctgctagccttttacttttgaacaatacttatttttggcctcagggctttcatgttctcactttttacctataagcaatttgttttcaaacatttttattctttagccctaaatccttttatcatgaatatgtgaacgaccagacagtctttaatcctggctatcttcttattaccttgacatataaatatccaaatttacttttctttatgcctcgctgaagtatgcctgcacttgacttagaggcaggtttagtagctcatactcttcattgtatggactaggtgccccaaattgatgacgtagacttacggtctcttcgtcacttgcaatttactgagtttcataaaccttgcatgggatttttcttgggctactacctgttttacgcatgtggaaccgaaaggaataactttaagaaactaatcttgttatcaagttgtttagatacaatatatatgaactgaaacattgtttttattcatcaattgatctttattgttgtgcagcttacatacattgaatctacaagcttataaaataaaaggtctaattctagaagtcaagtggctacccttaccatacatgccaagcagaggccatcgttgaagaattatgggagaccatgccgaaaggccatgggtactagtgttgggttttatgccctaaataaaactcttt

SEQ ID NO: 301030 - DNA, 6419 bp, Cannabis indica
ttttttaagacttgttctagtattctagttatcggcctagggcgaatcgaatctatttttgttatacttcttttattggtctatggagtatgaaggtatcggtttatgcttaagatgaatgtgtgtttggcctatgacttgcactattgttaggcattagcttgtgatttacacagcaataaagaatttgaacagttaaagcactgcaaattgtggtattttttttgttatgccaaagtggtatacattaacaaaaatcactattcatactatttcttaaaatactaatatagctgaatagaagaattttcctttaaaatattattatagctatataaatacacaagcaagtctttacatactatttacatggatagacaattgagtacaacaaaatcccttgggacttagagcgaagggagaaaaataacattgtgaatgactttaaggagataaagacaaaaagaatggaaagaatgaagctttttgtccagtacattcagtaatatatatatattgatgtatcagtgaaagacttgaataccctctccaattttgttggagaagacttttgctcttgggctgttaatttgtcataatataacacaggcaggcactaccaaaagagaagtgcctagtcgattcgttagctttgggaggatagttgtacaagtctagtttacatttagtttcctccttacttcttgctgcaggccaaaaagaaaaagagaaagaatgttgcatgagaacatgtgtatagactgattcaaaaaccaataaaatctacagaacaagcacatatgttgggagtgatattattgaagagcctaatgaaagtacaatcccagtgtgagaacaacaataaaagggggattagcaacacatttattcatggggagcattgaggcgcacatgacagacgcacatgacagacaatacactcttttaaaatctactgcattcccatgagtccaatattaagtgatgataaaaggacttaatttccctctcgctttaatattttattttctctgtgcaaaatattggaatgtatttattgttaaatgaatcaatgtgatcctaactttccttcctccaatggatgcatcattaaatgtgcaagtagttcctttggtcccttgaaacaaagtttattctctaccttatgttagtggcgtgcccaaactgtattttttgaactattagccgcgatggaaaagaaactattgccatgactcagtaggaaaccttatcaagcaaagagagctagaccttacaattaattgccagtgaactacctttcagataatgtttttcacttgaagatatagattaatttatgggagaggtgtgtgtgtcccatgcctaatgttactctttctgaaatctggtgcatataactcaaaatgcacaagttcaaacatataaagtactaaccatattctgattctcctttttaggtctacttgatctagagccttcctgccttgatgtctgggttcgaccaaataatctttgaatgaactccagtaagtgattataaatgctgtatgccataacatcaaacatcatcagtgagattggtcaatcaatattatcaaaataatctcagatcgttaacaatttaagatcacagtggctatgctgcaaggaagtgaaaatatcaatatgagtgtccacaaacaaattcaagttaaagcacgctgcaaggaagtgaaaatatcaataggagtgtccacaaacaaattcaagttaaagcacgcataagtgaggataattaaagaattgtctttgtagattcatacttcttaattaaagatatattcttaatcaattttattaaaagccaaatccacaagaaaaagatcagtgtataacatacaccacattagctagaaagcaaaataggggcatatacaacaacttcattgaatcaaaaacagcttttcaacaatacaataagcttacctcaggcgatgcctgttgcaggctgtgaaaaaggcaacaaaaccatttaatatactcctgacagcacgaaaaatctgcaacagaggagaaatatcatggttatgaataaaaacataaaataatcatatcctacatcaaagagagaagtaatcagtatttcctaacctgggaaaataggtcattccaaagtgatcgccacatagaaacttcatacgtactcactgttgcctcagaagcagatgcaagctgaattatgctactaataaactcccatacatccccaagcatctcatatatagaggtacaaacaaaaactatgagagtggtaaatgccagaacaatgcgaactggagcatagagtaattcccaaaaaacccaaaatatggggaataatattgatattgctgcaaatcataaagcaacagaaactgtgtaagagccccaaaaaaattgatgtaccatgcagctattttggcaatattataatagtctacaacaaacagaaacatgaaaatgaaaagaagccactgacttactggcactccagataaaagagacaagaaaccatatgggggacaggaacatctccaccacgttctccacaagactgcaagaagacccgatcagaatccaaataactgagaaaaaattttctacgacttcaatcatcacgttcgacactggtaggagaaactccaaaatttctagaagtggctctgctagtggttgagtgagaactgacaggaaggatctggtggtgctcctaatcgtaagaaaccaattaacagccttttggaagttatgcaaaaatagcattgttcccaagtatttaatccgtgttatcatctcccaagtttcaatccagtcaaaaagaggcccaaacaatcgagacgcagtagccttcagaactgggacattcttgtacaaatcataaaatcctataagaacggttacaacagagataagtacatataaagctcttgccaacgggcacatccatggtcgatagagatggcaaaacactggatatgactgtaggaaaagaacccaagatggaagcccggcctctaataaagtaagtaaccgcaagtcagacattattacttttcttagagtaaatggaaggtcatggtcattgaaccggaacaaaattaaaacatccatgtactgggtagcttccacatcattttcatcccaaatctctgagttcctgattccctcagtacacatgccagcttcttcacttgtaatgctggagtttgttgctttccttcttttccacggtccacagagaggaggtggagtgtggtgaacatcattttcatcaacatcagatacagatgatacaccaaacttgctacccaagctcaggagagaatcatcctcaatagacatactatcgttgcagatattttcggcatcatcgtcagatatagaatccaaaaaatcttccttcgtatcgtagaagacgtctcctgaaaattttgactaattgtcactgactgctcattccaattgcactccaagcaaaaacagaaattccaactgctactacgtggtgtaaaatgtctaatcaaacacttgctgacttagattaagaaagatcactggaaaacgataattttcaatgaactaacagactaacttatacatgatatgaacgcttgatgtcagaagcagcttactattttcagctagaagtgtttaattatcttgcattacaagcttgtcacaaaacttgtaaatgcgcacacctataataagggatgtttaaaaagttggctataaatagattatgtatatgaatatacataatttttggttgtattttggtgttatagcaaggttgtcaatatgcaagatatgtgatttgaaatgaattcatttttaacgacaagcaatgagcgttctaagttaactccacatgagcatacatagtcacagaataataaaaagtaaaagccaataacagatttcccaagaatattgaatcgatcttccctctaacattgcaatttcaaagcagaaactcctagatgtctccaaaagaaaacagagtttaattatctttgcaaacaaacaaggaatcatgagaaaaatacctactacagaatcaagatactcttttaacaacagcttttcagacggttgttcctgaaaaccatgatgacatacagtttgctgcttgagcaatactgtcaaattcccatctttgcatgaatttagcctctatggccagagtggtatcagtctgcaaaagaaaataaaataataaaatactacatccataaatgattacaacaaacagaagaaggaaaacatgttgaggtcgtagtacctgaagctcattcaaatagttgataccacgaacattgctccatgcaacttcaaatactatgaagccatacaaggtcctatgcagctctctgcttaaaagtgacgattgatgcaatttcttcacaggtagcaaaaccctcttccgagacaacgtaatcgcatcaattagtcgaaaccatttatcaagtgtctttggctttatatcactggaattggaacaagcctctttgtcctcctttttctccctccgtgctttggtgttggcaaaaggagataaccttgactgaaatgaacccaatgtgattacatttttctatcaaacagaatgggactgaaaaaaagtacagtgctatcaaaatgcttatagaaaccttggtaaccatcaactgccacaagtgtgccggacgagaacctctgtctctcagccatggtcggttgtctaccaatatataaagtttgttacttttaagggccaggaagaggctaagatcagaaaggtaagactgcaaatctctgcaatacaatcatgtgaagaataatatgcctcagacaaggaaaaaaaatgcttacaatttcgtcgacaaacagaaactaaaattgtagaatgaacgggaattaaatttaacttaaccacattaccagaaagaaaagaaaagaaaaagtcaagttattttacaatattgatggtacaatattagattttatcatacgtttttatgtgtgtgcaattcaacaaggttgtaaccttttcataaatttataatcgagaaatgaacttaagggaaatatatatgtattatatatagatatcaatcaacagaatgacatgattccaagaaagttcaacccaatctatagaaggcaaatatccaattcaatcacgttaaatggaaatattccaattcaattctcttaaatttaaacattattccaattcgaaaggaattgtcccagaaaaatcttcaaagaaacatgcgccacaattagaaatgataatcgaaagaacaattttaaaaaaggaaaaagcctaaaatggaatcatagatacccaatttgcaaacttgtgagagggaatatgcagcgcccgttatcaccattccccatcaaagtctcgctttaaggccagattaccagcaatcactgcttcatcaatcccaattcaccattattaactacaaaattaaacatgcatacatacataattatgtacagagagagaaaaagatatagaaccttctaggagggaggagttccatgaaagaagagggaaccaggatagaatggaggagaagaggaagaagcaataaccaatgagcttcataacattaaagaaaaccacaccgagagaggagtaggaagaagatcaaatcaacggcggagaatggagaaccgccggggaatcaaagggaggagaataaacgacacacatatcgagaaacccaaaagaagaaagaagggtaaactcaaatacacacaaatacatacatagacgaggcacgactactgatacatgtcggagcccaggccattaatggaactttatttattattatcattataatttaacctcttcttttttaatttttcatttaatttattttaaataaataaatatttttctaataattgaatgtgaaaaggaaaaaattaagattaaatggtgttggattggatttgcttgggttgaaaggcttgagaagaggagagaggaataacaatagataggtttgggtattcatttctggatttgcaaagggtcaggtcagagacggcgtcaattggtttatgaaaagggtaaaattgtaaaaacaaatgggcatggagatctgatatacctatacatacttacttcccgcgcaggacagtgctatacagaaaatgagttgaaaagactaaaatgaccatcagagtctcgtactcatagcgaagaagggtaatatcgggaacataaaataaccgccacatccatcctaatcttttcatcgttcgtaatttgggattgaatgaaagagcaatgagctgagctgtcatgaaatttttgctattatagacacaacattaatgcggttaagtaagctgttctttttaggggaaaaaaagaagaaaaaaaaata

SEQ ID NO: 301031 - DNA, 1674 bp, Cannabis indica
ttattaaattaaaatatatatatatatttatataaaaactaacaggaactactactggtacaacggtaactttataacaattctttctaaaaatactacttttagaaagaagaagaaaaaaaacttactatcggcgccgcctagacgattagcacactcaacaaacttctcgtgaagatcttgggtccatcttatacgtgatttgcttgagtttgaagctccatttaatacagagtttaatggagtaataatacaaccattattattactaatattattatttccagacgatatattttggcactgttgcttcttttcttcctcatgtgacccaaagctcagttgtgtatatggagaagtactatacgatgtgcaatactcctataccaaaattaaattaacaaaaaaatatatctattaaaaatccatttataatatattcacatatattcataaaaaaatcacctgtaaaacagtaagaacacgcctacaaaaaacaataaatttgtaaaaattaaaaagctaaaccgagaatattgtaaaaattaaaaacccagacataatattttaatatcagcatttaagaattatatatttcaaaaaaaaatgctccaataataatatatatatataaagggggaaatttttttcatatactatttttaatttttttttaaaaaaatttactttgggtttctcaaatatactgattttggtcacgatttaagttgatatgtttgggagtttttacgtgaaattctatcaaaataataataaaaaaaatgttttaaagaataaaaatgaaaaattaaaaaaaaaaaaaaactaattgcaaactcatttaccatatgttcaataaataaacccaaatatatattaattatatatatttatgtatgtatatatatggtatgattaccggaaggattcgaacggaggttgaagtatctacatggagattgggttcatatccaaactgtccattacttcccaaaatattactagtggagagttgagatttcgccattgatggaatcggatttctgaaatcgaaattgggctgctcatgggccgaatcttcaatggttgagtaggtttcagactgagattggtccgaagagatcagctgagaccccggagacgaaaaagccacctgagaatcatattgagagaaacccatgcatcgctcggtggcgtagaaagccgaagcaggcgtttcgaatcggctcataatagtcgaagaagaagaaagtttcgcctgaacgacaccgttttggtgatggtgagatctaaatttttcgtccatggctgccggagattgtggaacccatatttccatgttgccgagaaattgagaggaacgtctggagccgacttcgaagctaaaatctgaaatcactccattagagttttgttgaattaatctttcttgataatcaatccttcgatcgttcatttacaaatgaaaacaaaatatataaatatataaataaagaagggacttttgcaagaggaaagaagaagaagaagaagaagaagataatagaatggaaaacaaattaaggatattgaatttggtaatttaaaggtacgtgaaggaaaagttactatgttgatataataatatattctacactaaaaaaaaaaaaacaaaaaaaaaaacttaaccgatat

SEQ ID NO: 301032 - DNA, 5734 bp, Cannabis indica
attcatagtcacgtgggaggcaaagggtcgaaagtttttttttctaagaactcatattcagagatactgttgtaagagctctaagaaaaggaactattctccttgttcttaagtcaatacaagtaacgaggattaggctattaccgaactgctcgggactgaacctctataaaattattgtgtctttatttgatttactatatttcaattgtattaaactacttgttgcttataaaattagactcactgtccttggctaaaagcgaggtcaacagctggtgttgctgatgttgttgtggcaacgatgtgttcggtgacggaacatcggtcgccccagtctcaaagactgaagatttgactctcttcacactgggattaggggaagtccttgatccattgcgctttgacttggcttgggttaccttttggggtaagacgagtccgtccaaactatcatcagaacccccgccccatctagtacggtgttcgggattgattctcctctaaggggaattacttgagaagattactctccgatagttgcgagcacatcgtgagatttttgggaggtactagaccttttttccccactagctgacgttgaatggctaggtgcgataagcccagccttggcgggtggagaaatctcttggacgtctaacgacgaggaagtcaatgggggtggtagtttgcaagtcctagaagctctagttctggtctttttcttccttttctcttggcatttcctggcctcgtccagagcagccacaatttggttgtttcaagatttcaacatcttggattctagtgtttcttcacaacaagtcaacaatctgggtaaataagaaaaggcacgggaagtcatacggtcataataagaaataacaatagcaataaagaaaatctagtaaggaagtttgtgcgtgggtgcaacaatccagtgaagttctataaggtggtccctaggcaaaggctaaaatgctcctatgacccatgaagctgccatattcctcaaattcatgaagggacatagtcattaaagggtcaactttgacaatatctgaaggagtccccaggttactagggctcctaactattaggtctactttgtttgtataaccttcaaggggaatttattggggtttatgccttgaaaatacgtgtcaaattgtcccggattcctccaagacatgcgactcaacctccgggtacggaagatgcaaaagggtccattacctcttcctaaaatactggcacctggtgcccccgtgtcagggtaggagctagcaaatctcttcgagatttcttcttcctcaggtagagggtcaggatggcgagccacccactcagactgtagggcatggtcattttggcctgcattggtgattataacatcaaaactagtggtgattgcttccttcactaccttgggagattgacgctatcaccaaaggctgacagtgtcaatactttggaacttggtgatcaagcacgacctacaaaggagttttgttgtcaccaggccctcaaccttcaatttttcttctgagaaggccctctattagtcttccttcctggctatgacttcagttctgacactctgaagaggaagtccagctataaatcaaaaattttagtccatagacagaaattggtagagtttggaaaaaaacaaaactgagaataaactgctaaaatacctaggagttgaaagctaaactgaagggaggacaccctactggtaggaaacctagaggaatataaccaatatttccaaaggtcgtgggtacaatccgtttgaaaaataggatagtaggagtccaagcatttatctagtaggaaaaaccctaactttgacatatttgtcatcatgggattggccttgacactgtagaagtaaaggatctcctcaggggaaagaacctccagttaattaattttgtggaacacgtaccacccagccaagagtcagtaggatgaaggaatcaactgaaagggcacaatctgaatctttacaattagactcgtaaaataggttcggaaagggagatgagcaccactagaaaaacgggaccaactccatgcactaaacacatcaacattggtggatgcagattccccaagcaccaaaagcctgtgccacgtcagttcggggacattgcggaggccagcgacttcagagtacgcttgctacatcccataagattgaaagcaattggattttagtccatctcccatacggactcaggacggacctacactagcgaaggaatttcccccttttgctactcatgttgcctataagaagtcctctctcagttatagcttcacattcgtggatggtttctaagatctccacaagctgtggtgttgccatggaaactccagcctggtccttacccacagagaacctttcggcgatttgaacaggttctccctcgacggacatggctgcaactgcgaggggactttgttcaaatccatggaataaagagaaaactctttggaacaatgaatgaatgagaaaccaagattttcacacacactatctcactacacggcccgagtacggacctagccctaacccaagcaagaacctttcttgtcctaaatgaaaaatattaagaaactcaagcagggggttagttcactcacttgacaaaatagaggggatagttggtgtctacagaaagttcgcctgaaagctccaaaggcaagtcgatgcagcagtcgcagttaaattaatatctaatgttccctctgggaaagaacttttctagtttagttgaatgagagcaacatctggaaagagctccgtgagaatgatgagtagacgctagatgagatcctccaattccttttgcatgcaaaaaatggaaaagaaaaggaaaagcaaaagtcagagagaaaaaaacttctgtttttagtaaaaaagaagaaaaaatgataataccgccacagacagtgtttatttcaaaaaaggagatacggctctgtgagacaaatggcttgaaaaggttaatatgaatccaacgactagggaaacgaggggcctcatatgataacccttggggccacaaaaataacaaggtcattctcctcatgtcatttagccgccaataatgctcctctttccttgctaagcacgcttttccatacacaaagtggagtagaaaatacctcctaacataccatgtggttaccacgcaaagggaagtaaatgccataaaaatccccccaagagatgcagttcatttggggacgtgcccatgaccttaaactggagtacgtatccgcgatcaacatttaaaacaatggcaagcttccgtgatctagagaatctcaaaagcatgggtggtaaatgttatctaagttttcataaatcagacatgtggcacaatcatagaggggacacaatttttacataaggcacctagggaaattataagaaatgactcatacacttataaggcaatagcttcttagagcaatatcctttgctgagaaacctagagagcggtacaggttctaaagacattggacacattagctccttgaaaaatagcagtccaaagatggttatacctttttctaacacatgattatatcttatcccgtgtgcctgatcaaggtattgcgcgtatgcaccctcaagcatgcttttttcccaacgacgaaggtaaagactatttcgtaaaggagataacttttgacgacgggtgtccaaggttgtacaaaagtccccactagtcgttccacactgcaccatgaagaaggttccccccagtggatggtcagatcatcctttggtagtacagagcttagtagcgtgtgaaggacaaaaccctatgtaggtgaagggtatgccctttatcccatgtgtgcctataaatagcctcactcttttgaaggcaagggagaacaacttttcatttaccatcaccctactaaaatccctagcaatatcttcttccgcagaatattctcatactgtaatactttgtagtatcgaaacattcacccaaagaggataataatattgactcgtggactaagaatcattaatgcctgaaccacgtaaaagtctgttggtttattattttatacgtgttatttcttgtattctgtcaaaacacttagtttccaaaaattcagtaaacacttagttactagcggttccataagtccttctagggatatacccttgtgatagaaaaatttcagaataatggaatggttatgtaatcagtgtacaccattattatgtttagggatcctgatcatgaacttaagaaaagctagaagtgttaactaagttttacgtgtttgatagctattgtaaagtgattaggtgtggacagtcctatggtcattaagataagaatgtgtttgtttcaacaaatactacttttctatgagtatgactaaatctaagaacaaagtagcaaagtagaagagatatcttgttccaaagtgttctatcatcttattctatataagatggtcccacgacctctattatcttgacacagtcgatgaggacaataccattaatgttcctagatagaaagtcacggtaccttgttgtagtgggagagtttcaaggaactcacactgttatgacttggaagacacatgtgattaaaatccattgttaatttaaacaagtaatggatagtcaaaataaggaaccaagaaacaaagccaagagaataatagttaaaacaattcatatggagtaaccaaaagttttttattacaaggagaagaaaggaaattttactaatgtcttttcaatggacttaacaaaacttcctaatcctagtattatatgtttaagatcatttaaaactatggcttgtgatatccctagtaatttgctaattcttgtgcaagaaacttactttagtaagatgctagagcatttttctaatggctatctgaaggaagtcttttggctcttagatatagattttatttatctaaggaacaatttcaattgtgccaaaaaggataaaagtcaagaaagaattccttaagaatcaacagtgagaggtctcatgtatgttctagtatgcattagacaatacacctacaattgagtgggagttatgagtaggtatcagattaataaaggaaaggaacactggaagataatcaaataaataataagattcgaagaggaactatatgtgagtcggtaaggctgatattttaattctcttagactacaccaaatcagtcttctagacctgtgctgatgctagaaagtctacttgagagatggtgattactttgggagtggagcaatgattttcgagaagtgtacaaactaatctagagtctctaactctactagtgagattgaatgtcaaagttgcacgaaggatacttattcaacctatggaaagttttctacaaattttggtgctgtaccaataacgaattaactactagtgttacttcctaactaacatagaagtagttgccaaaaagtaaggaattcaatatcccaagaggagtagacatatagttattaatctcacaatatcaaggattttgtgattaagaatatgtaatggtggaggaaattttgtattaaatacaacatatcagatcctattacaaagataatactacatactgcacttgatctagacattaaggtattaagattaattgaaatgcacctttagtttatattagtgcatgtgggagtttgttgggttttatg

SEQ ID NO: 301033 - DNA, 3836 bp, Cannabis indica
tgtaaatttccctaaaaaaaaacaccatattttctttttacttattttttataaatatctcaaaagttattacatcttttaccatctacacaatttgattttcaattttaccaagtcatatacaaaattttaattcttttcctttttttttttcagttttttttggttaatcgcatcaaaaaaccactagttaaatcaaacttcattttgttgttgagacctgcacaacaaaatatacttactatttccattttatttattgagaaaattaattatatttccattttatttattgagaaaattacattatatttccattttattttactatttaatgtttacctttatttttatattctttaaaatatacttacttttataaataatattccatttaaccccttaaattaatctaaattatatgctagatttaaataaaaaatgaaaatagactcaataaaaataagtatattttaataaaatataatatcaaaatatttttaattaataaatacaaaaaaaataattcctcaacttaatggccttaatatttacaaatactaacattattttcagttaataaattattctcaattggttaatcaagtcgtcatataacatatcattttaagattataagtaattttaaaataattttagccaaaagttaaaatcccaggaaaaaaataaataacactatatatgaataaaacaacaaacttgttcatacatataaattcaggtttataactttatacttgtgtggattggaagaaatatacaaatgatatcaactattaataatcttgattagtttttgggatcaccaagcatgatgtctcttcgttatgccaagtgttacagcaaccagagctagaattgactgaacatataacatggtaaaacaacataaacccaattagaacataaaacaatgcataatttacaagcaacatgataagacatagtttcaatttaggtataagacttaggtacgggtgtgcataaattgatacaattcaattcaattataaccgactgtcattcattggatatccaattatgatcggattagattggatgttattttgaatattcaattgaatcagatcggatgttggatgtggtgtacaaaaatctaacataaagtaaaaattaaaacaactgtgaaagttttgcattgatttactttatgcaagtaaaatctaagagatcaaataacaaaaagtaataatgactgaagaatattgcatccctaaaacaaagtaccaagggttaaagagagcactcaaagctctaaaagacaaatctttataagagtgtatatgttgcagacagtaaaccactaatggggttcgcttatttccagcttctgttgatgattttaagttagaaaaggatgtacaaattatcaaacaaaagacgaaagaagattgtgataaagttaacagtcctagatagttacggctatagtgcaggaaccatgtccagcacatcagtcctacctacaaccccattcgagccagcccaataggccgaagctttgaattattagtcaagttatccaatgtgaattgccacattagagggttaagcttaattatttggtttggtttgattctattttcagctcttaagcaaaacactgctgaaattgggagacagtcattgttgtaaatctaaccaatatcaataccatcaactcgtggagtaacccgaaccaggtaaaaacaatttcttatctctcggacccttcctaaagctcttacatatatatttatcctacaattacttagttaccaaaaatcttaatcaacatatattatgaaaaagttaacagtaccacttaacattttgttgaggtttctgataagtgataatgaagttactggggaaaaatccttaagcaagatcgaaatcaaatttgttgcaagtggataggggatacttacagctatagtgcaggcagcatatccaggcttttctcggtagtccactcgtacaaaaagtagaacaaacgctccaacataccaaggaattccaccaaagaagaatccaattaagaacctttccaaagaaaaaggaaaaaaggaaaaaacacagaagttactgacatataacattttgaatttagcatgatttatcatagcaaatagtaaaggttacttcaactctatgtaacatgttttcatgtcaacgtgaattgactgcatttaataactacacatgccaaaaacacatattaactcgcataaataactccaacttggtatcaagcacttagataatattattgccccaaaatatccaaagatagataaacaagtaatgatagacaccaaaatgaaacagtaatattatgatacaatattgttctatagttcagttcttaaaagaattagaagaacataggcatttctaaactcttcgatatagtttggtattctccccataaagtaaattactgtctttaacacataaattctcattgatacttcttgtaagataggactagcctctatatagaattctaactaactaataaaacaaccgaccctataggaactaagctgaactaactaacttgtgactcatatatttaaggtctaacatattactattcattttcttcttaagagatcagtaagaacaaacttacaagaaccagcccatgccaagaccacagcaaggaagacgaagttctcttacaggatgtccctcaacaatagcaataccttaacaaataagatacaaggacattagacacaatggagaaactcaattttccatataaatatcaaatatctaaatcttagttagtacttttacattagtgatagcaacataagattatggaaaaatctatattacaccccccccccccccctaaaatgtcgtttcagtacacccccttatctgttttgacatccaaaaaagctttttagttcaattctttttcatcatcgcgtatgttgtagcttttacagtagttgcttagcaatcgcaatgttttaactttattttcaacacggtaaattatccgaaattttctgaaaatatataggtgctcaagtatgtgatcatgaaaaagaaaatgtgagttaaaaagctcttgaaatcccaaaaatgatatttgatcatctcaggattcaaatagagagtaaaatccaacagccacagctcctaataggccaaattcatctaaaaaataacattcatttaaaaccctaaaactcatcataagcccttcatttcacctcaaagtcaaaaacacaaaaaaagtgtgaagctttccatcatttaaaaccctaaaactcaaatcagagataacgaataaaataagcaagtgcataaatcgatctgcataattatataaatatatagatatatgagtaaaagtaccaggaacggtctgatatccatggttatagtgagtatgagggtatcgaggatggctggtggaggcggtggcggcgggaggaggaagcggcggcggaaaaccgaagacgggatgagaaggttgcggaggaggataggaatttgctacgccttggaaggtgccgtagtagtattggctctctggatcaataccgatccctctggtcttggaatcttgctcgctcatttttcgattatgaaattcaattgatctcgatcgatgatgatgatgatgatgatggtggcggtggttagggttagggttagggtttcattttcaatcaaatcaaaattcctcttttctggtttttctcttcttcttcttcaattttctctttttatttttattttatgaaaaattgaaaattatattattattattattaggaaaagaaaaa

SEQ ID NO: 301034 - DNA, 3243 bp, Cannabis indica
gttattaaataattagaaattgcatttaagtggttaaattggaaaattaacgtttttgagaaaatgagatgaaaaaatgacaaaatggcaaaattacaaagtggggtccattatccatatcatggtcggccactatgtttggaatataccatttatttcattatttaatgccaaataaatctaacctaatcctacgtggttttctataaataggtagtgatggcttcaggaaaaagatgatgcatctcattccttcagataaaaattcaaagccttcttcctataccctagccgccaccttctctctcttttcttctctcctaaatcgagcctatagtgaatgagtgagtgcccacacacatcatgtgatatctcaatcatagtgtgtaaggctgagaagaatccagattacaaagaaggacattcgggctcagatcttagtgatactctgcttcagaaaggatacaagggttagagatctgagtggaaggagacattatatttcgctgcaaccactgtaaggtttcttatactttatatgtgtttatttcatatcgttttagaagttcatatttaggatgttaaacaacatacttgttagtaaatctaagatcttggtaaaataattccaacatattatactacaagtagcgcctctgtgtaagtaccaattctaacctccagcaacaacttatgagggaattccataaaactccaaaggctgtcatgatggtttattatactacaagtagcgcgtctatgtaagtaccaattctaaccacaagcaacaacttatgagggaattccataacactccgacaggcggtcatgctgaagaaaacttttttatggttgagcgctaatttattctgtcttggtaagaaaacaaaattgtgaaagtttgtgcaagcttgtgtgatttttcaaatagtgaaatactctcctgctgccccttacgagtttttgcaaccactttaacttccagaaaatgtttgggaggatctagctaaggatttcattgtggggctccctaattcttttgtagtcacaaatattctggtcgtagtggatcgattcaaatacgctcattttggagctttgaaaaacaattattcttccacaaaagttgttgagatcttctcaaacatggtgatctgattacatggaatgtcgagatccattatcttggatcatgacccaatctttactagtgctttttggtgaaaattattttagctaataggactaccttcaaaatgagctcttcttatcacctccaaatagatgggcaaacagaggtgactaactgctacttggagcaatatcttaaagcattaacagttaagaatcctaagcattggagtaagtttccctcttaggtcgaatatcattataatacaagcaatcattctgctataagtatagcccttttttcagctgtatatgggagaacactacccatgattctagcttaaacttgaggtactacaaccattcaagcaataaaagaagacttgctacctagagatttcattctccaacaattgaagaataacctaatgcaagcccaacactgcatgagacatcaagaaaataaaaagcaccaagacattcagtttcaaccaggagaattgaaactggtaaaattgcaaccatatcattaagctacaatggctaagcatctcaactctaagttgtgtcaaaggtactttgacccatttggaatgggcctgtcacttatactctcgacctactagcaagtagtaggatttaccggacctttcatgtgtcattgttgaagcaatttcatggtacaacccctcctacttgctatcctcttcccatacttgctatcaaaaacaagactatcatgattcctctagctatcgtggccacttgtgtccataaagtcaagccacaagtgctaatacagtggtccttgagagcccctgaagatgctacttggggagagactttatcgaattttgccaaccttgacgacaaggtcatttttgaggaggggagtagtgttagcccaattcaaatgaccggctgaataactttagaccaaggaatgatccaaaagaaagtctatgaatggatacaagatgttgccccaaaagaagatatggcttcttcattcaaatagagcaacaacaacgaagaagcaaaccaacaaaccatggaggaaggaagagagtgtgcatgtgagactcgtgtgtgcgtgagacacaaatggctctaagagtttgttagcatggagaaacactaattttgggtgagaatttgttcatttttattattcttgatttccctaaagtgcttgatataaatataccacttgtattgagaaacatttatatgttgaatgaaatagtaagagatttctcggtagatcggccttgtctcaaagaaggcatttaatgtatcaacttttgtcttacacatctttttctagtagtatttctccaaacattggtctaattcttgtcttctttcttcacctgaataatttttgccttttcaattctttccttctcctttgcatgcttcttttcatatattggaaggggtggtgtgactttggttggtatttttctgacttactgtgtctactcgctaaactacttctttaagttttataaatcgatctactcagtctaagaactttcccatcgaccccgtagtaagccttttgatatctttctataattctcctaggggttctattcctcttaggatggcggctacttttccttcctaagttattcccttcacttttgtagcctcagtcataaacctactaatgtagtctcttaaagcatccacttgtatttaattacttcaaccaggtcctctatgtgagataggagttgcctagaagataagaattatgcgtgaattgtataaaataatcttatgaactgaactttcctcggtctaacttgaagtaccactgctaggcggcttctgccaaggtagcgtgaaagattctacaccatacatcaccctttacagcgtgcaagtccatctgcatttcaaaatacttaatatgagacaaagggtcttctttgcccgtgtacattttccatgcaggccttttaacttgtgttatagattaagggcgttgaggtgaggtgaaaagggttatccctttgttcgggaaagttctagattagtgagttttgggtcgattcaagctttgaacaaggctcttaagttgatctatttgggcttgcacca

SEQ ID NO: 301035 - DNA, 1775 bp, Cannabis indica
tcccccttttaacatcaaaaaaacaccaaacatttattgtcgtttgaccaaatgttgtgactttgtataatataacaaggcttaataaaaacacaagcattgagtcaaacgacaatgcttataatgtgaaacgacaatgagttaaaattcatgcatacatgaatatcaaataagtcctaggggaaaaaataatgatcataaataccctagcattagtgaaagtgaaacactatagtaacaagggtagatttgaaaacctaacacattgaagaacctgaattaaattcctaaacttgcataaatgcaaaactgaactgaacataataaacctgacctactggaccaattagcagtcgagtacagataacggattacagagacaataccgaaacgattatgatcatggtcgggctcttttgttgctgcaagaagggcatttgtattgcttgatatgttcggctcttgctgctgtgatcttcacacactttccatggaaccatttctcgcaaatatcacataaaatccaaaattcatctgttgcatagttctccccgcaagcagcgcagagtgtctctccttcctcgtcttcgttgtccatatccaaaccctcttcgtcttcgtccttaggcattagcattgcctttgcagacgattcagagcttcgctgtatttgtcaaaaaaagaaaatgaaaatcaattcaatgtacattccacattcaataaggttaaattaaatctgtgctccacattgtgataaaggttcagttgtaccttagagtttgacttagatttgttgctgccatgatttgaatttgatgatttatccttaacttgtttcttcactactcccgttacaacctcaaaaatagttggtagttcatttatcagaccgaaaagacgtttcctgcaaagccagttaacaagacattgataaagggtatacactacacaaacaaggccaggccatagatacaaagttaaaaaaagagttttacctatcagccttatcgaatccaaatcgagcaccaaagtaaaaggcaacagaaagtaaccacgcatcgctatgaaccgcaaccaaagatagccaatctttctcttgcattccatctctagcaaagttgatacctaatgctggttctggaagttctggaggaacctcttcagccggtaaattgacttcccattgctcacttgggaatccatagagacaaagattctccttctctgtaataaacttaaaatttaacacactgttgcaagctttacaaaaatagtcacagcatttcaactttgattatatctcagaaaccaaaatcagaatcctcactcatcaaatttttgtgcacaaaatgcaatgtagttagaatcatttgtcatatcaaatcccactaaagatttttcatataaacccaagtcaacaagccactcatctgggaaaatttaagcccaaaaaaacaactcaagaagaacatatatataaatcccatattaccaaaaaataaaaccaaattaaatcaatcaaaaccatagagagagaaataaatttatacacaaaaatagacttttgcacatgccaaaactgtataaaagcagaattaaacacgacaaaaaaagtacaacaaagaacagtgaaagcaaaaagatgggaaaaagtataaacaaatgacatcattataataattttttaaaaataaataaattccaaattattcatatatacccatagaaccctactaccactacaattctcattacaatcaactcatcatcataat

SEQ ID NO: 301036 - DNA, 3893 bp, Cannabis indica
tttacccttttaattatctcttgaattccttacatgtactgttatactcgaaatttggctatcaaccagaagctgacacgtgtacttcaaaaagaatatgaatcagctcaatgattgtattattaaattgcgttattaaatgcaacttaaataactcgtttcaataattacggttgatagaaatattcaaactcattgtcacataagcagatgcgagataggaataataactattaccagttaagattggcaagatagtgagtccatctcaggatagacaaagtatataatagaattattcaagacgagatagcaaagagctggaagctcattgacccacatacttgagaataagagcttgcagctcattgacccacatacttggaaataagagcttgcaattaattgatccacatatgtatacatgtagagaataactacattcatccatctcgccatttatatgtaggagtaatcacctcgctaataccatcgtagtaaacgagtattgcgaggagaaatatgtctatacttagcattttttttctacaaagacggtgaagaaggacaactcgtacttagcgagaaaaaacttgcatagtcattataaccgtttatagataaagacaagagagtggttgggtagttattaaatattatcccatgtgcataaaaatgaaatatggggaatgtccacgtttcatgagcagttatgaatgatcagatcccaaagaaaataattgtcaccctatacacctataaataggggcagaatctagggtaaaaacgatggaaaatttgagagaaaaagctatctattagattgatagagagattttgtactctgtatctagattatcattcctaataagatggacttgtggagtatgtagattttaactacaaaactacaaaaaaaatatctggtgttcattcattattatcattaactctgtagtatatttattatgtaaaatggttcatatatttggttaataaaaaatctacattaacagtttggtgcttccattgagagcttttataatgaaaaaaaaaactcaaaaaataccctccttctaaacacaaattacaaatctatatctatggtggataatacccctcgaaatgaaaaaagccatccagaggagaccacccatcgccctggaaaggagcctcaaggatcttaaagaaccaacacaactgaaaccccacgtactgggagaaatgatggaaacttcaatccaactggcaaacagatcccagagaggcaaagtgaagacgcttatgatcccaccaaatatgtcccactggtggaattagaaaacaggcaacttcaacaacgcctggctgaatcgaaccgaagaaatgctgagttagaacgagaggctgcggcagccggggctgcacaagaaaccacccctcaaactcaacctgatccatctacaaggcaaccatgggggagacaccaaagttctaggaccaggaggcaagaaaataatcaagggaatcccaaaaaaaagctcaagaagaataacctaggaatacaaaggatatcctaatgaatagagaaaatcaacccaatacgggcaacacaaaaaaccaggggcatcgacgtgatgtcctaagaacttcccatggattaacaaaccaggaaaatgaacaacatgatataccagaatcaccattggtgctcaatagcaatgcttatttgttaatcaaaatttgaaacgaggatacaaagagtaatgacataacataaacctaaaatgtaccatgacaatatacacacaaatattatatgcatcataatttttggtaaccaatcagataatatatttaaattgagaatttcaatatatatatatattcaatatttgagtgtatatatgattatttgggtaccaaatatatgtaggaattatatatatattcgatcatatatatgatgaatagaatatttataagggaaaatatatagaatatagtttttcaattttaaatctaataatatttattgtttgttggcaggtgttgtagtttcttccaagtgactgtcagtcatcatttgcaacaaagagaaagcagtaattaaaatggcggaatacaattcatattctcccctgaattctctacgattagagttagagaggcctcctctcttatttaaagaccgttgtatctacagagttccgaagcggctaagggatgtaaatgataatgcttacacaccaaaagttgtttccataggcccatttcaccatggcaaccaaaatttgaaaccaatggaagaccataagaagaggtacctacgtcattatcttcaacatacacaccaacacatgaactattacgtaaagatcataaaagggaaagaaaatgaactgcggagttgttatgcagaaactataccattttcaagtgatgaatttgtaatgattattcttctcgatgctattttcatcattgagatattgttggttaagtatggaacgggaataaacgttgatcacgatcacatctttcatcggccatggaggttgatagacatcacacctgatttattgttgcttgagaatcagctgccatttttcatctttgaggaccttttcaacccagtacaaagttatttatgtcctgatgaacctatttcaatcgctaagcttgcccattctttcttaaagagaaggacattagtatccaatcgggagggtcccgaggggcactctgatagttatagaacacaacactttttggatttattcagaatctctgtccttccgccggagcaaaattttggaacagaaactacttcaaacctccaaagtccaacaaatcgacgtgaccagcatgaaatagagatgacatttttacgcaatcatccccagtctagtgacgtgtctgaacgaaatagtcacataaaatccaaaatgaaaaatagtccaaacctcccaagtgcaacaaaactacatcaagctggagttaagttcaaggtgatgagaacaagcaaaaatttgcttgacatccaattcacattctctcaaggcattttagaaattccaatattaaaagtagacgacttcacagaaaccctactacgaaacttagttgcctttgaacaatgtcattacacttatcgtcgttacatctgccaatatattttgtttttggacaagattgttaatacagttgaagatgtggatttacttgtcaagtatgggattattaataatctattaggggacaacattcaggtggctactatgataaacaagctgggtgatggggttattcattggaacgatgaagataaccattttgcggtaatatcgcatgaacttcgtatgtactacggaacccgctggcacaaatggaatgcaaacttaagacaaaactatttccactcaccttgggcaattatttctctgattgcagctgttcttctcatcattctcaccttaatacaagcagtttgttctgttatctccgttgttaaacactgatatcctctcttctcataaggtttagtttttctaagtgttgcaatcgtttatgattgattatttatttgtgtgatgagactactacattaaagattgtttgatgtaagtttgaagtgtaccatattataaattattattattattattattataaaagtattagttacaaaattataagagtaaatactattttggactctctgttttacaaaagttattaattggaccctgtgttttgttaaatgacaaaatagaccatgtattttctaaaatagtacaaataggaccctgaattgattttttgtcaaaataaagtttaattataattcgatctaaaagtgctatgacaaaaatttttatattttttgtatctgttcgtattaagcattgtct

SEQ ID NO: 301037 - DNA, 2969 bp, Cannabis indica
gctgatctgctccttcatactcaatgctgatgttgaggttttgaacattgggattataatgattagatgcactagaatcgggataccagttgttgtcatcaacaggagttgtttgagcaacattcacttgagcattgggagggttggaagtgggaaagacttctgtaaagctcttatcaaatctgtaaaaacaatcaagaatagtgtgtccaagcttgtggcaaagctggccctaaacacgatttgatgaagtggaaaatctgcctcctttgctgaaaccagaaacaccacggccattagcatagttaggattaggggaaggattagtgtagttacctccattgttaacaacacgattgttgaagccatgaccatttcctctagctgatctagaagaggatgagggagggattcgactttgattagggaacttgctagcacgatttgtgtaattttgataagcaacattagcttcagagaattgatccatctcagtagtagcaacattaactctaagatcattttcttgatcaaggttagtcttttcaatttgagacccggaggctaataggagagcttcaatttcagcaaccgagtattcttcaattctggtgttggttgatatgataaaagtatcatattcaggtggcaaaaccttgaagatagcagcgatgtgatctcttgagctcaaaacttctccaaccgaggcaagaagatccacatgtttcttaacttttagcagatagtcattcaatgacattgacccttttctaagttttcgtaattttgttctgaactccaggatcttggaggagacttgtaaagtgaagtgtttctcaagaacactccagatttgtctcgttgtgttgcacccagccatgtgtgtaagaagactctctatcatcgaagagagaagccaagaaacaaggagctgatcttgaacctcccattcaagaaaagctggattgaaagtgtttgaagcttgatcaacatcatttagaaactaaggaggaggagcacgatcttgaatgagcattagcaatctgtttccacgaattgcactaagaagctgctgtttcacaaaaaaaaattgtgatcatttaatttaatggacatattatggctgaagtataccagattaaactcatcgagttgtttctcggtcgattaagattcgaagctccattaggttaattgactggtctgttgagatacgaattattctgagtgttattggtgccaactccaacgttcgccatgttagccgacaatagaggaatgagctctgataccatgttgaatctcttcgccattgatgaacaatcaagcaaacaagaacaaccaaaagtagagaaaaacagagacgaagagaaagaagaagaaagagaaggaaaggcagtgaaagagaagattgtagaataaagagcaatcttattattcaatcaatgaatattggtattatatagccaataattacacatgggagaattagttagtaataacagaaattagttacaaccaatactgaactactaacagaatcaactaacacatggtaaccaaattaactaactaatactcctaataacactatagccaacactatgcataataatagattatttttcttttttataaaaataaaagaaataagtggaagaaataaataagataaataaggttcaaatatttggataaatccaactaaatatatatatatatatatatatatatataaaatgagagttgaccgatcaaataaactgatcatattgataactgtataagagaagatataatggtataaataagtaagtcatagcatataaaatataaaagtattgttgtcattaatattatcacacaaacaccatattataacaccatatttttataatagtaagattatttaaacaaatactttataagatgaactatatttaattaatttttttaataaataataagatcactaatttatatctccaatggagaactctaccacccagcaattttaaacaaaagaaataccaaaagaaaaataaaaagaaaaagaaaaagtggggtcctttacgttgtcattattcagtttatagttaataccttgactataaatggaataaaagaaagagagcatcttaaatgtatagtagaggaggcctattagtttcaataagagagagaaagagagtctgcagagtgtaagcctgtcgttcagacttagaccatggaccattctatttcagtattatctctttctcctttcttcatgaagaaactcaaaaacagggtatccacttggcaattgaccatctccttttacttctttatttctgtacaccccaacataaattttagtttggaaaatttgttatatcaatatctctatatattaatataatggaaagcacacaagataagggtacgtggctttctatctattttttttcctcatgtacttttttaagagtaccatattaatgtactaagaaaatataattattcaattaagtttatttttttaatagtctcacattgtttagaaaatatagtgaaacattacacatacactataaataaatttttttctcgttgtattttaatttgtgtcaaaatatgtattttcttcctttagtgcttaattaattgattaaattagtttattcatttagtatgtggctttctataaattttttctgggtaaataatattttgggtcttgtgttttgtaaaaattatcgattggtgttaaatgacaaaatagaccttgtattttctaaaattatactaataggaccctgaactatttttttttatcaaaataaaacttaataataatctgatctagaaatgttatgacaaaactaattaaattttatgtatccattcgtattaaaaattgtcttaaaattggttgcactaaaaataaaattattaaaaattgaactcaggatcttatttttaccatt

SEQ ID NO: 301038 - DNA, 2686 bp, Cannabis indica
aaatttattgaaaaaatatttgaactatgggctcacgtgcgaagcacgttagacccaactagtatcttataaaataatcaaagttggtcccaaaattaaattgattcatcatttttttaaaaaaaaatataacaatttcacattctcaaaatataaaaaaaccataccaaaaccccaatgtgtaataaaatcaaaaagggtattcaaaactaaaaaccctcttaatggaatccaaaagattaccataaaatagtaagaagaaaaaaaaaaaaaccaattaacaaaacacattatgagaacatagagagaacaattttttgttattatataatagcaggctgatcatttgttgttgttgttggtgctttttcttcttcttcgtctttagaggcgataactttggcgtcggttttaccatccttggcgtcttttgcagcaaccgatatggttttacctgtttttccatctttggtgtctttggggtctttggccggaggaggtgggggtggaatcatgtgaggtgggggtgtgtgtttcagcttcacgagtatttgtctcattcgtgaaagatcggttggtttcccgggttttggaccttggacgattgtgatcgagggtctcttgtcttgatctttcttgcttctcttcttctcgatgtttggaacctcgtgaggaataagctcggctattgctttccaatattgcttgtcagcacttttgtggaaattctcttgattagccaagaataactgttccaaaacacatgttttgtactagtaaatagaatggtgtttaaagtttgagagttgttgaagaaatcggttttcagcattttaccttctccttttctcggttgttggttttgttagtttcgacgttaagcttccttttctcgtagaaagatattatgaattcttcagcttcttcgaggattttgtttctcatttccttttccctattctccttctcctcgagtagaatcgcgtttttactgtaaagcagaagaaagcaagtcaatttattaagtttgtatgcatataagttcgaaatttggaaaaccaatgtttgaattaaaggcagggacggtttttatatcgttatcaatgaacctctccactaatttagaaccttttaactcgggtcgaaggacaatggcctataatgctgttaactaacatgaactattcgacccttgtgagtaaatacaagtgcaaactaaaccaaaacacacatcataagaactcacttgtaagaaatcataagaactgaactcataatcttatcaatgaatccctccactacttttagacacttttaactcggttcgaagaacaacgggcctataatgccattaactaacataaactattgaacccttgtgagtacatacaagagcaaagcaaaccaaatcacacattaacaactcactagtaagaaatcatcaagctgaagatctgaactcaaatcttatcaatgaatttctccactacttttagaccctttcaactcaggtggaagaaaaacgacctataatgctgttaatgaactattcaacccttctgagtatatacaaaaggaaagcaaactacatatatctaacaactcacttgtaagagatcatcatgctgaagaactgaaactcacttcttgtctaataaacagtccacaagttttgcaaatgttgtctaaacttaataatgaacaactgagttaaaataaatcatcatcaaactgaagcactgaactcactaactaccattgttttaacttctactcaaactttgtccaactacactctctagatcaatgaacaactgtaagaaatccttgagccgaaacaatgagctcacagaacatgtcaaataaacaatctacaacctaaagatcttggaacaaacatgacccttctaaaactctacttctaaactaaatttaatctttattataattaaaatgtgtaccatttttcattactaacaaattcatgaagaaagctacaaaatttgctctgtaattcctatttgaatcaaaacaaaagcggttccaggctcatgatttgctcttatgagttcttgattcaatttctcacttcaatttacttagaataaattagtcatatgctagaatttcaagccttgcaaagattggacaaaaaatcaaagcaatgggatactttttgattagatctccattatgaataattaataaatctcaaaatagtttctcattctcattattatgaggaaaatgtatggatctaagctcaataaaatcttaaagaactagaatatacacagatctaagctaagccagtcagatcggaaactcaccgtctccattcacgaagagcgtaaccttcctcaggctccatctctgtcggaggcggaagaacaggaccatcaagcgtcgagaacactccatcaccattaccaattccatcctcaccaacgccataagactcaaacagacttccgtttccattatttccattcccgttcccattctcaacgtgaacagaaccaaaaggagacgaatctgaatagttcgggttcggatcttcgaatccgaagggagaagtagcggcggtggagtgatctacagcaacataatcatcggattggtgttgatcggcgggaaaagttgaggaagagaatgaatcgtaggctgagaaatcgtcgactacgac

SEQ ID NO: 301039 - DNA, 1085 bp, Cannabis indica
ttttagtcaaactatttgtgactaaaaatacatttggtcacaaaaattaatagttttagtaacggactttttagtcacaacataggaatcatgatttataattagtcacaatttttacttttaatcataagttttgttgtgactaaaaataagattttttgtagtgcccccggtctgaccaatcaagagtacttagtgctattttcagaggggtaaattgagtggtaatagcagtgattattggatatagactaagaaaattaatggatgacttcctccaaatcaacctatctaactcagcccttgcgagcgttcccccaatcctgcaccctctaaggcagtaatatccgtgaaagacaaagattttatggtggaggattctatcaaatgttctccttattaagtcggtgctgggccaatgtatctctatgatacttcttgccctatttgtggggatcataaagaatctatggagcatcttttccttcattgtaatcttacttgatcatctctaaattaggtcctccctgtggggtatttttcccaatctcaaattcgaggtgctcatatgtgggactggataaagtttatctagaacatgagctcgaaagacttaattaatgtccatgaattgttcctctatgcttctatgtattgtggtcgatacgatttgacaagcctgtaatgataaggtacataacaataatctgtataacattacatattatattgataagatttattactgttatgcagactatggtgtatctattctttcccgcccttcagtggatcctgtgactggatggtcttttccaactgaatcaagattaacttgatgtgaaagtggtctggatagtgtgggatctgtgtgaaactgttgtggctagggatatttgggagcgctttcttgggtgtctaccaattttctgatccatttaaaggagaagcaacatcttgtcttttttgttcttgaaatggaagttcattaaggaaatacttttgtaatagtggaaagtgactcgaaaattactatccaagcccttaacgatttaatttctagatgaaaattgataacttttgta

SEQ ID NO: 301040 - DNA, 3187 bp, Cannabis indica
agaaacttgcaaagtgtaagtggatgttgcaactgacagggttggcgcagtggagcaactctaaaagcttggacataggcatcttccaaattgatgattccctaggccctggacatgaacttggacaaagttttggccctcttcctttgtatttcactccctaaaaaggagcctacagttagtctagactggagggccaagagtttcatatcatcgctgaccttagttttagtcgttgctttcatcatttgttggatgaagctttcacttggctggtgtttgagattggttagggatctgacctccatgttatgatccctagcagcgataaattgtttacaaaaggtagattgtaactccttctagccatgaatcaatcggagagacagtctcttccaccaatccttagcggactcggttaatgtcagcgaaaaacaaagtcacttggcatcatcactaaatcttgccaattgcatcagatggatgtacttggagaggtgagtcgtggggtctgtccttccatcatataacttcatatgtgacatcttaaattaatctggtagtggagcttcgatgatctgcttgacacatggttttggctctttgtcttccgagtcagagatggcgccactttgctttcgtaccaagtttttcaaaggcgttatttgttcttccagtttcttggtatcgttatccagaagttcatgttcgcgaaccttatcgttgatgtggttctggagatcattcccgtgaggtcccactttttctcctctgtctttttcacacttggaatcaaggcgtctccgaaggtcaactgtggactaactgtcctctggataaatttcttctatcctatcattctggttaacagattcactagggtggtttttccttcccttcacagtaggccttcgtacttgaataccaagcctaatgttacggtggtgaacttggctttgcagagcggaagggcatccaagcccggaggcgttggtggccttcttagttcgcaagggctggttggttgtgctcacattatttctaaaatgtaatgggacagttttaggttgatactcgtctacttttgccttctccttgtcctttgcaggagccgaggttccaacatcagtagggtttgctcttttttccttgttaacaggctcctcttgagcatcttccttggaatattcatctatgtcgaatttggcctacaatcgtaccatcattttctccatccaacgagaaatagcttcttattctgctacctttttttttagagttttacctaactcatcggatactcgaaccaccttgaggtcttgctcataataatattcgtctttgtaatatccatctctaatttcaccatcgtcttcttcctcttctttcttgtcttctgggtttttatcaacaaattgtttctaatgttgggttgtttcagtcgttcggtcgccaacttagaacatttcttcgtccctcatatggctcagctaggcgagccctatagggagcagatgagtgtcgtccatgaagacatcctagtctggaagaggggtttctcggtgatagtcttttgggtagccaccatttttatagatgtgaggtagcttcaactctttctacaactctcaatgaaagcaccaaaatatttaccaagatttttggaaactaaattaaataagagcttaagaaattaaatgactgttcaaataaaagagatggagacttttatgtggtttgtgtattaatgaacctagtccatgagtcaatgtattagcctaagaaggcttgatgtattacaaatgggtcttacaatttgaagaaccataatacttgctataatattttccctctagatttttcttagaagaagaaagcttagagagaacctaaaagttttttttttatctctttgcatgaaggggtaaaggagtttttataggcttagattcggatcgggcacacatgtgacccgtttagggttcttgtgcaaaataggtcactattggggtaaatacatgaaatacatgactttgaggcccactgcaagattttggcttgtggggtgaaagtgttcgtacaaatggggtccacacggtttggacaggtgtcacgcccgggcgctacttcaatagacaagaatgtcaaataggcactattggacaaagaggagatactcctttggtggtacgtgcaatatcatgttctgacataggggacaagatgtgatttggtgggaacaggcatcagtgcgtagccacatcaccctgcaagaggcttccggaggcacctcttggacttcctctctggatgtgtcccatcgattgtccagagggctttatgtgtttcgtctcctaaaaggctggacaagattgcagaagtggagaggccttgtttttgaaggcgaggcttttggagtttagatgggttcgacttcgagcccatctctgatctagactgagcttttgtatgcaagaaaactttggcctagacttatgcagactaattatactttaaaaatgccatgtgttgtctatcaaaaaacataaataacaatttctattattgaatacctctagagtcaataggttatcatgtttactagcgtatgtaactctaggcctagatatttgaaatgtagtagttagtcgttgtgacaccctactaatttaggcacaccacatgatttactcaatagtcctaatcatgatatattaaaagtaagagtgttgttaatagaagaatgataaaattaaaaccaaattcgataaatcttttttttatttataatactgtctcgggatctcaaacaataataaaaaaaaaatgcacatacataaagtatgtcaaaagccggcctaagttgcaaaactaggttagaagtcttccaacaacctaacccaataggtcacattggctggaacatgcacatcctccacgcaagcattccaacttattattgactaatagtagccatagccaaggcctaacaaaaaaagtaataaagacatcactattaaataataatatataacatgctaataagtaatgaaaataatttaatcatctagggccttgcccaattcttaaggccattgtctaatacttgttaaattattttatataatataatatatttcgattaaataattaagtgtgacaaagtattaattttgtcaaattgtaa

SEQ ID NO: 301041 - DNA, 2219 bp, Cannabis indica
aatgcaaattaaaataaaaaaaaatgtcctttaattgacatttttgtgtaaaatgtaccaacaaaacacatgcataattaataaaaataaaattaaaaataaaataataaaggacacattcacgggggcacataagtactttagttaggcatgaacagtttttagtaaataattccaaaatatatatataaagaaaataataattcaatattatatttattttaattaataaaaaaaaaatttaaaaatctgacattgatatgtcccaacaaaattataaacagtaacagtaaactctgcatcgtacgattttctttaatcagacggctcagagaagcagttgagaatttttaccaaaaggattttgccttctttgaaaaatttagcagaagatcttctctgcagtttcactcatattttatttatttatttattttaatttagctgaaataaaaataaaaagttaattaatatcaaaattattcaaaggaaataattaataatggacaagggtgatgtaagcttttacaaatagtcaaatagtaaattcagactttcataatttatctctttgtcatttattaaaagggtttttttttcttgtcattatgactattaacttttcttttgagtaattctttataaccattaaatatttcttcacattttttctttattatacaatttattttttagcaattatgaatctatgattttttttaaagataaataaaattaattagtaaatgggacatagttcattatatgcaggttttgcttattgagcataattaataaaaataggtaaattaagctatttacaattaagataaaaaatttaacaatatcatcaaatgacttataagtagccacatgcgaaacatcaaaacaatgggaaaaatactaaatttctcttctgaatgaaatgtgatagatcacacttattaatagaaattagtcaaagatcttctaagaaaaattaggtataacgcccaatttattcaaataagaataacaaaaccaatcatattaaagacaacccagatgaaagattgatccataaaacaatgggttaacaataatatagggaacccccgaataacattattgaaccaaaaaatctcacttagaataaaaactactaatttcattaacacaataaaatggtcatttattaagaaaaataaataatgaaaagataattattgtaattaaaaaaaaaagtaaaacaaaacactaaaagagacaaataataggagaaccaaacaccacctcatccctggatcccggtcatcactagtatccacaccaactcacaacatatcaccatagtcaggaaagtagtagctaaatccaaaccatcccggtgacaaaccttaaccagggcaccaccgatctgtttgcatcctcttcccctggcacacaactggagattccatcactagaccacccccgacgaaacggggatccacccctaaagaaggcaaatagaataattgtcgacggcaacccatgaccctgagggaaccctcatgcatgacacccttctcaaaccaaatcatgttgatgccaatatcagccaccacgaaccaagaacccaaacaaattaacgaggaagaaaatagttggtcctccataaaatgtctccctagagagtatcatcaatattcccccaattatgccacaactaagccccaaaaaaagctggcaagccacagccggagagaagacccaactctagcagaggcagcattaagaaaaacttagagagaaaccccaattttttgtattggattttctttgaatctatgattagaatgtttctatctaaaatattatttgatattgttagagagttctacattattaatgtgtggaaagataataaaatatataagatgaatgggatacttctcccattatcaatttattttgagatggaacctcattcttcttatctcaaattctaacatggtatcagagtaaaaacaaataaaaaaaaacctctaacgactatccaactcaaaaaaaatcaatcgaagtagagcaaaaaaaaaaagagccacaaaaaatcctaaaaaaaaaaaaactgatccaagagccaaaagtcaaaagtccacttgtgattcaggaatagtgagccaaaaaaaaagtcaccatagatccaaaaatatcgatctaaaaagtagagcaaaaagaaccacttgtgatcagggata

SEQ ID NO: 301042 - DNA, 1594 bp, Cannabis indica
ttttttttttttttcaatttaaatagccaagcaaaacccacaatgggaaataaataatacatgttgaccttatttttgttaagatgttaaataaaataacacacacacatacaaattaattataatttattaactcccctcctttctaataaagtttgttttactttgttgtgtgtgtcttttcctaacactttaataaaaatactttgagtccaactccactagctagggtttagggttttcttttatggccccacgtaatatacccacttattgaagacctttcaaaatgtcaacaataatactatgtttttatttccatgttccaatgttttaattttctttctcaacagctcttgagtgttacaagtatcagtatgccactagtaaaaaatcccttgatgaaaatccaaatgaataattatatctaagggttcttgatgaatatgctttcccatttcatttcaattaaagagagagtcatgatgtttgttaagtgttattactattggttttccatcattaatattgcgaaatactaaaatattacttttagtcaatgtaaaatttgcgactaataaaaagataccattatattatttatatagtcaccaaaagaatttgtaaatatgagaaatactaattaaaagatatttatagtatagtctaatattttcacaaggtgatatatattattactgatacaatttaatattgagttcatacttattttactgtaataataataatagaaaattactaactatcatagtatctaataagaatattctatatatataagttaatatatatatatatatattagtaaaattttgattaaataatttcttagtgacaataattttgtaagtaatataactaataattggctgtactaacaactaaaactaatgatattatataatgttttattattacttaaaagattatttactcatacaaaaattatgttaattatgtgactaatattttatttatttatatagtaagcaaaaataacaagtatttttcaacaaccggtatacaaaattttctaccaaactataaatttgatgggtatatatatctgcatcaaatcaagagtgagaatgactgacctaattatctcaatcaaataaacattggtttttctaatttgactcatctattgacaatttataaaacttgcttttgagtggatatatagtttataaaatatttattgttttggttaaagtgattaaataataataataataaataaataatgagagcttacctaattatatagaagaaatatgtaggtaagtatacatatttaaacttgtggatgtggttaaattaaaaggaaaataaatattaatagagaatatatatatatattaagagaaagatatgtatgtcttaattaggtgtatatatatacatggcctggcctataagcaattgacaagcaacaaaagaattaaaaggactgttatatcaaaggatatgtgattagagaatgaaattcaaaatcaaatattgtttgtttgatttatgtttgccctatcttctgcctatactagctagtagtgtacccttcttcagtggc

SEQ ID NO: 301043 - DNA, 1826 bp, Cannabis indica
agtttcaagatttatcacttcaatttgcaatggtatatccatataacctttaatttgcaagaacttgagggttgaactgtgtatgtgtagctgatgcggataaggaggtagaagatgacataacttcaaattctcaagggaaggagaacccaacaacaacttatccaacacatcattatcagcaaactgaacaaggcgcaatgacaacgatttcaaggatggaaaactaaacgaataacgcgaatccaactccaccttattcaactccaaaatagtcaaatatgttgctttaagtactaatgttttaggtaaagagtagtacttaacatgaattaggtaattcttacatctctctacagccaaacaaagctttatttcctgcaccttattatcaaccgcaaaagttaaccatttatctaagcagccaactaaactagtttcatagaattccatttgaagctcaaaactagttaccgttgattcagggatgatgtgcttacctctctcgcggtgttccaaacatttgtctacaaaattgaagaactcttcccggaaatgagattcagtatttgagaaagagagtttagggactaaataccagatgagtttccaacgatttgaaatgaggcaagtccgaaccacatccttagtaggaagaaacgagagtatgtgtactatgattgcatcaggtagctttgaaattctgtcctcctcatcctcctcaaccatcataaatgatctcgtttcaactcttttctcagccactgtgaaaactaccaacaaagaaaatcagtttactttgattcatatcaaatcttaaccagaaaagaagaagagagaatcgtttacctgttggtgcagcaaaatttttcacttggaagatttggggttaagtgaagagaggattagggtttagaggaagaacaacaacacctcactcctgcttatgctgcacgtgaaaaaattgagaagtttgacaaaataacaacagtaattccacataaatacctaagtttaatttttaacagtaataatatataagttataattttggaacttttgtaagtatctcgtgttaagtaaattgtcacgtgacaattcttaattggtccaaattattaaatttttaaaaaattaatttaaatataacaataagaaaataacatgtagataataactgaatatttaatggtcagttacctataatggtcgttcttctatggttacacagtaattcttaattgtttgtgccacatgtatataattattttgctagtaaaattttttgtaattttttttggatgaaataacaactttattaaatttagtattcggagtaaaagatatccaacaacatagttggagcgttagctacacaaatattactatcagagtaatcccgagaaagtctagcaacagtatgtgttagttggtttgttgatcgtttaataaaataaattttaacattaggcaaagaaagcaataaagttttacaatcttgaaccatgatgctcaaaacagaacataaaggagagtggctccgaattgtttgaatggagagcaagctattagatttaatctcgaccttctcccagtcgtttcgtttaacccaacttaaaattttcttgatgcccatgaccttaataattttaggagtgagagaattgtcacggaaagtagttttgactttaataaaaaaattgtaagtttactttactgataatttttttttttgggtaattttacaatgcatctccttaaaggggtacactaatgcacccttacctattttggcatctaattttttttttcatattcgtttatgt

SEQ ID NO: 301044 - DNA, 1532 bp, Cannabis indica
ggttaatttttatttcataaaaaattacataatttaatttttacatgtatttttttagatagaatgtctttatattaaaacaaaatcataatacaaagggtataatgggaggaggcatttctttcaaccatgaatatttagtatctactgaaagagctaacttagccaacaatgagtcgcattattagtaaatctatacacatgacggaccttaaatccaaaaaaattagaaactaaacgattaatgttatttaacaactaatggaaatcagaaactagctcttgtgaggaaaataatctttaactactaagagagaatcagtctcattaaatgcacaagtagttgaagatcaatgagccactgtagactatgcataagagccaaagcttccatgacaactggtgagaaacaacctcaaaaaggggtagacattgcagcaacaaattcccctgcactattacttaaaatagcactaaaaccagaaatttgattaactgcattactagtcgcatctgtgttcaatttcaggcggcttgtagggggattcaaccaggtggcatcttgagcatactttgtccgaaattctccagcacggttcgaggaaacagcaagacgaaaattatgagcagcgtgaaactcttctaggtgtgaggttgcataatagagaataactaaatgtaccattaaatcaaatttaattcaaacataccactttttatgagaagtgtattcaaaatacatttacactcccacataacaaacgattttcttctcctgaacacacacaactcatgtcaccttctctatgggatgattgtattttcgtcatcaccaccatctcagtctaattttctagtcaatgaattcacatcggcctctcaattccttgttggtttaacattcaatgctttacattcgtcttcttcttccttggttaatcaatcgatcgtcaattttaattttttaatctcttagattttggtgaacggtgagtcacggttgtcactgtactaattctttttcatcttcttcaggtttttgactcttatctctgtcattctcttttcttcaatactcattcttcgagtttctttgtattcatttttttaattatctagaaattttagaaactatcatatgtgaatgatttatatataaataatatataaaatattatataattttcttttttgatatatgggttgtgtctgctcttcaagagcccccagaggctttagtcggtgtgttcgaagacactaatctcaacaatttcaaactcaaataaagtgaattgatgcggatttaaaatttatgaaaaaaaataataaaattggaaaagcgattttgaaccttaaataattaaagtggtaaacaaaattgataaaaaaatttagtataattttgagctaatctcaatgaggagataatcttaaaattatgggtaaaaataatcacattaatttgtgagtagtaatgtgagtttggttttttaatttggttgagaaaattaaaaatatcaaatggtattttt

SEQ ID NO: 301045 - DNA, 4124 bp, Cannabis indica
aaaaaagtgttaccaaacgtactcttaattattgtgtaattttttaattaataaataaatatgtcaaattttataattattatggttaaggatagattgaattttaattagataataacgtaccaaacgtgatctgaggtgaatatggtgccaacagatactatacaccataactaataaatttaaattaaattttacaccaatcactaattattattacactcatatatattttttatttagccaatgccaaccttatcttctttcactttaattatcacgctaattacttctattaagactattatagatgcaatactatactccatacattaaaaaagaaaacatatataaaatgtaaataaatgaattctcttccctattcatatttatcaataataaattaataaaatgagaattttataacatctagggttgttattatgacacaaaaagaaagaggaatcactctattcttcttttaattttaacttcttcttatgatttttttttaggtttttttttttttaataatttagtattgctatgaagatgatgatttgaatttagttgtaatttaaattgtttcgtaaaatgcaccgtatatatagtttgtataaatgtaaaaaaaaaaaaacatataataataagttttacatatgttaattataaatttaaatataataaaatatatatatagtaagtatcataatatgtcttcggccttgcgtgtaataatgtattacaatttgcaaaatacaattccaaagtcttatttgatcgaataatcattccataattagtgtcttagtgttatttttatatatatattcattatataaaattaatatactatatagtagtatagaagcatttaccattacgtactctagaatctagatcttaccctacaacatatgtcattaataatattattctagctaatatatatttcaatttaatatatgatgacataccaaacaaaaagtagtacctcactcacatgcaacttacctaaacttccttcctaaatcaactatatcaactcaaattaagtcacccaatagtaaattcacactctttaaaagttcaaacaaagtacatttttttaaaaagaaaaagaacacaatgtgcaacttacctagtcactaaaataaataaatagataaacttaaatatatttttcagttgtgttaggttataattttttggaaaattactctatattttttttttttaaatttacggtttgagtttctaaagtggttgcagcgctagttgcaatcgggatttttgtataattttttgttgcaatttacgttgcagcgctagtttcaataagagtttttatgtaaaattccgtaaaaataaaaaaaaaaaactattttgaagtgtaaaaatgaaaaaacctctatttttttttttgaagaacccctaaatttttttagaactcttattataaaaatagacagtatattaaaaattataaataaaaaaattatgtacttaaatgtgagtctaacctgtcttaatttaagatcgatcttgatttctcaattagaaaactaaaaaagtagagttattacaccacatattgaaatttcaaacttttttacttttttattgtagggtagaatttttataaaattccaaaaacaaaatgtattacaaagacataataaaatcttttataaatgcatgatcattggttaatttttcttactaaacaatgttgaatatctacctatccaaacctaccaaaaaaatccatattacattctttgcatacacaaatattataacaaaacaaaaaattatccaattcataaacacactaattaaattaattatcatgcaaaatcataacaacaaaaaaagattcccaaaacttaaatatttcataacaaagaacaaaattagcattatacatctcttatcttatctcatcaaaatcaaatcattttaactttctattcctcaacgttgtcgtttgtcttaacattacatgtgaaattacaattttgtccctatggggagccatgtttgggctacgtgtcgtattaggataggaccgcatgtgtgagctagcacgtgcgaaggagagagagagaggtgttctttgggtccacaaaagacggaaaacacataacgtggtgggacccactcggaactaaacgcacgaagcctcacatgacaaagattttaatttaatgctcactttcctgaaacaaggacacgtgtcggtttgtctccggaaatttcggcaacgagatcaccgttgattgagacgagagagtagaggcttgtggggcccatcctacggacgacgtgacttccgctggttttgacggcttagatcgtccaaacttgacagtttcacattttgtattctcatttcggttatttttatcttttttatttcgaatctgccgacgaatatttacatatacgacgacgtatttgtggggcaggtgtagagctttgtttaaccgatatattaataaatattttaaacaacttttttgaataaaattggaatttatgtatatattatttttaattttttttttaatttagggtttgagttgttttatagttattatgttaatttttttttattgtaatttaagttaagctgttaattgttatgtgaatttttactaaaaaatattttaaagtgtaaaataaaaaaatctttaataaataatcaacatttattcaatttttttaagggaaacctaataatagatattaagatggaatatttgcatatttaaatttttaattttgtaaatggcacaatttcttaattatttttagtggtgcaaagttccttttgtatagactgtatttatatcttaaatttgtaattagactaaaattttaaatttattgaaagaatatttaaaagtaactgatactacacgttttcattaagatcaaagaatttagaagaatttataacaacaaactaaataaaaattataattttattaacatttacttatgttactaaaaaattatttacttgttacaaagtttgaatacttatcctgtaaatatccttattaagaattaggaaaagataaaaagaaagtatttttttttatttatgcgtataagcatcttaacttgttgcatgacaaatggtcagaagatagtaactttggcttttgaagagccttatgagatctcaaaatcccgtcaaaattcaagaatttactttggagagtttgttttggttgtttaccaacattgtctcagttaaaggataggtatatgtggatgtatctgttacttatccagtgtgtaatgatagggtcgaatcaattcttcacattttggttgactgcccattagtgatctcaacatctgatttctccagttagtttcatcaagttttggggagttttactaatttgaaggtgtgtcatgtagccatgatttgttggtttatttggcgggctcacaatgggcttgtgtggcatagtaaaagttctattgcaaatgagacttggtggctgcagtgttatcttactttaataaatagaaggatgctcatgaacgttcagctaacactttggcttccaacgcttgagttagtgtagagcattgatcgactccgagtgttgatacgattaaagtcaatgtaaatgtctctgttatttcaagtgcagatttttttagaatttgatggcttgctcgtgaccatcatacatggtagtgtgttatttcattcttcgaagcagatgccttgctgagttcagctggttgtggctgaggcaattggtttgaaggaagcactctgtaaagaccgcatatgataatactatggattattaaataattagggtttatgtatgagattttgctactattaataaaaatacaaattatgggaatttaattgagttcatatatgtttttatgctattttatgttaattacctaatttctgtgttgtgttcggaagctgtggaaagcggcgttggggcctttagagagtcatatcttatatattttgatgtatgttatttgttcggggtattttgttaagtattgaagtgtcgggtttagtattgaccaatttgcccttgggagttggtagctagttttaatagtta

SEQ ID NO: 301046 - DNA, 2105 bp, Cannabis indica
ataaaatagcataaaaacatatatgatatataaaatatatttctaaaatatgcattccataattattaatacataaaccttaaataattaataatacaaagtactattcataggcggtctttacaagcgcggagtctaaatatctaagcttttctattgtttactgattgcttcacgaaatctaagaccgtactttgaagcccgtgccatcaaagtacttacaaatcatcatctccgccaagtacttcaaaatgcagagttatctagaagactcttgaagtgggtaatggagctaagttaattcaacatccattatcatccaagagtctttattaagggtcaagccttagcatactttattgtggaatgcacatgaataaacaaaaatcctagagaacccatcctgaaactaaaatatggagaatatatgtagacagagcatagaaaggtttcggagcaggaatcattttaatttctctacaacaatatatcaacttcaaagtgcactctaatttgagttcgaaagcttccaacaatgaagttgagcatgaagcaatgattgctagtttacaatttgttaaaagaggttggagtccaaaacattgagctctacaatgactcgcaatcgatagtcaattaagtttttagagaataccaaacgaaacagaaaaagatggctagttacgtggtaaaatcttgagaactgttacaaaacttaaagcattacttttagttaagcaaatcccgatggattgaaataccttcatggatatgctagcaaagttgtccattaatccagaaattgaaaaatatgtatagtcctcatcacctacttatcagttccaagcacagaaacactcgaggtaaccgtgatagatcactcaacttcctggatgggtccaattcagaagtacatagaattcggaacacttccggatgacaaagcagctgcatagaagattcaatatcaggccccaaggtatgtgctcatggatggaaaattacacaaaagaggattatcaatgtcatacttgagttgtatagctaaaaccgagataagcgctattatgcacaatatacatgaaggattttgtgaagatcatacatctagacctagtttttccaagaaggtcatccgccaaggataattttggctaactatgaagaaggattgtatcgaatatgtccaaaaatgttcaaaaacgtgaatagtgtcagtgttattccaaagttcctagagctctgccaatagagatacctcgatgagcagtatgtggccttttgctatttaaggaatcgactttgtatgatcacttccaactagaaaatgaggaattaaattcaccattattgttgttgactacttcaccaaatgggtagaagttgagcctatgaacacaataacttcaaagaaggcacatgactttttcatcaagaacattgtatgtcgttatggtctttcacacaaaatcgtgtctgataatggcaagcaatttgacagtgatcatttcactgattttttgtgtcaagcatgaaattatcaaaagttttccagctatagctagaccacgagcaaatagacaagtgaagccgtaataagactctaaaaatgaccttaaagaagaaacttcaggcttgcaaagtacactgaccggaagaacttataaaagttctttgggcatatggatcaatagaaagaacttcaacaggacacactccatattcaatggcctatggatgtgaagtagtaatcacgattgttggttttatagtactaaattaggtacgcaacagaagggtttcgtattatttgattataattgtaccatatcccaatggatctccaaatgtacgtgtacatttaaatcaaaacataaattacaagtttagatcatatacctcttgatgactattaaggtattctcgtaacttcttgtatgttgtatccattaatctagatgatgaggatgatgcaattggactcacaccagtgtcttccaaatcattcaaccatacacaagaaataatatgagctattaggataaagtgtataatggtgttcttgttgagttctcaacacatgagtaagaacaattgagagaaaa

SEQ ID NO: 301047 - DNA, 4297 bp, Cannabis indica
tttttttttttttccaagaaaatcaaataaccatatagtgaaaactagattcctctaagtcattataaaaggtatacactttgttcttaaaacaaaatcatgatatgtatagctttaattcaagttgagttaaaaaatctaaattgcactccccttaaatcttggagattcttctttcatttgtctatactaattaaaaaacaaaattaagtgggtgactttttttctttttcttaattaatgcctttatttattattattttttttttaaaaaaaaggcaaaagtggagaaaggactttcctagaaattaatcacataatgaaccccaacccactaaatctgaagaaccaataaacccttccaaaaatggaaggtgtttttagatatagcggcggccgatgaccaaaaccatggtgggcctaccacgactctccggtggcggccggggcatttctctttcttcccacttatatatattatgtatatattattacacacatctattatgtataaatgtttgtatacattaattgactaagaaatcacatatttattttattaataattacatatatttcagcaaaaagtgacatatatcgtacctaatacctatgtatctatccacgcacgcttgtgaagtgaaggtgtgcaatgatcaaagcacgtgtgtaaatttgatcaattgtattttcacttacaaatgggattactatacatatataaagcttggttaattaaggcacgccaccacataatcattttatagctaatattccgctttagggtgatgaacaaaataatggaattaaagtgtcaagcaatatgaaagatacatattataaattttagtttatataaaaaaaatacaataaaaaaagttaattatcaagatttggagaagggttaaggccagccgtatccgtttctggccacattggtatactgttaggcaacttaaagtgccttaatagcaatgctttaataattattttccttggggttaggcaaattgtcctcttcacataaataaaggaaagttggtatacccaatctttattcgcttagctagttaagtttttgaccggttttacgtactactggtcattgtggttggagctagtactagtatatgtatgaggtgttacactcattaattttggtacgttagttgttcaagcaaaaacaaatttcgtatatatgttagtttcatatatatagctaccacacaaattctcaaaagggcaatcaaaattttgatagacttagaacctttcaaatctattttcaagttccaatgattatattaatgatctaaacgttgcttccttcatggttgagaaaaaattgctaaataatattagtgatttttagcattttttatgtattaataatgttattgatgcaattaagtaagtatcatataatttaattcaataaatttaaaaaattatcgataactaattacaaaataagatatttgtattacttttagaagttgctcctcatcccaataacaatgctaaatataattacctaataaaagcaatgtcctttctcttataaggatcctctttattatggcctttttttggttgttaaaaagcgttcttagattaaataatagaaacgacattagacctcctagtcattataaaatagttcagtagaaatagtttcaactggaacaatttcaactcttcggtggacgaatgcctacctagccacattatggacaacaaaattacaagttctgcttatatgagaaaaaataaaaccagagaaacgagaagagtaactattacaaaatgagatatagttttctaaagcccattgagaatccatcccattgagagtattgataactactctcgagtcactctctacaatagcaaacttgtagcccaggtccatggcaaccgaaaccgccaaacagcaagccgccgcttctccctgctaaggtggtctctaacaacaaccgctaaggtggtctctaacaacaaccgctatacacatgctttgaagccccattttaacatcgcaattcaatttgagccaatccgcaagaggaggagaccaaacatccttccgacataaagctggggaaacaaaaagagaagcatgtaaatctgcaaaagcattacaaatattgtcaatacattttttcatgtcaacaggataattattataaaccttatcatttcgagtgagccatagagagtcaacaacaatcgaaacatagaggaatacctcttgagtatcaatgcccctgtgtttgagatcccagttgaatttgactcagtcccacatacgaataccagtatcacaaacaagataaatatcccaaggggaggccctccaaacatgaagagccctctttattatggtctaaaaatgctttcagtttggccctttcaacatttctatatagtacagttttgaaattcatgcgtatcatatcttaactttatgcagtaataagtccactgtggtggggcagctgagccaccttcaaatatggacgccagtatgctgcttgagcttaaataacatttcttttctcttttttactattacgaatagtttacaaaataagcactatatattattaattatattacttggatccttcccacaaaggtaagaactatctaataatacagctgtgaccttaggctgaggatgagctaaatttggtcataattgatttctaggatagtgggtttttctgtggttctcatacagagactactactatatttacacactaggtttgaagagattggttgacatgaaaaatgaacatagtcattcaaaaagaaaagaaaaaagataatttattgtcatcatatataaaacggaaattaaaaatttagattttttttctaattaatgtacaaatgcataaaggatagtagtactatgatattatccatttgagcctaattaatctttacccaagtggagatattaatatgtctatcctcttaaataccagtgattctccccattattacatgggattttggttgcaaaattcaacaattctaccctcaaattctcgagagcaccactctaacgtgagcgccttgctctttctcaggtcaaaatcatatttcattgttttggatgagttctcgccgagggccgactctacactaagagagactatgtttatacttagggcctacttaacttagagccttaataaaagttcagttttaaaaatacacatgttttatttatttatttatttttaaatagagaaaatacttattagtacattttgtttttacgaaaaacatatttagtattttgcgttttaaataatacttaattagtatctcatatattttcgcattgtaaaagtaaaatttaatcaatataattttgtcaatttaagtagacaaatttgagtaatatgtaattaaataattaaatttaaatttagaattcataaaattttagacaattgtattgataaaatttttttaaaagaaaattgaatttaggatagtaaatatgtatgattttaaaatacaggatatcacttaaacattattgaaaatacagggtaccaaacttatatttaaataaaatacaggataccaaatgcgtaaatgtagttctcgcctatcatgatattacttaagaatctagggtgaccattttggttggacatcctgattatccttccacatgattaacttatcctgattatccttccacatgattaactttttgatattgccaccttactatctaagacctttgaataatattgttcatatttggtctagggccttaattattgtgaatttgcccttgggttatatacaaaataaatcataccaacgtgacgtcaacaggaatattatacacatgattctccttatttatatagtcattataattgactcaatgtaagacttttttgtgaatgcacacttagaacatatttcttttccttaaaataatgtccaagtttgaatcatttctcggagaaaaaatacgaatgtgttatatattataggctgaaaaaagaatgtcagtgtatctccacctctcaaagtcctcttgcagaaaatacctctccattgttttggttgataagacatgttgatcttagttgtatgttgaagaatgggtcagtgatgcccatcaaaatgaatggtgataatgtattatatgaatatgttaatgggtttacaaccccctcacagtgattgtgaacatatttaagtcaactttaggtctatgtttaattttctttttccatattttataccatttttatca

SEQ ID NO: 301048 - DNA, 1647 bp, Cannabis indica
tgggtatattattaattttcttacactagaaccaaaatcatggacgagcttcaaatgcaaccacaaacaagttccaagcaccattgacctcgaaccgaaactgtggacaccgagatctctgcgtaaaagagagtgggagaaacatagaaaaaataaaatagagattcgacttattatcttgggtttcttgggatcttcgatcctcgacgagaaatacggagatgacgacccatagagacgacaaccgatcgaatagagacaacgaccgattaccaagatcccttcactagagagacgaggtggagatgacgactgtccgactagagtttgagagatggaaaactcaaatccatggagccatggatgccattcccaggaggagagcaggcgagagggagaagaaagagaaacgccacgtgttttatcttgtctgatacttttcatgtaaaccctaaatatccaccttttatttattttgatttattaattacattactttacaactatgttttgttttttattaatttttttttctaaattatgccaggtgggtcagaatatacttatccaattgcaattggcgcatcactatgtatatgccagtatttttcaaaaaaataaaaattagaaattttttgagttttataattctttaatgaccctttatatttttagtgacccaaatcataagagactaatactgaacatttagaatctaattgtataggttactaaaagtcactcctaactctttagtgaccagtacttttgtccgggtcaaaaaaactaaattgtagtagtattatcattctaaacatttccaaaacagttcctattcaacctttaaataagtcccttttaagtcttttaagcttgtttgttaattggtacataggaacaacattaattaactagatccttctaacttgtttcaaccaaaggtttgaaagaggagctagaacaccacatgttaaaatagctagtttcaatcaaatacatctttacagcctagtataacaatcaagctatactcaatcaatccaactcttctaaactaactagttttctctcttttaaaataagagaacttaagactaatctctcggttaattttatttacaagaaactgtacagtatcaacttgagcattccaaaggacattatttctagcctcccaaatattataaaccaaggcatttataacagtcacgtacgtagagctctcattccttccttgcccgtttacaccttttcacccattttaagcaatgaaacaactcaccccacctacttattatatatgtcccctcacaattaaataataagtactctaaatcaaggtcacaaaataggcagttcacatttgaaatacaaccaaacttatgtttatatagtatggagccggttctaattaattttattaccttgtttttggtgacagagattaattgttaataaaatgatcaatttcgaagtcacgtgaattttatatcttttgaagtagctatatttaacagtagtcaaaaagtctaaattcaaatctatatccatgacaagagtgaaaaagcaacttttaaggttattaacatttgtctttataattaaaatgaagaaatttgcgtaacaactgcaggaagtgtgtgatca

SEQ ID NO: 301049 - DNA, 1039 bp, Cannabis indica
aataataataataatataatttctcaatatttataccaaaaaaaaaaaagacgggatgcacatttttcccttagacggaaatttactctctaaggaatagagcgaggctaaagagatcaccaatttttgttcctgaatattaatcagagtatggactagataatactcttgcactgatatttgtagatttctacattgtatgtgtaataatattagtatattgaataataaataatataaaatatttgtatttttttgtaatttaaatattttctatactaattaatagtctttgtgagaatttttcacacgattaggaataatatacgagagtataattaggattaaaattcttaacaggaacgagagaacagtagagcgctcccaaacaattctaataataacataattatactaaaatggaacaaaggactaggtataccttccatttcataattttggagtgggaaggtgtgactatataggtttaattatttaatttttaagttcaacttaattataattatttttgtctttacacctacttataatatataattatctgccaagttttaataatgttataatgcatcttattaagatgtaaagatcgtttaagttcaatatattaagttattaaataattagggtttaattatgaaattgaattattaattataatattacatattagtattagtgaagatttatttaatttcaatatatgttatatgtgaacttctcatttacctgtgactgtgttcgggagcagtggaaagtggcgttgggccaatagagagtcatactttcatatggtttagaatgttttcattagttgggtattattgctagacattagaatgtcaggaaattgtcggggttttggaaaagactaagatacccttttaatagtcattaaactcttatcttttattaagggcatattagtcttttaatttgaggattttgttttatatgagcacaatatattcagatttaatatttgatttattaaaaatgggtaaatatcattttggac

SEQ ID NO: 301050 - DNA, 1386 bp, Cannabis indica
aaaacttttacttagaaatctttttggtgctcttagttccaaatccaaatttgattctgaagcatgtgactctaaattgccttttcttttcaacatattagatctaattccacacaaaataataaaatattagcataaaaaatatgaaatacattaaattcaattaataacacacacatattatatatatatacctttttcttacgtcaatttactatttttttttctatatttgattcttttctttttgatggaggtcgacctctagtcctcactttcaatggacttaacaccttcttgcaagaattcaattgattgggtgtattattgtcttgttgtaaaaatgaaacaaacaaaaaagttgtattctgtgtattacatgcatcttgattctctaagagaaaatttcccattaatttcatccaatgctttgaaaaaaattcacacttctaaggtgaatcaattacattttctataacttcattgcttttcttcgtcaaattgataccattcaatttctgtatgagtgtagctatcattataagctttgaatataagtgtatttttgtctaatatctaaaatatatcttagatgaacctcctcaatgtattgatctgttaggacagctattacatgcctactcaaaattctttaaattcaaataaatgacatatgcaactaatttcacatttgaccttatcaaaagaacctcagaaatgttgaaatcgatccatcactcttaactaatgtgacattgcaagaatataatcaacgtactttacctttaaatttcttaaacatttccttgttataaacatcttgaaattgcctctcaattttaaaatttgttatcaatggaatgtttgaattaaaagaagaaaatgttgccaagttttctttctcaattttacttctcactgcattatcatattgctccacaaattgctccaaggtagtctttgagtttatatatacagctatcaaaaaatgaatttatgctttccctatgttgattgattggaaaaattgccaagaatctaaattaggtcaattagtcaacaataaagagttagaaataataaataaatagaaagaatacagatagttatagaggtttggccgtgttcatccaatctaattcgcaatattttgcttatagtgcatccaatcccactatgtacggattttattttttggatccaatctaatccgcataatagctcaaatctaatctaatccaatccgcaaaagtgcagattggatcggttattttggattgattactttttaatattaaattatttaatatttatgaaaaaaatattttttttcacataactagcaacaaaataaaataaattatagttattttatgtctccaataa

SEQ ID NO: 301051 - DNA, 2343 bp, Cannabis indica
aaaataccatcttttctatggacactagaattggtgttgaaattgaaaaataccacatttcttacttttgtattaattatgtttttgaggtgttggaaagttgaagatttttaacacacttgaaatatatcatatcgttcataaggtaattttttaccgtccataataataagatcccttatacaaatctaagcttttcgaattggaatcataactatacatataatatatccttattataatatatacatgaaatacataacattcaaatttgttatatattttatacctaatctcttatacgcatataataatatgacataatattgatgtactacgtactacctatagatctatgctaactaaattcttgcgcacctcaaaaattataaccaaactatgtagtggatcactagcttattgggtcccatatgccatgccctaagttctcatccataggcataattttatcgatatatatatacacaaactagaacaatatatataggacccgccaattgtttctatatggaatcagtatataaaaaggaagaaaatggatcaagatgatttaattgattattattattattattaagtgtggattcttatgactttttttattgaacatactgagaactaacatatacttatgtgtatattaattatatataaatcatcagcaccttttttcctcgataagtttgatatccaatgtatacatatagatgtgaagagattgaactagaatcatggaatttgcattagtgtgtctccacccaattaggaaacttcaaaattctttcttttctttctttatctttcttgcgatcatatatatacatcatcacttctccaatacacgtattattaatttttagtgtttatattatataaaatatctcttttgcccacccacacaagaagacacaagagattgggccctcatatactcattggacacgttgcaaaatgttccatagtagaaaccatcctccacaaaagcataattaataaaattagatatatgtgtgtagtgaggacagtataattatgcagcctaagaaaaacagatgatcatagcagacagtaggttgtgaagtgtgtaataacacttgctttgaaggtgcactgatcttgtggaggattgaatcatgaactaataagggacccatttctatattcaaaataataataaataaaaaaacatattaaaattgtgtgacaaattatatagtatatatatatatataaagtattttataataaaatattaagccgaaggtgatcgaaataacattttcgtgatagtggcgggaccgaaattggggtgtgatcgattttactttgggtgggaatgggatgatgtgagagctttaccacatatatgtgtactagcattaattacattatatgtatatgtataataattttccagtaataatgggaagcctgatgattagtgaagaaaagtcatgctagttggacggaactcatataggtttttgagcctaaaaataataaaacaaaagaaattaatattagagcaatgatactttcacacaaaatatgtactaaatgataaattatttagatataaatatgaaatatatattatatgtttgatatgtaaagtggaataaacaataaacatatcgaaaccgtataagtaatgaaataattgaaatacctttagtgattgatctttgaacttcaatcctatcaatatagcttcggtatgggaaattaggcttctaaactcatctctttaattagatggattatgttgttttcacagaatgagtgaagagttcgggggaccgagaccttatatttataggtgagatattccatcaatatttgcgccacattaattatcaggatattttaacaagtaattaggaaaatctaatcgggtaatgaatatttggaacatcaatctgaccatataattgtgaccacatacaataaatctatgatatatattttgttacgcacatgcaatactatatatagaaaatattcttatatttttcacttggtcagtatttaaatttaccacttaagcccaacgtttctcattacataataagtagatgaatcatatcaatttatcttacatgtattccaatatattaactatataataatgcatgtacttatgtgcaatgtacttaaatgaataaaccctaaacctaatgtttattgtggtcctctaaaattttttcaaatgtaaaattgagatgcgcataaatatgagaaaatatcaaagtaagagtttcattaataataattttatttgtaaaaattacataagttgtatgttctctacatgatccttga

SEQ ID NO: 301052 - DNA, 4265 bp, Cannabis indica
ttatagatttttttttaaattgggcgggttgcacttaaattttagcaacccgaactttagattgggttagaaaatatgtaggataaaccgcccaaaccgaccgatgtacatccctattaaattccatgcattgagtagttgtgtcttgagactctcttttgcaaattcggtcattgatatgatttctcaaatcatctccaaaaggcatgactttctcgtttctagcattttccctcttggcatttagtcgtgcccggagattattttttgagagacttccacttccatcatctaatattggatgaacttcctccacatcatcactctgactagtggaattctcaggataattcatatcttttttggtggaagactttcgtgcttatgcatgagacttttccttatgcacaattttgcctctagaatcagttcggtgaccttgctctgaagcattggttcttttctttttcttatgacgttgactggtagggtttgctctcttatgttgatcattaggagcaacttttttggaggtttctcctatttttcttttctctttatccttaagaggattatgggagtcaggatctttaggttttattttcccgacattatttccatgaggattggtatcattagtttccatcaatattcttgttttctcctccgaatatagcttccaacattacaaatttatccaacatcattcgtgtgatgccaatttttgtttagcttcttctatttttttggccatcctaacgacttcaggatctgactcaaggtgctcatcttcctcattggcatcattgtcttttggatccacaggatctgagtccttagactcgtcttctttttctcctttatcgataggatcatcatgaaggtttttctcatcatgctaatcttttcctttttggcacctggtcaccctagtgggatcttcgtcaagcctagttttggtatttagatcaacatcatcttggtaatgaagatcaaatttttttggatgagtaccataattactaaacgtaatcttagatggtatcactgctttctttagctctcaatgaaagcaccaaaacatttaccaagttttttagaaaactaattattaaatataaaaggtaaggaaaatataatttagagagaaatatatgaagaagacactcagagttttatgtggtttgggcattaatgagccttagtccacgagtcaatattattaagttttttctagaaaagcttaagggattacagtaagtatgagcactctattctttgcctgagcaagtatgtcaagaaattctaaccctttgtatgaaagattcaatgagtaattatagtgttatagagatcatattagttaccattttcgatctaatggggagtttacaaataatatattgactttggacttatctggaaaggcctgacctatgaagcaccttgtgcatgctgacgtggaggccttatcacgaagttaactgttcatactatatcctatatccatgggtaattaatgacatattaattatctaatttctaattatccagtttttttttagcaatatcttattctctgtcagagattttgggaaagcaattcattattttgtgcgagatagtaactggaaaactatatgagtcttccagatacacactgaggacctcttccagatacacagatatataccctttcagatgttgacttggcttgatagaaccttacctgggcgagttgtatattgatattttcccggaaatcagaatggatcctaaaccttgcccggtttatgttatttgggcccactgttccttactagaaatacggataacaatatactataagaatcctaagttttaatgacgacactattagtgacgcacgaaaatcgtcactgatggtgagggtatcagtgacgacatcaatgagtcgtcactaataaaaacttattatttttttgtaaaattaaacatcaatggagacataccattttgaatgatgataatttcattagtaattattttttatattttgagaaatatcattaacgacaaagtcgtcattgatggactgggcgagaacttttccactaaaaacattattgatgacaaagtcgtcattgatggactgccacattgtaagtgagcaggccatcaatgacgactttatcatcagtgatgctaggacgaaatgaattttaaagccctatccccttcatcattttatcaatttcattttcagtttttctttgtaagaatcaatcccctttaccattttgtccatttcatttcattttttttaattctaatatgccattgcaacctcctttctcgccctgacgctattgcaggtgacccacttcatttcattttagctatttattaaactaatttacctttttatgtctctaataagttgttctatcaattatcaagaaattctaatctaatactccgttgtggtcgaagccccagccgacgacagaccaatagttgaagccgctcgcaaagttcctaaaccactgtctgctttcgtcgaattctgtatcatcgataagtataatttttttcgctctctttctcttctcatatatataattttaatatttttatgtgtatatttatttgtaattttatttatatataaatatatttgatatttatatattttgtatcttatttttcaaacactattaatgcgccaaaattagtatgtttgtgtttttttattatatgttattttttaagaaaataataatatatgttattagtattatatatatataaatatttttttgtatatttttttaaaaaaacaaatttattatagctttgtgtagttttgaaaaaaaaaaatagataatatgtgatttttttccttctaagcagtgttaataagttgtttgaatttttgtgtatatatgtaattttcttgtgtccgtagaaatagtgtgaatttgtaatgtatttagaaatttttggagtgtttagtacaaattttaaaaaatttggataggttaaaatgttgttgttatgatgtcggaattttggtagaatattgagacaattataaaaatattatgttaatttgataatttataaataagttagtaattttataaaaaattattaaaaaaattaattttaaaatggattactattaaataattaaatatttaaaataattgatgcaaaactaagtaatttaactaagaaaatgttttgcatattttcttaaaaaataataaataattaggtaattaatttaatatttaataaataattagattttaatgcaatattttataaataaattatttaatttttaattattattaaaataaataaaagtattataagtttaattatttaaatgtttctttgagatgatgttgacatcatatgggtagcagatatattttggatgatggcgagttcgcatatgccaccatactacttacaggatgtttctcaatagtaaatttcgagagatgctagtgatgatgataacactactacatttctttttagtattttgtttacgttttacgaactctcgtttttatatttatttatattttatgacactcgcttttagtatcttaatttaataatattgttatgtttgactcttaatatttgatatgaaatgttttagtttattatttatgtttgactcttggtatagttattttgtatattaatatttaatacaaaattagttaaaaataaatatttaatataaattaatttttgtaataaagtaattcaatttgtaattattattttttaaaattgatatgtatcagtgatgatttagtcatcattaatatataataaatgacgactaagtcgtgattgatagctagtctaccaatttttttaaaaaaatattagcatattatcaatgatgatattgtcgtcactgatatttatttttagtgacaactttgaatgttgtcctgaatacttttactcacgagttattaccgtcgactttttactgacaacatgtcatcattggtaattatcactcacgaaaaagacacccgtcattgatgaaatttgtcctattgaagcctattttttcttgtagtataataatagtataaaaaatcatttatttgcaaaaaaaaaaaattaatttaataaataatataaaaaattactatctaattattgaatgtcatgtcgacgtaatattagacatcttataaatatgccaaataacaatactctattaataatagtacaaaaaatta

SEQ ID NO: 301053 - DNA, 2878 bp, Cannabis indica
agagagagagagaaagctgacttctttgtaatttggaggagatttgtcggcgactcgattggaccttctgagtggcgcggaagaggactccctagctctgggcttcgcctgctttacctgaatcagaaatgggaaccaagcatttcatatatagaatggagaaacagaaaagagatgagaaagaggaaaaagcagtgaaaagaaaagaaaaaacccactggtgttgatttgggagttggggttttgagagcttgagcaagcttggtgagattgaggtcctccattctttttttgttctcttccagtctttgtttccgactttcctcgtagcccaatttagattccaccattttcgaaacacagaagaagaagaagattgaagcttgagtagtcaacgaaaatggtgaccggtgtctgtgaggaatggaaaagagtagagtgaaagagaagttaaagcgccaaaacttgaaaagtttaaaattaaaaagttttaaagtccttcacttttacaataatatcacttcaagtccccaaccaaccaatgaaatggaatgaccataataaatatttgtaaatacaaaaagcttgtaatataatatgagttatatcgtgttgtgcaaatattttaaagggtaagctctccacggtctgtaaattcacattttcatgtcgtgctttacttaagttggcttgtttttcataaatggatcagcccattttattatatgggttgaactcgaattttatattttcgttatttttcttataattaatgagttaattactaaattacatgtatttttatagtttcaattgtttttatttaattttttaacaatactttacacataagcatataaaagattaattcgaataattaaaatttaaatatttaatagtaaatacatatgtattattaatattgttattattagattataagaacttctaacgtgatgtgtttttagattagtctatccacttatatgtcgtgctttcgagtttgttgtgtggtattgaatttaaatatatctttttgtgtcatgtcatgtcaattttacaatatcgtgttgtgttgtgtcatgtccaaacttatatttttttcatacaaattatgtttgtatcttctaaatttgggtcaattttgtatcgtgttaaaaaacacgacacctatttataactgtagacgatatcacatatgttgtgcgtgtgtataagtgtaattaactagataaaaatgtctacacttaataagttggacaccatagtgagaaaagacattaaattaaattgtgtttattaatattctttgattttatttcttttactaatattttatttttaacttggggtccctagaaatattagatagtggatgtgttgagtgttagggatttagaaaatgctgcccactttacgcagaaaagatgggtggatatgatgggttgggtaagaatagaattataataagataaacagaaattctaaaaagacatctcgtgtctaacatcaaagtatcatattgcattattgctattaatataagagcatgacaacttttagagttcttatattataggtgatacttaattgcgctaatagtaataaaatgttaagtaaattacatttttttttggaaagagaagttacataatttaaaataatgatatgtacctatttaaattgcacatacttattaaacacaataacatgtaataaatattaatcatttatatttttaagtgtgataatattattttaattatatgattgtgataaattacacatcattatgtataaaaagtatgtgtcctaatcattttcctttaatttaaggatttaagggaaaaatctcaaaaggtcaggcaaaaacatagtcacataaatctcacaaggaaataacaaaataaaggttaaaccaaaccgactacaaaactatggccaaaagccaacgtcacaaactaacaaaaatggtaatcaccattattacaatgaaaaagaaaactcaaaagaaacaacaccaaaacgtgcacaaagaaaaaactataaataatcaatacaaaacacaccagcaaacgagaaccacctagtacaagggacagaagaacatgaaggtgcaccatcctcaggaaaaaactcgaaacctcctctttctgattgcaatctccaaacaatgcctagaataagcaaacgccaacatggacccaagttgtacgcaaaccaccaccgaacaccaaacatcaataatcgatgcatcagtagtcacagccacggagccaccatcaacacctccaaatggctaaggcgtggacccaccgacaattaccaaactcaacctcaagaaatccccacagacaccaaaccccacgacgaggaccagaattctcaacgacgaaaggatcatccaaccaagataccaccaccgtcagggaggaaaactcaaaaattgctgacaacatgaaggagttcctgccaagagcccatcggagctggaaaacccttgcccaccagagaacacacctcccaagacctcaatcaccagcaaatagaactccctgggtgccgacgataacgttctcgcttcaagcctctattgggcccttacacccatgaaatgatggcttttatatacgagtatgtcactctgtctgcttcctggaatgacgactgaccttacaaaccaacacgagtgtttctagtgtgctttgtcctcactcgcacgcttcttgggaaaacttctcaggagatcacctatcctgaaattaccctaggtcaaacacgcttaactatagagttctttcgtgatgagctatctgaaaacatgatgcactttgttgatataaatagtaccaatcatccatttaagcctttttcaact

SEQ ID NO: 301054 - DNA, 1244 bp, Cannabis indica
tttagttttttttttttatttaacataaagtcgagtgtaaaacgaagaaaataaattggaacgagtatacggataaataattttacaccccaaaataattactctgatcgattagtaaatatagcagtaagaatcgtaaataggataacggtggatcacgacagataaagcgaacaattgactgattgcatttattttttcatttaattaaaacattataaaattaatcaaataaaaataaaatatatctcttgttttattaaataattttttagtaaaataaagtgacaccacatcaaacgccaattattggcacagttggtcggacaccagcgcgcatgtgttggtaggatgtgtcaatcttcgctcatgtgcagtgataatttgactaagtcacatactatgtcgcttttctttaagatgttttgcagttctgctcaaagtgtacacgacagtctatcaaccatgatgttccaaaaaataaaatagccaccatatacaaattattatgcaccaaacgatatccatatattacactccaaaataattactctaagagattttttttcatatagaagatatatcttcttatgttgttcgtatacgacttactaagagaagtcaaatcaaaaaataaaacgctagaaattgaaatgagatcgtggagtaacattaggttataacaaataaaaacagataactgactgattgcatttattgattcttttgattaaaacattaaaaaatacaaaaaaataaatctatattttattaaataatttaaaaataaagtgacataaaatcaaatggcaactcaactcagcacggtcggctgggcaccagcacagcacgagtgcgttggtccagtgtcagtcctcacccatgcacactataaaaagttttatataaattttatttctatataatcaaaataatttcttaatgaaaaaattagtttcttgatgaaaaatctttggtgagtttcgctctgaccgatcgtccccggattggtaagaaacttaaaagctcttgtataaattttacttttatataatcaaaaccagtttcatgatgaaaaaataagtttcttgataaggggtctttattgagttccattatgaccgatcgtgctgaatgagtggattgccaattattgtttgctggatgtagagttggtgaatgaaggttgataggtggagttgttgaggggtgatggaggtggagtttgagagaggagaagaaat

SEQ ID NO: 301055 - DNA, 2064 bp, Cannabis indica
catttttcaacttaccccaagaatttacatttaatatggctttttggaagtgttttatttaaatatggcagttttgaatttggctatttttcatgatatttttaatttttaaactattttatagtttatgatatgttgggtaaattgaagaatacctcttttatttatcaattaactaaatctgcctctaatttatatttaattaaaacattcttttttttttttgtaaacaaaacgagagttacagaccaacactactaggcaaatctgcttttaaaaaagcagcatcacaaaccggcatcgccgaagtccaaacccccgaggtatgaacaaccgagcccaactggctaaacaattagccactttaatacaatgtctagggtagaacaaaaaggaaacatgattggaatttttcttagccttaatgcaatcatccaccaggagaccccaatccgtattgaagtgtttatccccatttagagcatgaatcacagattggcagtccgatgagatgcagatattagagagagaccattggtcagcaagcttcaatcccatgcgaatagctagagactccgccacaatcaccgaaagacaacctggaatgaaattagtttcagccaccactgctactcccaaatggtctcgaataatcacccctaaaccacaccctgcctgtcccacaatcagcgaagaatctgtattaatcatgaaagttcccggggggaggagaccagcaaacaggggccttcttcagagaaggttgaggaggattagaatcggtttttagctagtaatcaagcaagttcgtggcccactcaatccacactttactatctatgttcttctgttgaaagacacacttgtttctacgatgccagattaaccaagtaacaccaagaaaaaggataaaagtctcctttgaacaacgatccttcataataaagaggaaatcaggggctttaccgatgttagacgggaaaagatgaagaaatctgaagtgcttccatatcgattgaatcttaggacaataccaaagagcatggcaaatatcttcaacaaaaacattacaatggtcacaaaaatgatttaaagccatacctctcttgtttagctcggttttgacaggtatccagtggtggaaaaagccgccaaataaaattcttcattttaggagttaacttagaactccaaatgaaattccaccacttcctaagaatagatttatctaaacattcaaccatctgaggatcacagaactgaagcttgtaaccactagccacagtatattgcccattcggagtaaagctccagccaataacatcttctcgctcctgatttgggtttattcccaacacccaagggaggtcatcttggtggaaccagccagaaacttcatcactcttccaagacccttcttggtttagtagagtatgaatagtaaccccctcggggacactaacttttgatcgaagagtaaaggggacccctctaggaagccacgagtcttcatttattcttatggtaagcccatttccaacatgccaccggtaaccctttagtaaaagctctcgaccccacacaataccacaccaaatatgagagccaaaatgtcccactttagcctcaagaaagttattatttcggaaataaagggctttcagcactcttgccaagagacaatcgggattggtcaaaattttccaaccttgcttcgccaaaagagcctgattaaagccttctaattctcgaaagcccatgcctccttgttctttaagcttgcacattttctcccaactaccccaatgtattttatgtttctttgaagtagcgccccaccaaaaacaagcaatcatgctttcaatctcatgaaggatacccttagaaatccggaaacaactcattacataacaaggcaaagcttgaactatcgcctttatcaaaatctctttgcccgcttgagaaaatagccccaccttccaaccttgaagcttagcttccactcgatcacgaatcttaccaaagacttctttcttatttttccccacaaaacgtaggcatgcc

SEQ ID NO: 301056 - DNA, 2235 bp, Cannabis indica
aaaaaaaaaaaaaaaaagaaagagaaatagtgtaattatactatatatattttagtttttttttttaaaaaaaaaattatgcctttaataaaatcaatcgaataatttttgtttttgttttttaatttttattttcttttacgatatgtatgcttaagccttttcatttacagtaattataaaaaaaaaacccattaccttcacaattttatttaataattttatctttactacatgtttccattaaggtaaatggttatatgggtggcgaggagtatggcatgacgctaaccttaaggataacttctatatattatgagttcttggttacaatcagattaacatgttaccctcctataggtgtaaataacgggtcgggtttttggacatgacacgagtttgagagataagagtattgttcatcacgaaaaaatatttgtttgggcacgtcacaatacgattttaaaaattggcataatacgatattagaaaaaaataagcttaaatacgacacggtatgataagtccgaaagtacgacacataagtacgagtaaattaatataaaagcataatacgctaaaaattcttataatttaaaaataataataatacattatgtatttattaataaatattcaaattctaattaatttttttatataattatgtgtaaattattgttgaaaaattatataaaataattgaaactgtacaaaatacatataatttagtaattaacttattaattgaaaaaagtagtgaaaaatagaacatatattcgagcccgtataagaaaacggtttgactcatttatgaaaaatgggccgacatgagtaaggcatgacatgagttcgagcacgccacgaaaatatgagtttacaaggcgtgttgggcttaccctttaaaatattggtacgacacgacacgacacgacacgacctatatcttttataagccgacacaatacaacctcatattattgcagacttttcaaaatatgagccgattctgcacgcatgattgtaatatataaacgcttaaataaaaaaaaaatatatatatttaattgttattttggttcggtttgtttttggtgttgttttgactggttttagtatatttttaaggcaattttgtatgtatttatagttaatcttgatacaattttttataggattagatttggggatgacactattataaaaagagcttcaccaaaataagttcactttaatatttttgctttgtttaattttttaagaaactaattgagtatacttggtgaattatattacagagtgtaaaacaacgtcacatgtaatggtgacacttttaccaatagagacttggaccttctgagatatttttacttgagttggttttataacaagttttgttctatatttattgttaagatttgaaataacacattttcaataaaacgcttcatgaagataagtaacttttcataataattttagttctttcatttatattttcttaagaaattattttcaatatatatataatggttatgataagttatagttattacattataatagaaatttttatatttttattatttatttaatttgatattgatatagttttctttttgtagatatgttagtgggataagaacacatttaaaaatttcttttctaatataaaatttttattatctaatttttcggaacatctatataaatcgttaatgttgtagtttaacatgcctttaaaataaacaattaccctttttaaataaaagaaatatcttcatttttgtttaatatttttttttctaacttaaaacggttacctttaaaaaaaaaactgactatttgttattcaatgtcgtcttcaatgttccaagtgattgtgtataataaagataccaagtaccaaaaaaacacaaagataatatgattatttttacaaaaaataaaataaatgtaattttttttagagttttttgcgacaaaatcttcctaactatcgtttcacttgcatttaaccttctaaactcaaattttaacggtaaaactctcaaaattactgaactagtagcaaatttaaggtgtcattcagttagctgtcactataggctgtttatgtatacactcttatacacatgacacgtttatattggtatacctaatattatttaaaaattaaataaaattataaaaaaataaaaataaaacattttaaaaataaaaaatactataaat

SEQ ID NO: 301057 - DNA, 2814 bp, Cannabis indica
aacagtacaaaagttgtatgaacctgaaagcaagcagaatgcatataatggccacaaggtagagctctaactgctgcacttgatgtgaaaagaaaatcacaacagatggggcagtttgtttccaaacttttctcaaggcatttgtgattcactaacttaatgccaaggcaacagttgcatgtcatgcaatgaaaataatcgatgccaagacccttcccgacgcggcatagattgcaatatgggcaatgatagacagtcctgaagcaaacaaaaaagaacaaacaacttactgagtgcaaaattgtaaggctgtagagaagaagtaaaccataccatgcatcttagctctgttttctactagagctataattacaaagtaaaagaggttcgatgtgctaagtcacaataaatttaattttcctgtattacataaataatagtgtcactccctgtttgtcttattcatatatattttcaagcctacatttatattaattttgaggcatggaaacaagttatttcgttggatgaggaataagagacctgtgcgcatacttgttggaaagtttaggcaacaaaatttaaacacaaaggaagtgtgcaacatgaaatttgatggacacacaagaacagcattatgcagtaccacaaattgaagctgaaattatgattctatacagacatattgtccaaacaaacacaacaaacagcacatacctattaaaaacaaaagaaataaaaaaaacggtgactaaaagtaaggttttcttgtatcttcatcacccgattacatcttcgactaaaagtaaggttttcttatatcttcatcacacgattacatctgtgactaaaagtaaggttttcttatatcttcattaaacgattacatctctgctcagctctagtgaaaaaataataataataatctatttaaaacataaccttagaatttccagtggagtttttttatttattttattttattttttgtatggcagcaaaactctacctaatctccttcctccgaccttacttcaaactctttaccttacctgctttttccaatacttgattaggcatgaaatatactaaacttagggcgagattttcaccaattaaattttgacttcttgtaaagagtggcaatacaattcacaaaatgcaagcatcccacataagaacataaaatgtcgtattcaagttatcatatctataagacttcttatcatccttttttcaaacattaaattgatcctcagtaggtcctactctttaacctttaagataaccaatgtagtttcaagccaagtagggtagtttcacaggccacaaatataattttttgagtcaagtaaaacaagttgtcacaacttgcaagatggtaataagtaatttatatatatacaattatatatacacatagtattatatgtacacatagtattagaattagctgaacaactaattctaattattgataactcccaaataaaagtagactcccctacctttcatcatcaaaaaatttgcaaatggtacagtaatattttgccatggagagcccattgcaagagggtgttgtacatgtaggtccaaccggttgaatcttcaggcagcccatgcacatcatttctgtcgtcaatttcctaaattgtttgagaaaaaaaaaaagtcagaatataatggctcacataaaatgaaagcacttgtactaaaaattacctatccatagagtgatcgctcacgttgtcatggcaaaatctacaagtgaataacttgccacagcaagcagaacgaagcttgcagtttcttttgtagtgctcacacccaaactcttttttctctggatctcctcgaaatgagggtgagcgtccagcaacatcttcacaacttgaagtttctcctgctacggttttgggtaacttctgctgagctgctatccagcggctaaacaaaagcagtaagtattggtttaggagttgtgacttgcagatgaaaccattgtcatatcaaagcttgaaaaatctaccctgtatactaacctagtcataagattctgtacaagatacgcttttctccttggatcaagagtcaaatcacgataaaccttcctaatctctgcctcgagctcattttgattcattcggaaaatatctttccaaccaggcttgaacatttgatcactctggtccaagctttcctgatattccaaacctagcgagaaaagagtgaatttggaataagctcaaaattgtttcaaatatcatatccacaaacaaattacaaaaatctttaccacatgaagaagaataataataaattatcaaatcatagtatgcttgcattttgtatgggaattgcagtacaatacaaagggtactgtagaaataatagatagcacatgttttattgtaaatacctaaagtgggttgtacagctacgtttaggtagtaaaatttttttttgatcaagaaggaacaacttcattaatcaacaagcaattacaaacaatgcccagctgaggaggaaaaaaccagctacaaactcaactattttttacaaaataaatgctctatgaagttcctcttatgtctattcaggctccctctctaagctattgttaatctataaaacatgatttttttaatatcctgtacaatgcttgtgattgtgctcgagtaaccattgaaaacacaattatttctgtttaaccacagcctgtaaatcgtggctgccatgacagcagtaaaaattctggaattcttgcttttgctgctgatcaccaaccagtttttccaagcctgaaactccttc

SEQ ID NO: 301058 - DNA, 1049 bp, Cannabis indica
acaataaatctaatttttaacaaaacaaaaaaaaaatgaagaacattaaattagtgaagaatgaactagtttatattctatatagcccaatatttaatatggaatgtggcccctaccattatatcattaaattcatcttaatcaattaattagtagaagcataagcatggaaggcatccccagtgagtctacaaaacctataatcatgctgaatctgagctcccatttcctcatagaacttaatcgcattcacattccaatcaagcaccacccactccactcttccacaacccatctccacagccttcttcaccaccgcaatcaacaacattttccccaatccattcctcctgtaacgctctctcacgaacaaattctctacataaaacccaggtttccccagaaacggcgagtagttcggacagaacagagcaaatccaacgatcacaacattatcattatcgccgctgtttgtcgatttgaaggtctcgatttctgggtcttcggcgatcgggtggtttagattggcggtctggaatttgggctgatagagaggaggagaattgtttattaattcctcctcttcttcgatgatgaagggctgtgatgagacctcgaggatgaagatggtgacggactgaaatggtggtgatttgaagagaacggaggagagagaggcttctgtggcggtgaagaggtgagttaggcgttcgaatatggccatttggtgaatcagtttgtggatttggggaacgtcggcgggttgggctaagcggatacgggtgaagactgggaaagccattggggtcgagttatgtggagctgttgaggccggcgccggagaaggtggtggtggtgcggcggcggcggttagtagcgactgtagagtagagagtaatgagtagtttggttggagggaatgttgttgttgtgtaacagaatttataggcggtggttttccaggtactaatgactaaataggaagaaatacgagggttttagagcaaagcaactggtttttttttttttgagagagcaaagcaactagg

SEQ ID NO: 301059 - DNA, 2237 bp, Cannabis indica
gttttctattatgaagggctttgttgaggatcagttcggcttaggtcttattgctagagcagttgaggaaggaatatctgtcatcaaacccatggggataatgatcttcaacatgggaggccgtccaggacaaggtgtttgcaaacgcttgtttgaacgccgtggtttcaatgttactaaactttggcagacaaaaattctccaggtaagttaactttattgttagtcagagatcatttgtacccttcaatgtttactctactgaaatgtgtttttacaggcttcagatactgatatttcagctctagttgaaattgaaaagaatagccctcaccggtttgagttcttcatggggctctctgctgaccagcctatttgtgctcgaacagcatgggcatatggaaaggcaggtggcagaatttctcatgctctatcagtatatagctgtcaacttcgccagccaactcaggtgtgtacatgattgatttccatttttcaaagccttgtattctgcatttgaaacggaaggataatagtcttactaaatttataggtgaagaaagtttttgaatttcttaaaagtggtttccaagaggtcagcagttctttagatttatcctttcaagatgatgctgttgctgatgagaagattcccttcctagcttatctagctggcattctgaatgataattccttttgcacatatgaaccaccagctggaagcaaacgattccgtaacctcattgctggtttcatgaaaacatatcatagaattccactcactgccgacgtaagaaaactttttctctccatttcttctagtttctgctctgattaagtctgtttatcatgtcttatagatttgaccttgcttcattcagtatatatttgttaaccatggtgattatacaaatgaagtatactaaaataaacataaaatatcttttaaggatgaagttgtgtggcaatgtgggcatattggtttttggtttcataaaataccctgcatttctgactttctgtttcccattcttgtggcaagaatgttgttgtctttccctcaagggctgttgctattgagaatgctctacggttgttttcacctcgactcgcaattgttgatgaacatctgacacgacaccttcctcggcagtggttaacctctttaggtctcggggtacgtattgtgttagctgttcatatgggctttcgcttcctttagttcttttgtattgatgaaaatattctttattaattctttgaagaatctgaccttacatgattttggtttatgtgtgtaacttttaatcaatgtgatcaaaattactttagaatgttgaatttgtgagttttctatatttgtaaatttgtcattgcttcctgaagtttcatagtgtcccagagttacttcaaaacttttaagtggcggagctaatgtttttgtacgattccatatcaatttagctttcagttttcattttatttcaaattcgtaaagttggatctgagtttaggaggccctttcaatgcaattataagttcagaaaaggtgaattgggggatggacaaggtctttggttttatttgctgcgtgatggtaattctatgaatctatttattgtagggtaatgggagcactagtcctgtggaggacaagcttacagtcattgaagccccccgccagtcagagctaatgatagagctgataagaaagctaaagccacaggtggttgtaactgggattgctcaatttgaggctgttactagtgcagcctttgtgcatcttttagatataacaagagaaattggatctcgtctattcttagacatatctgatcactttgagctatccagtcttccaagctccaatggagtcctaaaatatattgcagaaactcctctaccgtcacatgcagcaataatatgtggcttattaaaaaaccaggtacttgtttattttaattctataaatcacttaacttactctggctatctctatagcttctaccttatcttagtcaatcaggatcctgctagtgctgaaacattttctcattaatggtgataaaaatgctcttttcaggtgtattcagatttagaagtagcctttgtgatttcagaaagatgaggccatatttaaaggccttgtccaaaactgtggaactgctagagggaatacagcactgatagtcaagcattatggttgtcttttccatgagctttttagctttttcagc

SEQ ID NO: 301060 - DNA, 4976 bp, Cannabis indica
aataaatgatatcaaagtctgaatcgtcacctcaggctggaattagaaaccctgaatcaatccacaaaaacaatgactcctcaccctcaggctgaatcgtcacaattttttctcttgcaatcaatactaaccgcatacttagacaaaaaattcatctctagaatgatatcaaagtctactaagtctagttgtacaatatcagtgctcaacttcctattatccactatgatcgacatacacctaacctacctcttggagatggctaactctctactagttaatagggttcaaaaccctaagtcaaaattatctcataaaagactttagtaaaatttcacgacctctatgccatttacttgagaaagataatgcatttgtttttaaccacaatttttatattgcttttgagaaataaaaaactatgttaactattgcaccctatttaactaaagttgcaacaatcttaactccgaaaaagattcacaattcaacctaaaatttggtgcatttcaccataaaacaccattgtgaaatttgagacatcaatttcatgtaatgatatgctcacaaacttaattgagttcaaatttaacacctatattcggttttcattttgtaatctgtacataggaattaaaaaattgataatcagcaagttgcattatttgattttcgcaaggaaataataataaaaaaaaaaagataataaccaatgcggaagcaacattgggacactacgagcaaaaatcattacccatttgcggcttttcagacaataaaggttcctgaagcatctcatgaagccaatttcatggtggactaattcgaaactaatatattatctcactgtgatgattcatttgcaagtaccacctaacttagtagccatattacagtataacaaagtgacaaaaaaaaaaaagatagctccctcgcagcaaactaataaattttaacatggaagaagggtccacccgcattctttcctgttccagaattcaaaaattaaaccataatctaattccattaattttctggcttcttttgggggcccaattggagaaagaaaaaagtacattggggcccccttgcatcaagacaactttcaacacacaaaggttggtgtcgatatggcctacagaagcgtggagagacgtaacgcatccctggctcatgtcatggttggaaacactagtgatcttcttggtagtccgggttttctttcaagatgacaaacccttcaaggatgggagatagaggaatgtacctgcataaatacaaagcatttgtcataaggggtgtggatgaagaacagcaaaagaactatgcagcaaattttagagagattatctcagtacttttcggtagccaactctgctctgtcaccagcagccagaagaactggtgtagagtgggtctggaaaccagttatcgttttaggacgaccagcctgtccaacaacatcaacagcttggcccactcgaacaggtacagacaatggtttcagatcctcatccacagtcatcaacattctcggctatcacaattaaaaaagaaaattaccacaagaagaaattaaattgcctaaaatagagaactttctagtgattagacagacaacaacctgcattgctagaacaaggaagtaaagaacataatggtatttccccaagatgatagctttcatatcaagacatgcatgtagcatggttatgattccagcaagcgcagtcctgcaccaataaatagaaatttataaagaggtgctggtggtagaacttgaaaaaaataccttcttttactcgaagcaagatcaagaagaaaaataaaatatgattaaattatttagaagatgatgcattattataacacttgcacagctacccagttacttacggtgatagcagaaaacgatcagaatggaatggattcagggtcaataaacccttccccagatgcactagaccttgagcaatacgcacctgaaacaatggccaaatgatataaatgaacacggcaacaatcacaggtatacaagcaaaaggtcaaagacaattcataagatgccttacacagaacagaaggctagcatctttgtagtaatagctcgacagattgcgaagcatgccggctattctggcattgtttgtccctgaacctatcaaacctagagagatcactgctgcctgaagcataaaccagaagaataaattagccctgaagtttagcagaattgtttaacatatatgcagcattatctcaccattgctacttctgaatctgtatcatggctaagtctgcttaatgtgtccataacattgacctggtcaaaacacacaagaagatattggcaatacatcacaagagatattaatgggcatctaactaggaatcctaatataaaaacaaaagaattttataagactcttgtaaccaggagactatctcaaataaaattggtctaaaaaagctaagacttctgaataaactatgaacattaatcaactaaaatctaataaagtaggatttgcatcctacaataaaaagaaaatgaataaatcaaatcatttcaagacaaggatgctgagtttgtttgacttaatcagattagctttgggttcgaaatgcaaagtaaaatccaaaaaagagttctgaataaactaagaaccctaatcataaaaatacaataaagtatgatttacatcttacacataaaatggacacattaatatttaccaatgacagacaacctcataaagcagaggattaagtttatttcacctaaccagattacctttgggtttgatatgcaaaggaggccaagtgccaaaggaaccgctcggcggatattttgttctccatactgtaagagatgctctaaagagcgaactgccatttcaagacccaattcctctgccattgataccatagcgattccaagtacagcaggtccctggtgcgtttcacttttgtcaagatgttcggaacattgactcagaaggtgttgaacctgtgcatgacacaaaagtcagctgattcatatatgaaagagagattttagaaggcatctcaacaataacattgaaaatattagaaaatattaccttcaaaacattccctgttcctgcataagcacaagaaagcagaaccatatcacaatattttctgattttctcgtggaatgtctttgaaacttcagcagtagcctccacactatcctgcagaggcacacaaaaagagattccaaaaaaaaaaaaaatcagaaatatgtatcctgaaaaaataaaagattctatgcaaagagaattatttgtaggctcagatatgaatcctgaaatctatatatcacatattaattacagattgagcagggaaaaacacatattttcaaaggaaaacaatcataatacatttgcctcgaagtctaagaaattaacctgctttccaagatatagaagaccaagactcaaaggcaataaccgagtaagaggctccccaaactctgattcacttcggtccatcaatgcaaatatgattgtctgagcaacctcttcattgcatgaaccaacgtatatcaagcccaatgagattgcagtgaatgcaatcacatcaagtggagcttttgcatcgttaagtatggtagtcaacttgtatcgtagctgacaaaatagagataagttagcttcaatgtcaagacaattatgctgcataagtgtttgtttataaggaaccagaagtgaccatggttgtacaggcgggttgatgctatatttttgaaaatcaagctcagactaaacatttgaacaaaaaaaaagaaagcaagggcatgtttgttatgaagaaaacagttgctgtcgctgatcagatttatactgccaaaatgtaagaaacctcacctgctcattctgagtgccagcataggtaattcctaagcccataattgcaccaattcgaatagaaggatcctccttatctacatagtcacttagaagtgccaatgcctgagaaaacaaacaagatttagaaatactatcagaggctacaggcttcccagaagttcttaacattcaggcaacttacaggatcacaatcatttttgatgccacaattaacaatcccaactcctagcaaggcaccagcgatcacatggttatcattgctgtggaagtacttgtcaatttgtgcaagtcctgaatccacatcccataatagaatcataccctacaagtaaacagaatataagctgtcaatataagtacacagctagtaaattacttaaaaaggaaaatggaagcgcaccaaacttgctgcagcgcttgtctttccatgttctttattcttaaaaagccagtttcctgaagaaccgccacttgaggaatctgatgggactgtcatcaatttatcctggagtacaaatatgactatcatttaactaaacattcaaacataactttggaagtacattaaccaaaaacaacttacctgaccaaagccggcatttacaaaagcattaacaaatgttgcagccaaattctgtctagctgaatcgacactagcaccagcacttgcccggccatcaagtaagtgtgcctaaaaacacccaagtaaattatgatacatcaaattcacgtttaaatcactcatcaactaacttcaggaatagtgatacagcaaaagtattttttttcacattatgagggctttaacccacccttcatacacccaaccacttcagccagtcttgagtggctcacacaacatatgtatggatgttaaaactgttacatagcagctaaagtgacgataatgaaattacattttaggacatgcctagtaggtcagtatgtaatcccaggagatatccacacattccttaaggctatgtttggaagttggattttggtggaaataaaaagtagggaaaaatatgtggagaacaaaaaaataaatccaatttttcaagtttgatatggaaa

SEQ ID NO: 301061 - DNA, 727 bp, Cannabis indica
ttttttttttttttgatttattataacggcgccttagagcaagttatgggtatactaaacatgtatctaaagtttttatcaattcctactcaaaagtgtaaacaagttaggtcatttaataaaaatggggaaaaaatgttttaagagttaagatttgcttaatttgagaaatctctaaaaaaattgagtcttctaaagtagaaataagataagtgtcggcaacccatatcatatatataaaaatacacaaaaggaataatatgtttacttggctcaagaaatgaatatgaatacaaccttagttcaaggcaataattttaagaattagtagttaccataatttatgccacaaattatactcacatcacatatacatctatttttgacaatattgagaaaatcccactttttctttttggattaattttaggcatgaaatagggtagtcgtggtatctactttacattacgtagaaatccaatcacaaatgtttatacataaataagtgtatagtcactctcttttgataatttttgtatgtgtttcagcattttagagaattttttagtttaattttttaaaaaatattatattatatactcattttactttattttcataatgttatttttgattaatggatataaaaaagatgaatctatcaacttattccaaatctttttcatgaccacatacatgtaattatttaggactatttgtaaatttt

SEQ ID NO: 301062 - DNA, 1860 bp, Cannabis indica
gagtgatctaaatcacactataaaaatcgttgacgcagaaaaatattagagtcattttaattttactttatttagttttttgtgatgtaatcatcattacatagtttttctaatgtaatgtgattctattggaaaacaaaacaaatattgtaatgaataatttaattccattgagattcttattacaacaaaccaagtatgctataatagcatgtagagcatctccaatgggccttaactaatttatgagaaaaatagaaaagtagcccaagtagagtatctccaatgggccttaactaatttatgtactaattatgagagaagttgaagaatgctttctttttatacaattttaaaatttatcactaaataaaatttaatttaaatatacattttttatgagtattgtacttaaattatcctcattctcacataacttagacataatttcagatataatttgtgttttttagagatggatgtgtaggtttatggaaaagtttgagcaaaattataattaaagaagaatggagattgtgatagggtaaaattagtaaaattattaaaaaaagaagtaaacataatagattttgaaaaatagagtaaaaattaaagacatcaatttaaaaaaagatatgtctaactttttcactaattatctcaggatcggccttgaacgagagtagacggtgtctgcgcttaggcaaggccggctctaggcataagcggtagagctcattcattttaggagataaattaaaaatattttttatctttaaaaatactatttatctttatagtaaaaatctaaaaaaatatttatttatggcctattttaactcaaaactggtaatgcccttaggatacaacctgaaaacaaaaataatatttttgagattaccataattgtttttgaacaaagcttaaatttgttttaggccttaattaaattaatgcattattttggtcaaaatatcccacctttctgacaagcagtgacttttacatttactcttgaagattggacccaaatttttgtcttaatatcataatgatttagttggtgtttttcaagttttgaacttggattctctgcttcaagtactcaaaatcaggccctattccaggacaaaaataattaattaaagaaaaccaatcactggtgactttttgaccactactaattaattactaataaccctttctcagttaccattcactggtgactttttgtgtatccattttctattgttggatgatacaatttctgaattttttagctcaatagttgaccaaacttttgtttgaatagtctttggaatgatcactttgtcagagctatatatacatatatatatatatatatatatcacagaacatttagctcaaacagttcacccaacttatatattacactttgaaattaattgatggtaaataggccatccaacaaaatgatccacttttgcatataaattattttcattcaagaaatcatggagtgtcaagcacttaatttcttcttcatacttgtttaattaacagtaacaccaacaccacttgctatgaatatttatttctgttgtagttgactacactaaagattgtttcattgttaaatttttagggcgattttgcgaagttagaattaaagtggtgtttggttggagggtaatgaaatagaatgaaatggaaagaaaataatttttattatatttagttgtttggttacatttaaactattagaatatcattttgatagaatgacttttacatcattttggtggaatgactattccattttaaaatagaaggaaagatcattctaatacaagatttggaaaaatttaataatttttt

SEQ ID NO: 301063 - DNA, 4121 bp, Cannabis indica
atacttgcaggtaaatgatggagttattttattattgtgttgatttttaatgagaatttttaaaatatattttacaaaatttgattattttatatatattagatttttttaataaaacaaaataatattgtcattattaatttatatttttgtgtgttgttatataaattctattgtgctagtttagttttagaaaattaaatttagatatgatgatgtttataaattgcaagccaaataaaaataatttatataattgcagagagatgatggatctatttatgattgtgttgatttctataagcaaccagcattcgatcatcctctattgaaggatcataattatcaccatacggtttgttgtaattttattttataaatatgttaatacatcattttaatttatcaattaatacatacaaaataaatattattcttgataatataaattatgttattggtgcagatgaagccttcttctcgtcctacaaaattaaataaaaatatcaacgaaaatgaaaataaaacaaatatcgaatatgaaatggtagaaataaagggtttaggatgtccaactggaacagttcccattaaaagaactacaaaagaagatctcattcgatctaaattgttcacaaaagcattttcttcaggagtaattactcctcaaacagttgagaagcaaggtcttcatgtaagtttttgatacattttcttctatacagctcttatgtttatttgttatgatttatatataataaattaaatgtgaattactaaaagtatatgattatttttttagcacgctgtgcttcaaacaaagcctggagggaaatacaatggaggtggtgttattatgagtttacatggtttagctactacaataaaacctcattatagtgtatctcatatgacaatcaagaatggacctgatactatacaagttggatggatggtgagttaattaatatttgaaattattatgacatacacatctaagtatgtcctaatagtttttgtctaattttatttcactataagactttaaatggggttcatcaatgcttataaatttaatattattcttaattcctttttttttcttgctttatctttttaggtaaatcctggtttatacggtgatagtcacactcacgcctttatattttcacaagtaagccttttctatctatatcaattataaagtttatttgaaaaagaaacattaataattatactattattaatttatattcaggctggtggaagatcttgtttctacacacattgtcctggtttcgtaatcgttaatactgagataccattagaccaagtttacaaactactttcgaaacgtggtgaagcagtatatgttacacaattttttatttatcgagtaagttatataaatatatactagtacgatatatcaaataatctttaaaatttatttattagttcttactttaaaggttgaacttattactcttattttatgattttatctttctattaggacgcaataaatggaaattggtggcttgaatatggaaaagacgggactcaaattggtttctggcccggacgcatatttagtagtcttaacacagggagtaaccatgtggaatggggcggagaggcttacactccaccaggacaaaaacctactcgaatgggcaatggttttcgtccgaggggagattcaagaaaggacgcatttatggaccaaattacaatcattgacgaatctcataaacaagtcattgctgcaaatacccaaaaatttattgataatgtacatttatataatgttatggattggggacttaaaggcagttatggtcatgtcttctcttatggaggcccttttatatcatctttttaatttatatttttaatttctaataaataataataacaataataatgtattattttgtgttcatgtaatatataaaagacaatattaattttaataaagagttcaaaaatattgtacaattattatttttatagtgttatacataaaaaataattgttatgttggcaaatatttgcatagctaaccagttttgtacgaaagacataataataaacaaaataattgcaacattaatttattaacatgaagtaaataaaacaaaacgccttaaatctagtagttatatggcccccaacgtaggtatactaccaactaactatttacggttaccctaatttgcacatgatagatctaataagaaaattcttatcacataatcacgtaaacaagaaaaaataactaaatcttacgtacatacttggaattaacatatttaaacaaatagttataaaattatatacgttgtgatcaacaataaatagtaatattagtatctaaattaaatcacataaaaggttatgcccaagtctaattttgataaataaaccctaactattagactacatgacggaggttgggttcagtaaaattgtacccactactatgactccttacctaccatatagacctaataaacaagtatttaactattgtcttatcagtcaaaaaagttcgacaaggctccattgtcaatcatagtttgagctattgtcatgttagttattcgtacttctacaaccatggagtcattgtgtagataatgaacatgagcagcgtcatcatcgtttaatgatacaatagtatcacttctccgtgacgatttgtgatttctctcctccacgaccaatattttttcgttttgctcatattggaggggtccatgcatacctttcttgggctttgctcgaattttcagcaatgtgtgggcctccaatcataacatgtaggtgctcatccactggtggtggcattaggaagttttggtcattatcttgttggggagccctttgattctgatcggactttacatactgattcaagtgtggattgtttcttcgaataagaaactcaatctcctccttcaatttattacattgatttgtttcatgatcgaaatctttgtaaaaatgattaaacttgggtaatgtacctcttactgatatctttcttgatcagagggggtctcttgtaaagtactgacgactgggttgccatgaagacattttccctagtgtcagtgagaatagtgaaagaagtgaaacaaagatctttcatgctggggttttgttgatcagtgatgttgaatttccccttctttctattcctcaaattattcttgttattggacatttttcactattattattggggttattgttgttacttccttatggctggaaggtttaattgttcggggaggatgtaaatgctccaaatgcagataagattttgattgagtcgacattgttttgggtgacattgtctaccctcttaactgcttctttgagctttataaattcgtcaacccgatctaataattctcctattgaccccacagtgaaccttttgatgtccttccaaagctcacccttgggctcgatccctcctaagactgcaactagccgtccttcttcagttagtccattgaccttagtggcctctgttatgaaccaatgtatgtccttcaacgtttctccttataattgtttgacctcgaccaggtctttgaggtgtgcaaagagctatttggaggaggaaaattggatgtagaactcaaatgtaaaggcattctaggaatcaaactttccaggtgttagcttgaagtaccattcttgagcggctactgtcaatattactgttgtgatattttgcacacgcaagtgcacgtatcgtgacaagtagtaaactcaccaagagtgaggtcgatcccacgaggaatgtagttaagcatgttaaaattaaacttttatttctaggggtgtgcagaaagtcatccaatccaattccaaccgaccgatccaatcccaaccgatccaatagaatcggatatccaatcataattggatcggatcggatgcaaattttaaaaatccaattggatcggatcggatattggatgagacatccgatccaatggataaccgatccaatccaatccaatatcatccaatgtccatccaatcatatttaatatttataattttatatatttaataattttatttaatattttatatat

SEQ ID NO: 301064 - DNA, 3658 bp, Cannabis indica
aattttcacccttagatcatccttaaggccaagatcaatccaaagtgaattttccatattttttgtattatcttattaatattttaatagggcttcattccttataaagggaaaatttctctagcacactttttacattttactaagttctcacaatgttggagcatctctagaaatttgagttattttcttaattaattcttttataattctttagacgtaactccattaccattataatataaaagtgaataactaaaaattttgtctctttatattattcagttaaatttttatccatctccaatctaactagtatttttattagaatgaagttatttgtttatttatttatataaaaacattatttaaatatggtattatttggggattaattttttttaaaaaaaaaacaaatataatcatagaaccgaaacgtggttgaagttctgctctttatccagaagtacctaacctacctgaagaagaagaagaagaagaagaaagccatgtcccgtaaaggaggctctgctacctcgttgcagaaggacgtaccatggagaaacacttctgtcaaacccctccccagaatcaaccattctcctattctccgcgtcgctaatactcctacttccaattatgccctcttcgtcatgaaggttcctaccttctcctctcttttctgcttcacttttcttttctcaaatgaaagaatgaaataatagatgttattggttatcgtttcatgggttttgtttgctgatacggattttttttactggacaggagtcgaatccagttgggaacggcttagcttcagaagctattgtagaatcagctggccctgattgcatcgtcccagggcagattacgcccatcaaattacttggtctcaaggttatttattttctttcacttctttgctttcaatgaatataattgtatttgatgcatttggggtttttcaaagttttttaatttagtatatttttggccaatgtgtatgtaggagcatttttattatgttgaattgagttgtttagtatatttttgctacctgtgaaatttgcaatttaaccactgtaaatttaaagtcgttttagggtggcttaatgtgatttttggattgctggaatatataacttttgataatttattttgctaatatttttttctcatattctacttgtaatgtggaaagaaccttgtgcctgtagctgggtaatttggtaaactaacaatatgaatgtttgaaattaataaactaattccagtgtaaatttagggtcgcttcaggatcgttttaggctgcttagtgtaattttggtataccatgttattttacaataatgctttttgaaaagttgtatgttaatgaatattttcattaaagtctacaaaagactcaactaagtttgtgctatgcttgttttctatttaaggctgtttcctactgaagaacataccaaagtgtgccgttaaccaagtttgtgctgttatctttttttcttataatgaactgtatgattatcttacctatgatttcttgtaactgattgatacaagtttccttcaagttgtgttcagtattgtccttcgaagttttttcgtccaagattattcgttttatattttgtacaaacttgaagagtagagctgaaatttattctattattagtatttttcttgatgttttgcttcttatctacttagtaacttgtgttttgtccctttttatttatttatttatttatctcacctagttcaattttcagtcaccattttatttgatcagtcttttgcttataggtatggcctgttgaggttgacctgaaatttttggaaccagttggaagagagcttaagttgcttggaaaggtagaactgcttattcttgaattcacttttgattatgaattaaaattgttgaaactatatctatttcaataccaaataaagaacccaagattagatgcctgcttgtttaaaacgtttaattaatcaactaaaaaggtctaagattcattccagttttaattttcttgagaggagaattaaacagttggtgatgcgtttttgaaagtagacatgaatgagttcctatgcttgtcaaagaaagtccagagaacaaatataagccctttaatttacggggatcttgcggtttttgctctgctgctgtttctgtgtatcgaaaacatttgcattaatcgtcttttctaacttctcaatcacgatcatcatcgacatttctgcttcctagcctgtcttgactaatggattggctcctaattcccttatgcagttcatggatgatgctgtcaaccttatgaataaatctttcattgatcgttagcatcattgatctgcagaacaaattgctgaaagttttgggctcaaaattttgtttcttattggtattcttgcaatcaattgaaagcctaacctggaagagtggctatataagatctcccttttctttgcgtttagatacatacaacaattatgtactaaatgtcaataaaaacgcagcgccagttccttttaattttatttctttgctttttaatatttgctattagtctcttcttgttttactcaaatgatcttgaagtttttcaatttgattctcggactgcaaaatgatttgcagaaaacaaaatgaagtacaccaacatgctgtagtaaatgttagaaattacttaaaatgaataaatattagattagttttgccctattgcatagccagagaaaggagctctctgggtactctgctacgaggccttaggtgaaaagatgtaacaaagacgttttaaattaacttcagaaacaaaatgatacaaatacaactaattttctattcactaaacctccaataagaaataaaaattcaatcattgcaagtgttagaacaaatttcacttgtttggtgcatgttgttgaagggtttgtcatattgtaagagctattttcttttactcccacaagctgttttcttttggaaaacgtttcctttcatggttttgttcttcataatttgaccgtaagatgtttggtcacttgataaactattgttcttctcttcacaccaattagagtcaaaccaaagtctataggaaattaatagtgtgatggaccatggtgtttgaaagataattgaacttttgttttaatgattggaataataaaaaactgtacgagactatcaaatatatctattcaaagttcatcgagtagttgtatttaataatattattatattatgttcactaaaacttatttttctggttaaggagggggaattagatgcatttcctaagataaaaaatgatgataaggaaattaaaactacagtaacattaacttgaagaggccattaaagaaattcacacattctatagggaacgtgatcagcggcatatgttaaagtagagagaaaatctatcccaagattcaaatcttacccttttctgcataacctactaaaacattatcttgttccttaaattttcattttctattactttacataactggtagagacaaaaaatcctatctgcaaactacaataatataataattaagtattgttttgggtcctaaaaggtgaaggacagcctttgaaatatgaatgccaaaaagaaaaaaaaaataagaa

SEQ ID NO: 301065 - DNA, 799 bp, Cannabis indica
tttttcatctggttaaggttaagtatcctttttgtatagggaattcttctcaagaaatgggacgggagtttaattcgtgccacccgtcggtgtgtttttttttttttttctcacttttgttggtaagcccacaacttttgctgattgaggatgtaaggcttttgatcctgacatacctggcatgctttctataagattttttctgttcaatttacaaacttccggtttagcttgggttgtatcttctgtagtgatttgctaatctccaattttcgccacttgagatgtttgtcagtcaaatacacgaaatttgggtagtttcgtgatgttcattgtcaattaattttaaattgaaaacttcacactagttccctgtgccaaatttatgatggattggatacacttagggatgccacttatcgtgctattaaaccaaagcctagtgtatttaaaataaatattgaataataaaaaaaacaaaattactctattaaacattacgcatgtatttacacgtcaattttcatttaatttttgttggaattttgtaaaattttacaaaaatgaaaaataaagctgataaaaatattttattagaagtgtatataatgagtaaattttgaacttgggttatggcccaataggtactcaatttagtgcgtatgagtgaggatttacacactaggctaccacaagcacgctgccacagttcgtctgattgatcgtgctgacctgggaagtgtggtgtcactttatctttttggaaaaaatttatttattaaattattattttttattt

SEQ ID NO: 301066 - DNA, 3543 bp, Cannabis indica
ccaacaagcagcgattaataatcgctccaagtagacaatcgtggtaattcaacggtcctaccaattaactagataacaatcaatggagaatactccactcatacaggatgcgaatagaggaaaaaaaaagcctatatcccaaacggaccatagcatgggccagggtaacgtccatccaactacactcaatagacccaaggtaatggaccgtccaatctgagaccacaggatcaagctgtgggccacacggtaaacgagcaagtttttccaacccattaccttggggaaatggtcaatacaatttttgtcctcagacggatatactgaaccaatcaactgctaataatgtccatacaagaaggcctccaggtgagtcagtctttaataggtttagacccgtacatgatttaagagacgatctgaatcgtagaagaggaggtcatgattgacatttcattcctcctaatgttcaaccaattaatgtagacaattacgtgccaagtaaagttttaaagggtctacaggtaacacaaggcggtcaacaagcaggtgaagttgatccagtggtgcaagcctaaatagatcaacttaagagccttgtacaaagcctgaacgacccaaaactcaccgacctagagcttgatcggatacgaggttcactattttcaccacaaattaatgccctcgaactttcgcacaagttcaagatgcccacatggaagatgtatacgggcaaagaagatcctctctctcacatcacgtactttgagatgaaaatagatttacagactgtaaagggttatgtatagtgtagaatttttctagctaccttggcgaaggccgtccaatagttgtacttcaagttagccccaagaaaatttagttcatggaacttcttcatggcagagtttcacacacagttcttatagttctcattttctaggaaactccaaactcacttagaaaacttagtcaaaataaaacaaataccaaggaagcttttacaagactacattagtatgtttatgactgaggctacgaaagtgaagggactaaccgaggaaggaaaactggctgctatcctaggagaaatagaatctctgggagaattatggaaagatatcaaaaggtttactgtggggtcaatgggtgagttcttggaccatgcagatggatttataaagcttgaagaagcagttctgcgagtagacacagttggtcaaaaaaagaccaaccaaagttacaccactacttccaatacatccatctagcataaccaaaactctcaacctcaaaatagtagtagtacatgtcaaagtggtaaaaggtcgaacaatgacaattatcaaggtaatgggaagaaggagaaattcaataataattatgatcaacaacgtcctcgagagaaagcttcaaagtttactgctttcactatccttactaaagaaatagaaactattttcacgacaactcagtttgttgtaccgtacaagagacccccaccaatgacgaagtacatgagcaagagagatacccctaagtattatcgctttcatgagaactatggccatgataccaccgagtacaataatctaaaacaagatatagaattcctcatcaggaagaataactagcacttacgtatgtatgttaaggttggccatgaccaaggggccacccgtccagataataatcagaatcaattaatgcctccatatgtggatgggcatttacaattgattatttgggacccttacattgctggagactcaaacgaaggtaaataaagatatgctgggaccctgtagtatgagcaagaagataaaatattagccatggaagaaaaaaagtcgaaacaaccactcagataagaactagtcatctcatttagtgaagaagactctgaccacattatctatcctcataatgatcccttggttgttgaggtacagattgaaataagatcgtttctcggacaatgattgacaatggtgcttcatcaaatattcttttcaaaactacatatgagaaaatggggctttaacttaaagattttgccccttgtacacagttggcatacggcttctctagccaaagcatagctcctgttggataaacttgtcttctgctcacagtgcgaaaatctccaacagccaacacaattatggcacaatttcaagtaatcgatacaccttttgcattcaatgtcatgttgggccaaccagctctatatgatttgaaagcagttatcttagtttaccacttgtgcatcaaattgccaactagaaatggaataggttgtttgaaaggcaattaaaaatcttcacaggaatgctataacctcgctttgacaaaggccaaaaaaagaagacacagctggtcaaagctcagggaaaggcaaagacatttccaaatagggattcgcacaaggcagagatgtagacatggatccttgctttgcggaaccaagtatgaatgtggggccagtagaagtttaaaaatatcatgtcatgttgaccaggaagctcgaaattggtaaaggtttgttgcttgaaataaaagctactttgataaaaatttcttagagcaaaccttgacattttcacctgctcgcacgaagacattgtaggaattgatccaattgtaatttctcatgctctcaacattgatccaaatttttgttttatatagcgggaaaaagattgttagacaaagaacgtgcacaagcattgaaagaataagtagacatgtttcaagcaattaaattcataatcaaagccttctacccagcttgggtagccaaccccgtactggtgcctaagctaaacaaaagatggtaagtatgcattgatttaacaatctccaataaggcctgtccaaaggaatgttttctacttccaaggattgaccagctggtagatgctacagcaagtcatgggatcctaagtttcatggatttctattcggggtataatcagataagaatacatccacccaaccaagaacatacaagcttttgtactaatgttggtttatactgctacgaagttatgtcgttcagactagaaaatggtggagctacctaccaaaggttagtcaatataatgttcaaagaccagatcgaacgtaacatggaggtgtatgtagatgatatgctcgtaaaatcttaaaaggctagtgggcatatagaggacctgaatgaatgcttcaaaatacttagaaaataaaacataaaactcaatctcctcaagtgttcctttaggatcagcttaggtaaatttcttggttttattgttaatgctcgtaaaataaaggccaacccaaagaaaattcaagcccttttatatatgaattcgtcaacaaaggtcaaggatgtacaagcctaatgttggtttttatgccctaaataaaacccattacaatctaatctgattagttatcaataagagaattagaagtgatttatgttaacatgtagtttttcatgtttatggtttaatatatgcacaaaatcagttaagtccagaacatatattcattcac

SEQ ID NO: 301067 - DNA, 5495 bp, Cannabis indica
caaagtgaactttttggggacttttgccgcaaatttctcctttctaaaatgtaaaaaataaaataaaataaataataaaaggttggagtcaagtcaacacgggagtcaactacacgaacacccctctcccaaccccaacctcaaaatcacaagttacacaacaaaaacaaaaataaaaacaaaaacaaatgtacccgccgtttgagttttgggtccctaaactaaattgacccaagtaaacttggtcaacaacaacaacgattgcgcaaaatatttcacaactctgcctgcttctacatcaatgacttctgcaaatgtcgctaacacatcttcttctttccactatttcttaaaatcaactattctattcctctcaaattcttaaattgatcattctttctttacttctcctgtatgatctttccattctttcacgagaatattgtttaggttaagcgagtttgaattatttttctcaaaatttgttgcttcaaactcttgcaggtggacaatcggggctctttcgggtcaaaacgctctcgcaatgatggtaaatctcttatctttaaaatatgtacacatctattatgttttgtgtagtattgttttttaatttccttgccttaattttatctaaaattccttttcttgtaatgcttgttttatttctacatattactagatggattgataatattattagagtagagatgaatgtttagaaaacttgcaatgttggcttcggtatataatatattatgttggttctgattaattttattttattttattttgtgtttagttgttttatgttattttggggtcccattttcaaaattgtttgattttgattttgaccttgttgctccatccataactacattacaatcagggatttcatcctttcgtggttccttgttatggtatttgtgtcctaagtttttgtcttttattcattctgtctttttgcctaaagttggaatccattgcattttagatcctcggagtgatggagattggacttgtcctgagtgtggaaacattaactttggatttagaacggtttgcaaccgtgcaaaatgtgctgctcctcggcctcaagttttgcctactgtgagtgattatgtgattttgttttattctttcatattttgtagtttgcagtgcatgtgttattgtgtaattagtgtcctagtaaactcttctcaattttatttcaggccaggtgaaaagatacaaaagaaacttaaatatgtgattttggtagcttggaaattgtatcttccggttggaaactctgccaataacaatatagacatgccaagtgtaaacgacccacctggacttatcaagcatgttagcttagaatagttttgaatattaagtcttctcgggatagatatcatgaaattattgattttctaggtataagagttagaaagcagaagaaagtgtttaccccaagattaggcggtttcaaagaattgtagttatcaacagttcaacactatcttacatttaggcttatctgtaactcacatgattttttttcttttcagcattctccaatgacaagtcattacaataaccctcctcccttttattatggaggttttgggcttcctccaatgccatatggagtatccaccaggtatggatccccaatcccacatactggagtgcattacgactatgctgcaccttctgttgctcatggagcatatggccctcctgcgcccacatttccccctggaagttttggaggttttttcttttactcttgttaatttctttctgggctcattcgttcataatttgtagaacaaaggattttctacatagaaaacatataaagagaaatagttactaatgttttaataggatcaaagaagaggagttaaactaaacatttatacttcttgtatgcacctacttttgctataactttgtcaaaatcttgaattcactggattattcctgttccactattgagacatgggcctttggaagcgctatcacagcattatttggacttaaaatgtgatgcttggttggtacatgtgatatatacaaagcatgtaagatacatctcacttaaaggcttgtgtaacttataggttttggtgactcaggaatgggttatgcatcaccttcaactgtgaatggatatggatttggttttcctggatctccttggtctggaggaatgggtataataactgaaaatcctgcttccaggaaacgtcgtgggggtaagttttgccttttttggagctctattctacttttactatcatctttccgtgcactaattcagttttgcttggtttctataatagatcacgactttatattgagttgcctgttctattctgcttcctatcacattaaatctgcataatttaatttagagcttgaatactataatttctttccagagaaataatagacttgtaattaagaggcaatgcacttgtcaaaaattgtttagtatttttcaattgtgagtgtttcaaaactgtttctactggaattgcaggtccagatggttcatatgatggggattggatatgtcccaaatgtgagaatgttaactttgcttttagaactgtatgcaacataaagaaatgcggggctgccagacctcttgtaagtgtttcttataaatatttaattaatggaatgctgttcacttttcccatttcacaacgataaatttgttacttccattgcctgcaacaatgaagcacttttctgcgaaatccattgcatactcaattttgtatcatattgtgaaaagcatggccttcaaagtagttagatgtatctatgggccctaatgtttgcctcactgtacatttgtgttagttttgaaagttagattggattagatgtggtagattaaaaaatattggatagggtagataatagaagaagaaaacaagttggatgcaaagttactattaaaatacatgaagatcgggattaagaaaatagggttccacagtttttcgatgaaattaagttatcccatacttggagataattcttttaaaaatcttctccaaattcataaggaaatcacattataaaagttatccaatccaatcatgctctccaaacgtgacatttgtgtaaagtttcaagtccaggagcatttgtggaattatctgaattttaaattgttatagaaagccaaatcatagttttacactttttaaatgttctagtaagcataatataaatcataatatattatcttgggattactctttttgtagggtcctactaatcagtcaaatgctggtgctcccgaaggcagctggacttgtggcaaatgtggcaatgtgaactatccctttcgaactgtttgtaatagaaaggaatgtggaactgagaaacctagctcttgaaatctaatcaaatacttcttgttttatgtttcgtgtaaaaaatcaacagatttcacctcttattgggcacagaacttcaaaataaagacaaagttgctctctgaaatatatttggaatggttatttctggctgaaatgaggacacatcccttatttacttgtgtttcttctgatctgttgctgtggtattacttgcaaacattgtattttcttgaatgatgagatgccaattgtataggctaaactatctgatgccaacgtttggatttgaagtggtttagcttgcaaatgtgctctcttggttagtttgaaattttttattttgatattattaacggcatcatctctcagatgccttttatcttaacgtttagctggagaagaacaggccttttatctttttggataggaatgaactaaacatcatctctcagattgccgattgtacatgccaaaatgtaattgagctaaatattctgttctttcttgtttgctctataaaataagtggatattatgtgatgaagaggctgatgttttataaacaatattttaagtggattctgttctttcttgagctaaatgtgtatttgatcccatttatataatcaatattttataataagtggattttatgtgatgaagaggctgatgtttttgtatgtcctttttaattcatacacaataggacaactagctacgataccaactggcacatatttgaattatcatagctggaaaaaaataggaatctccgaccatagtatggaaactgaaacattatcaatatagggccaacaaaacaaagcatttccttgcgtaatttatgatgtgaaatgagaagcaccacaaaaattagtttttttagctgttaagaattttattttattttatttttgtattgtttatttgagatataagactaaaacagaaatgccaacaaagtatatttgctgattaatctctaagagattatttttattttttaacagaaatagactacactttggtatctacgtcaggctcattaatctcaaagtatcaatccaaaacacgttgtcgtttggttactctaattatttcattagtctttatatagttaaagccacgaggcgtacggtactatatgacaactggcggcacattgggtaatgccaaccaacatttgaaaaacaatacaaaagctttggttgttccagagacggttgctgaacgatggaggccagcacaatccctactatcattgccattcggatatctattctttgcatatatatatatgtactagtgaaggggtcatcacccgtttctcgacattgttttcatcaataatatattttaattaaatttattactcattacaaataaaaaaataattacaaaaaccttaaaaaaatataaaaaaaaaaaaagaaaaacaacaaaaatatataactaatttaacatgtaactataattggtacaaataaaacaaaatatatacataaaatatatacataaaaatatacaaatgactaatatataatctaaaatataaaaagagcaaagactatacaaaaatacaaattactaaaatataatcttattcaagaaaaatataaaaaagagcaaggactattaaaaaaaaaatatataaattactaagtaatcttattcaatttgaaaaaatattaaaagagcatggactatagaaaataaaggagcaagaagtttgacacatataagtttttaaatttaacaatcttaataatttgtgaagatttttcacgtcctgaaaatttaaaggcataatttagtacatatcaaagttaaaaagataattttatgcataaaccttatttttattttatttttttaatttaaaatccaaaagaagatattattaaaaataaacataaaatatattaaaaaaatattgttatactcaaatattgtcataataaatcccacataaaatttaaggtaaacactattttggaccctctattttacaaaagttaccaattggaccttgtgttttgttaaatgacaaaatggaccttgtattttctaaaatagtacaaataggaccctgaattgattt

SEQ ID NO: 301068 - DNA, 896 bp, Cannabis indica
agcccttcaagggcatccctttgaattggctcttgaacataatctgattttttcttgagaaacttctctgacttaggttgcctctcaagtaaaacattcatggaagttccaattggataatttgaccaaaagagaaccgattcaatccaactcatttcgatgtagtcttctggcttcagacccaatttgggaaactttttctccatcaaaacaccaatttgttctttattaccaagaaataaggccacaaatttggctttaactgtcttctgggttttcttgtttactggcatcaaaaccactctaatgaacatttcgtggagcaattgatctgcaacatcttgccattgcagaaccatgtctgtagcaccttcttccaaggtccttacaactctaaatacagttactttttcaggcacagaaaccaacttgattttccatgaaacaatcactccaaaactagctccacctccacctcttatagcccagaaaagatcttctcccatgtctgctctgtttaaaatcctgccattaacatcaactataacagcatcgattatattatccactgttaatccatgttttctcatcaagttaccgtagccacctccactaaaatggcctccaactccaacagtgggacaaaccccagctgggaagccatggattttgctcttttccgctattctgtagtaaagttccccaattgtagcccctgactcaacccaagccgtttcatcttcagtacttacagttatatttcgaagattgaacatatcgattatgacaaaagggtcgttggagacgtaagaaaggccgtcgtaatcatggccaccgcttcgaattcggacctggaggccatggattttgcagcaaacaatagctgcttgaatgtg

SEQ ID NO: 301069 - DNA, 2144 bp, Cannabis indica
ttggtactttcattgagagttgaggactcaagagcacaatttttccagtttgttcaatgaaagcaaatggttgtaaaaactcgaagaactcaaccaccgacccagtagacccaatggccactgatcaaattgcccagaatttttccaattagaggaacccttctatggttgatccgagcacccagaacacttgcactgatggtgtgggggaaagtggtccaggttctcgagtaccaccaaatggaacccaagtgacaatcgacgatgatgtaaagctccaaaatttgagggaggtagtggcttaaattcaaagccacacgaacacgttacatcacgatcaggctgatactcgagcatccttgaacgaggcttttgtgcaacaaaaaaggcctttccaagagtggatggacaaacaagtggagagtgtaagggcccagcaagaggcgatcaaccactgatcacgcaaaaccacgatgttgataaggtaatttaatcagggcattgggcagaaattgtaagaagatattcctctcattagggatcctgtttgagggaaagaaacatatgttatgcccaggaataaccacgagtcgatagttctaatgacccacacccaaaactccttgcatgtttgaccatccaatctcaggcaacatgtaaatgtaggcccaacagtagacagtcaaggattgtctaagcaaaataatgggcaaaatggtcaaaactaccgtccctaagtgggaacacccaaccagtagaacatagggtttcaagaccctatagccatttatgatcaaaataggcaggtttagtattttcagtacgttccatacacagccccgcatcagggccaagccgaaattgctcgtattcaaacattttcaagtaacaacgatgatggagcagatagtgtaacccgtgcccaaaggcagagagatcgacgtgctcggaggaagttctaccagttccactagtaaatactgaaaatgcaagaaggcctccagggtagttagtatttgggaggatagggacctaacctgtcgacctcaggcacacattgaatcaacggagggagcagagaactgaagtaatccctccaaacgtataacctattaatgtggacaattatgcaccggccaaagctctaaccatctagccctattaatggcatgtaacctctgtagaacccttctttgcatgcttgtagacaaatgtaacatctctgaaatattcttttcccacctcttaactctatttaaatcttggctatacttcttggggctatcttcaaaatttgtttaaagtaatcctcctatatggcatactattctgctacagacccttcaagttctcccgttgcatttgttctggctctataaaactgccatgaagtgacttcagaatacttagtgtcctttttcatttcagcaaaagatttatagtccatgtaaggtgtaacctaaactgatccaggaagcttttagttaacctgatcacatcaatatctctaaaataaaaattaatgaacattcctttcagtatgactaaaaacacataaaatctaatacaactttttagcatataaataaaagatctcaagtacctgttatccaagacaatgccacacttgtggccaatttcacttattaaagtgatcttaaatgtcaacctatctggttggacatgtgcatttatcattcatgggtacccctctgccatgtacttatctctgaacttctgtttatcattgtgaatcagaatatactccttatttgtgtgtatgaaatgctccttcaatgcagccttcaatattttgatactaccaaactccatactcaagtcaaacttgaaatcatcagtctttttttagggattaaattccaactttgaggtatgatcacaatcttcatcatcactgtgaacactgcgtagttcatcacttgattccaacccatcattgccatcatcattggcaacatgtatctcacttacccggttccaccatttgcttggacctgatggtccaacatggtccctttccccttgtaatgctggattaaactcctcttccataaattaaaagtccttttccccctgtactttaatttctatttgtggttggggttgggactatgtttcaattt

SEQ ID NO: 301070 - DNA, 856 bp, Cannabis indica
tgatatatactaaatcatgccccctaaactttcatccatgttagaattttttttactaaaattaaacaaaagtccttaaatctaacaatctcaatagtttagggagaattttcaacgatcttaaaagttcagaaggcataatttagtacatgtcaaagttcgggagaaaaattcctaattggacttaatattattatactgtataatgattaacttatttgacaaatatgtaaatagtatttaaaatttacaaattgtattttaaaatagagtggttatgtgtaattagtaggatatatagtaattatactatttggtaattattaggaatgtttaagaattcttatgattttaatacaagattagtgaagtatgaacgaatacaaatttaaaaaaataatggaaataacaacaaagagttaaaacaacaacaataattatgaataacaagataattcaaaatgagaattacataatagagtaaagtttagtttagcaaacatcattgatttatatgaagtcaattcttcaaagaatgcttgccacattagttcaatgctattcaaataatatttactctttttttgaaacagaataatatttactcttaagtcttcattagattgctaatggcttatctcatgatttaggactttaaatcttgaaatgtttaaggttaacgaaatcctagaacaatttgaagaaaactaaagaactctagagagagaaggttttttggaaagatggagaccgagagtaaaaaataaagggtaaatactattttggaccatgtgttttgcaaaagttacagattagaccctgtatttggttaaataacaaatagatcctgtatttt

SEQ ID NO: 301071 - DNA, 1795 bp, Cannabis indica
tttgacgaaacttatctataacatagagggtttgcttaaaaacaagcaagtataaatgtctgaatgcactcaggttccctaagcccccgcgcattccaactaatgaaattcatggctaggggcggtgttgcttagcaacagtcgctgaaatattagaatggtactgagccgaatccatagaactagaaatagactgagtagatggatcagtaggctttgaagttccaaactgatcattgagggtgtttgatcgacaatgcttgaggacatttcaaagttaattagagttgacttggcgtttaaacatcttgttaggatttgagttctccttatcatcaacagcaccaatgactgctttacctttgagagcatcacgagatgggactgctgcaataccaaaagatattgtgattgtggtagcagatgagtaaagggctaatggtaatggtagtgttagtgtggttttaatttggtttgggttcatggaggatattgatggtaagtagcaatcatagttgaaggagataaataaggaggatatggtagaataattatttcttcaatggtagggactgcaatagtagtagtgtcggtagaaatttgtgaagttggagatggagtattgaataatggaacagcttaatgggaagggttcagaccaacaataacagaggtttcgttctcagtcaataaggttggaaaaggcagtggccttgcatcaaggtttggtattgcagcagtgaaggatcttttagccaatcttgtcattaaagaccaaactctccctttagaaattaatcctataccgatcatagccagatttagggaatggagaactaatcattgaaggaccataggataaagagggatcaacgccattatatattagttcaagaaacttgtgacaagttttgaaaggatgacctattgcacctcattcaaagcagaattcttgcaacgctcacaacaaaattttaactagaattcatctctcgagtccttatgtctaaccattttccccttaataatggtttagagatatcgatagttccacggaaacgaaaaaatgatccccagccttcatataaagaatcctcagggaatcaatgtaagatcctacaatgttatatgcccattctgccataacttttaatttgttgagaaatggtaatcggtggagttgcacccataagggggataaattcatggattctgcagaagcaatttgtagagcagttggtgggctcaacacaatgtggtggttttagaaatgccatggctccattagtaggacttttttaaatctccaatacaaccaaatgtgactaaaagcagccctgaatgatgaccagtggtggtaagagggaattggcctttccaatgtccactcatcttgatacaaaaaagtttttcgatttatttcttaggatgaaactactcgtgcataaagaacattattctgggttgtaagactcccgttagacgaggaagcagggagagtctgaacttcccattcaaaatcagtgagaattagagattgattcatgtctttgagtaaaagatccatatacaaaagcaatgcagaagaggaaagggttaggacagtaataatgtggttatcaaggagaggttaaacatggtggagggaacgatttttgtgtataatttaaaaaaatagagctgatggacatggaggttacaaagaggagaggaggagaagcaaaacaaaggggataaaattagttaaaacaattagagtaaattgcagcataaatacctaatgtttcagatttta

SEQ ID NO: 301072 - DNA, 3164 bp, Cannabis indica
taaatcactttaaaattctaaattgataactaatcagattgtaatgggttttaacgaaatacttaatgctagtgagagagttgggaaaagggcagtgagtaatccatctcaaagatttagggactgtgctgatcattgtggcttgagtgacttgaagttttcaaggaattttttacctggaacaacaagcaaaagccagatgacagggttttctccaaaatcacagggctttggtgaacacgtagtggatggagtcctttgtgaactctgaggcagtgtttctgcctgaaggtctttttgatcatagtcctatcctggtatcaatttacttggataggtgctttgggaaaaaaaaaccttttagatacttcaatatgtggaaattggcacctggatatgaagataaagtggctgggagctggaatcagaaggttatgggatccaaaatgtatcgaattgtcactaaactaagaaggctgaagcaagtgctcaaggacattaataaggaagggttttcagagatccgcaaagcagagaaaatctctaaggatgccttagaggaggctcagatgcagatgagtaaagaccctctcagtgatgaaaaaatgatagcagagtaagaagcatgcaggaaatatacagaagttcacaaagcctaccctcttttcctctcatagaaagcaaatatgtcttggttaaaatatggggatgagaattcaacaatgttccatgcatctataaaagctagaagagctcataatagaattttttctattgaagatggcaatggtaattggtgtgatacctcagatagtgtttagaaagcctttcttgaatactatatggggatgttgggtaactccatgtagaataggaggaaagttaaccagagtctcattaatcttggccctaagattaatgagcaccataaaagtattctaaatgtagcatacacccccaaagaagtgaaggatgccttattctctagtcctggcattaagtcccctggtccagatggatttgggagtgcttttttccaggataattggcagctcgtgggttctgaagtggaggaggcagttcttccttcctgaacttggggaaattttaaaagagattaagggccaccaccattactcttattcctaaactgaattgtccaaagaatgttctgatttcagaccaatctcctgttgcgatgtactatacaaaggttccactaaggtgctttgcaatagattgaggaatattttgcctgatcttattgcagataaccaaggaggttttgtgcatgggagattcattgcacataatgtgttagtatgccaggattggtaaggctatatggaaggaagaattgcaagccaagttgcatgattaaaatcgatctcaggaaggcatatgatacagtcgaataggactttattgaggaaatgttagcagcttttgggttcccaagtcagtttattcataaatagctacataagaactccaaagttttccttgttgctcaatgggtctatgtgtggattttttaatgccaagagaggtctaaggcaaggggaccccatgtcccctttgctctttgtattaggcatggaatacttgtctagaatacttaagaagattggagaatcgccaggattcaagttccacgacagatgctcaagtctgaaattaaatcatctctgatttgcagaatatctcttaatcttaagcaatggagactctgtttccatcatgttaatgctcaaaggcctccttcctaatgagcaaaaaactgctatatattgctcgggcatggcagatgttgaagttaacagaattcttgatgcatctaattttaagagaagcactctccccttcaggtatttgggaatccctatatgttcaaagaagatcagcaagactgaatgcaaggagcttcttgagaaaatggtgagcagaattcgttcatggagttcaaggaacatctcttacatgggaagagtaacattgatcaatgctgtcttgatttccattcatacttattgctctcaaataatgattttgccaaagaaactactcaaatatattgaagctatttgtagatccttcttatggaaaggaatacatggagatgcagggctcagtttaatttcatgggatagcacacgcaactcaaagagctcgggaggattaggcttcagtaacatccagcagtagaacattgcagcacttagcaagtatgtttgggatattgcatgtaagaaagattgtctatttgtgaaatggatacagtctgtatacttgaaagcgcagcaatggtgggagtatgatgctcctaatgattgtagttggtattagaagaaaattgttggagttaagaaccgattgaaggaaaagattgatcttgctggttttttgctgcaaaagtataaaatgcagcaagggtaccatcttttattctctaacaatgagaaatttccttggtacaaagatgtgtgggatagacttatcattccaaaacaaaaatttatactttagttagtcatgtaaggcaggttaaacacaaaggaaaagcttgccaaatttgatattaatgttgatgaaacttgtctcttatgcgggaaggaaaaagaatcgactaggcacttattttttgcctgtgactatagtaggaaatgcttgcaagaagtcaagacatggctgcaatagagaaccaaagtagaatccttacactgcttgctgacaaacataaaaagtaccaaggctatttcagcaactcgaaggagtatgctgaaagtagtgttggctagacttgtatatcatatttgggaggctagaaatgatgtcttatggaatcaaaaggtgagacttgtcaaggcaatggtgaaacacatacaatgggaaagcaagctccggattatagaagttatgcctaggaaaactaaagatgtagataaaaattggattgtgaatatctaattctttgctaaaattgtaattgtgtaaatgcctatctagttgaaaaaaaaaggaagattggatgtaatcaaatgtaagttgtaagatgttttttgagcagtataagaaccttattcataaaaaataacaaattagattcttctggaaacttaatttttgaattttcaaaaaaaatatatttaagttaaaaattagtt

SEQ ID NO: 301073 - DNA, 1914 bp, Cannabis indica
gaagacgaagatctagagccgtgcgtcaggcaaatcacggaagccttactcctggaaaactttaagatgccccagattgagttgtacgatggtcgtacagacccaagaacccacctgtcaatgtataacaaaatgatgcaggtggtaagagtaagtgatgttgctaagtgcttgtgcttctcactaacacttaccaagtttgcagaggattggtggaaaaggttggctcccggatctattcatagctggaaagacttacaatctactttccggaagtagttcatagctgcccaagactatgacatggaagttgggtcgatcaccaatgtcaaacaataaacaggtgaaagcctaaatgacttcattcaacaaatgatggaggcatgaatgaagacaaaggtgagcgatgacatgaaactcgtagccctacaaagaggatgtataggcggctccttgctatagggcgaaatgcaaagaaagagggctaagactttgtcctagtttatgtcaagagcacaaggtatcatcaacctagaagatacttatacgcaagccttaggagtccttcatgctccaactccttttgcgtccttaacaagctttgtcccgcaagtcccagtccccagtactcagtacaccgaccatctatggaccttctacatccgggcaggtgcctacccaaacccatttttttgcgtacagagtagcacaagccagatatattatcgctccaaaacagacgaggaacaagcggaggttctggaacataatgtaatgtgagccattcccaaaccaagagaagcagaagaaaccaaagttgaagcaaaactttgaagaaacccaggaatgattttgaaccaaagttcaccgagtacactagcttagtgaatactcgagaaaacatgtataaggtaacatgcaatatggtccactatcaaaaacccccaaggatgcctccaggggaaagcacaagagtgatcaaaacaaaaaagtgcaaatatcacgaggatgtagggcacaccattaatgagtgtgactacttaaaagatgaaattgaaactctagtcagagccggacacttgggccagtggatccggatgatcccatttatatatctcaggtaggggttattcatggaaaatcgcttgttctaagacagaagcgagctataaactcttcgcaaggagtaggccaccctaaaacactagatcacaacttctagccctacttgctctgccacctcaggctgcgataacagtgttagctttgggatcggggaactcgtatcatctggctctagctccaccccgtgttgatggacatgtggccactatcttaggatgcccccatattgcaggaagcacgagaaatttccaaaaaagatatctgagggaatgggatagtgaaggggaaatgtgcgccttagtgcagtcactatcgcaacgtccgcatacaatgaacttacctattacattcacaaaggacgataccatacatgttcatttcccccacaatgaccctttggtcatagaagcccaaattaccaataaaagggtttcccgagtcttggtggacaatgggagctctgtaaacatgctgttcaagtttgcatttcaggaaattgggctaacgaaggttgatttgtcaccttatcccatccaactccaagggttcaatggagatgaactcatgcccatgggaaggattcagcgcctgacacattgaaaggggataaccacatatgctctttcaagcactacaccttcgtggttgtagatttcgacacaaaatacaatgctatactaggacgcccaatcttagtcaattttagggccgtaacttccattaggcatttgtagggctgggcatcatccaatccaatccaattgaaccgaaccgatccaatccaatcca

SEQ ID NO: 301074 - DNA, 2654 bp, Cannabis indica
ggttatactaaggtatagtatcgtccgagttagccagtgacattgggttaaagaacattgaaacataaattaggtttgattcagaattgacattgtgtgttttgcagggggcaaggaatgaaatatttgccatgcagccggccccaatacagatttcttacatgggatttcctggaactacaggcgcagactatatccactatctggttactgatgaggttggagagtttgtaaccctttgtcctttaatgcatttttattttctgtttccggtttgatgtctaacttccacattcacaatttcagttcgtgtcaccttctcgattcagtcatatctattcagaaaagattgtacatcttcctcattgttactttgtaaatgattacaagcaggtttgttgtgtaaatattctcttcacatttctttctttatatttattatatggacctgtgacaagactactttcactgttcctttgcagaaaaattgtgatgttttggacccgaactgccaacccaagagatctagctatggtttaccagaggacaaattcattttcgcatgttttaaccaactatacaagatggatcccgatattttcaatacatggttggttgattgtttattattgacataaaaactttgaatcgattgaatcacagcaataactataatgattcacatgtcattaaatgcaggtgcaacatccttaagcgagtacctaatagtgcactttggcttctcagattccctgctgctggcgaatcgatactccgcaattgtactgtcactttaccattctcactcgtgatgaatcatttacatgcgtaatatttgaattcttttatgaatcataataatatttcggtgttggttgcagatgctgctcaaagaggtgtacaaccagaacagattattttcacagatgtagccattaagggtgaacatatcagacgaagtgctctagccgatttatttttggacacgtaagaattcttgcaaatactcggttttctacattgacaagtttaatttttcttattttcccttacactattgtaactttgttgtggcttctatgtgagtaggccattatgcaatgcacacacaacaggaactgatgttctatgggctggtcttccaatggtaaccctcccgcttgagaaaatggctacccgagtagccggttcactctgtctagccactggtgtaggagaggatatgatagttaacaggtgatttaactttaaaacaaatttataatctagttaaaataagctctatcacacttagttctcggcttttgtttcttcaatttctctgttctgactggttttcgtgttcttacattggaaagtttgaaagaatacgaagagagagcagtatcgcttgctctaaatcgtcgaaaacttcaggaccttaccaataaactcaaagcggctcgcatgacttgtcctctattcgacacacaacgctgggtgagttttgccatactattgatcatatgattatggtttcgttttgtttagtttctgcttatcgttattattattatgactatatatatattatattatatattggtaaaactgatcaggtgagaaatttggagagagcgtatttcaagatgtggaatctgtattgctcaggtcagcaccctaagccatttaaagtgactgaaaatgattcggattttccatttgacagatagaaaattaagacaaacagaacagtacgtgctagaccattaattattattgtaaatgaagcatatgagagtatatacatatatatgtatagggtagtttgatttattgtccagtcgtgggaggaatcactatttattggattaggtttttattgtttgtttggttagtgttttatttgtgatttctttttattaaatataacaatttatgaatgagaatttagtaagacaccctgtgtgcccaagatgatattaaagatagagaaatgttaaaaggcgcaagtgtcaagtactctcttatgtgttaatatcgttattggtttaattaagtattgagtctcatataatttaatataatagcttttaaagagagtcgttagctaattgcaagacgacacgtcttaaaagtgctaggcactattgggcaccaattaatgttggttaccccgtgtgacttctattctatgttgcttgacaccaatgtcaataataatggtctgttttaattatcaaaagaaaagaaatacacttaattaataaagtaggtagagaagagtgtagttcagttcttcatattttgtcgtatcccacttaaatactcttattatcacacttggtgttatgatttttgcatgcatgccacgtcttcctttctcgacgtaccccatctgtcacgtaaactaaaatattatccaaatttaaccccctctaaatatataatatagaatgattatacaatgaatttctttaaaaagagtataccacttttatttatttcagcaattttaaaaaaaaattaatcttatttttttttttatatttgtttacgtatagttatttaacatattttataaaactttaaaaattttaaaataatttatgatataaaaagtaatattaaataatttattttatacacgtataaaataaaatagttactaactt

SEQ ID NO: 301075 - DNA, 2791 bp, Cannabis indica
ttttgtatggatctatgttatacaagtttcggaactttttgaatctggatctagttttttcctttcttttatggatttgataatatcatacatttcatttgtaacttttgttttgatgacctatatcattatgttgattctttatgcactatttcattttctgttgtatgattaatgcaacaagtagatctgcatgttgccttgattatggactttgaactctttgtctttctgttaaaacttcacttacattatttgatgatagttgggtatttgcagacatatgaatagtagtaaattattctagtcttggagcatattagatgttggtatgagatatttatcttttatctttacctttgaattgtaggcttagtacaatatcatgatcatcatcatctttgagaatctgatttgaagatgtttgtgaagagaagtgaattgttatgttaccaagtcttactagttatatcaatttaagggttatatcttaccaagctacgaaagctgttgtttgttttcaaccaatccaagttttccttttgggggcagaatcactgaatcacacacttagattgatgcagatttttgtagagtgtttctgaagtctgtgcaatcagaactttaaggctttcaatttggtactttgtatattgaccagattcctgtactgtactatgtataaaaggaggctgatgtagtgtggtttcccttggtctggtgcccactgtaaaaaaaaagttacccatgagccaataccacccatttctttgttaacagaaactcaacacgaaatggtgtttggtattcgatattgagccaacaatgagatttgttaaagagtatcaataatagtacccaatatttactaactttatgtgaatagtcccccccaacatcaacaccatttgaggtgtctgttattaaatatttatgtactaaatcaaattttgatatttactcaattatgtttctctcaattttaacatgtattaaattatattttctaaactttcataatgtgttaaaattggacaaaagtctttaaattaaataatttcaagagttcaaaagatttttaatggtctttaagaaaaattcaggagcatgagtttaggattcaaaaattatatttagaggtcctttattttaattcattctatataatattatagattgaacatggatgattgaaactttaagtaaacttaactcttggaaaatttgttgtcattgtcatagattgaagtttatacaatacctttgtggggctgattgattcttttctttatcaagtaaatgatgattttgctaaagtcattcactaaacaagttgcattaaaggaattacacgagtatcttcgaactcgatcgattcatttgtgtgaattaattttggcatgtttaatgtgaattaattgaggtgttgttttaagcattcatattcacatatttattgcttctacttaataaagagaaaacatatataatttttctttttgaataatgagattacttattgaggcttacattatatagtttatttcaaaaatatagttaagaaccttataaaaattgataatacactaattaggaatgcatattatccttaaaattcattttttgtttatttcaaaaataaaaaatgaaaatcaatctttaaaaaaatttcacatatgaaaccttagggtaaaactcgatcaatacttgttctcttttccttttttattttaaaactattctaaaatatcaaactacgtacgaacccattggactcccttcggacagtgtcggaccccatcagacacgaaatatgtctaccaatcagttagtaagcatcaaatctattttggatcactattgaactttcaccatcaacctcaaaaatttaaaatttagaacctcctatagaactataacccactcaaaaaattaaaataaaaaaaaattacaaaactacaaaaaatgtcttcgttcatgttctctttattcgtggtatgcctttgtggtctctccgttcacggttgaggaaaggattggtgaggtcttggtggagaagggtatcttagggtctacataaaagttttccctaaaaaaatttcacatgcgaaaccctagggtaaaactccacccatactcttctttatttttaaactattctaacctttttgagtttgaactcttctcaattttggttcaaaaaacagacaacattttctatcaattctaggtttaatgcagtggtcagattgagggtggtattatttaattattacttggaatactacaacaaacatctcataaataaaaggttttcacccattaaatgaaaaacaccaaccaatgacgtcaaaatgctgggtaatttcagtacaatgtacatgtatctgaactgaaacttcactgccacccgcagtaattttggtacacagtaactttttctccacctaaacttgaaagttgttggtaaaagttgaaaaaaaaaggttgaagaggaaacaaaaacacaaaataattaattattggttccctagagcctaacctagaggtggtaaaaacaggtttgaaatgacaagtttttttgtggttagggttgaaaaattaagtgccggttaaattagtgcacaataatgatattttataaattaaattaaagtatattggatcccatatttaattagatgatacaggaccagtttggcaccgctgtgttgtggggaaagcagttgtagctgagctgagtgtttggtaaattataatttttaaagtgctgcgagttgttaaaattcta

SEQ ID NO: 301076 - DNA, 4352 bp, Cannabis indica
agaaaataatttccataaataaaatattctaatatcttgcactcaaacttggtgtggcctaatttcataatacttttgaattttggtgttcaattgtcaggtccttgtaaattacctccttttgtaatggtgcatgattattataactagccaaagcgctattaatgaaaacaaatggagtagtttatgtgtgaagaacgtgtctgaagacattatttaaagatgagacatcaaacccagaaagaacttgtaactttctaaagtcaaatttagatgaaagtctttctagaaagctaatgatagccatctgttctcgctggcgctgctaaatcttcacatcaggactaaaacacaacaacacattaagcaaaaatcctaattagcttttaaaaaataatatatatttgtatcaaaaataataaagcaataattttaatatacattacatccctctactctactttactcctaacactaaacaaacaactatcctctccctcattcataccaaacaacatagctaaatcttaataataaagaaggatcaaattgtaaataattgtttctgaaagaggtgaaaaaggataatataaaatattaaagagcggtaagcgggaaaataaaagtttaaaaaaggcattgaacgatgaagtgaaggaggaaatagccatggcaatggcgatggaggaagtcatatcccgaatagtacaagagctcgaagatattcgcaattcacaaccaccaccatctatctccgattcctctctctctgacctgcaaacccttctgcacaatgactctgaatccatggaccgcttctacgacgagctctcctccaagtctctttctccctcgaatctcgtttctgctcttgcttccgccatggattctggttcatcttctctctccctctcggcttcgcaggtttatctctcaatgcttcttttccccaattcacctgttttcactctattcactccaatggcattcctgtcacttctccgttctattcgccgctgtctcaagcatcggccctcgggtcaggccgacccaaatggatcggctcagagctctcaaattgggactagccggaagaggaaaatgggcccccgaggtcgtggagcgaagaagcgtggtcggagtacttgcaacgaagatcatgagagtggagagagtgagtttgattttagggttttgtttactgtgcttaaaaagttggaaaaagttatgaatttgatacatttggatcgatttcccgatactttgaagtctttgattcaaacagttgctgaaattccagtgcttgggattgaggtatgtggtaatttggataactacggtagattgagcaaattctgctcacagattttgcttgaagtcctcaggcctgagcacggtgaccaagcgcactcggcgtctgaggtgttgaaatcattgtcgcctatgattcttcagtttaaatctcaggcgaggacgtttgctcttgaatttataacgattcaaatggcggatgcagtgaacctttccgatggtgtaaagaaagcattggtgaatcttcccaaatacttggttgtaaaggcgccagagaagtctgagcctcgggctttggctgtggattcgataatggagatagttcaaatcctggaattcgaaaatcaaattgggtttgtggagtatgtcatgaaaatgggtcaaggaaagtctaatttgaggctcttggcaactgacctcattctggtgcttgtgatatcattgaaagatccactgtgcctgaattcaaaaactgaagtaaaggattcatggggtatgaaatgtttagaggcattgattcagcgatgttcggatgtggttgctggaattcgatctcgggctttgtcaaatttgtctcagctcgtgggagttttgtcaggtgatagtaggagtcagagtgtgttgaaagaagttctggggattggaaatggaggagagggtcgagtgaatgaacttctgagaagaaggtgtgcggatgagaaggcagtggtaagaaaggctgcacttcttctggtcgcgaaattaacaggtctatttggctgcggctttcatggagccttgctaaagactatggggatggcttgttcagatccacttgttagcatacggaaagctgcactttcagctctatcagaggtttttacattttttgttataacttcatatatcataattttttttaatgcacttatgatttgcatttccgttcttaagtgtagtataatcatgtttctgtttgttctatgttaatattagtctcattagtataattgattaggattttagaggctgagttttcaaattcttagtggctttaggtgagctatcatatagtcctaaggtgttaaactagtttaagggagacatagtataatagagggccgatcaattgtaagaagggagaggaagtttttgtaacaaagtgagtaagagattactcagggtgatacctccaaactgtctcgaaaagtttgtaactttgtaattttatctttgatatcaatgaaatgtctatgttttaattctttcaagattggattggaacaatggtgtatcattctaacagtcttattagtgctgattcttcttgtcattttcattggataatctaaatgtatcatggtagactaaggaggtggtacttcttaatatgcaccacatgttacaatttcaaaaccttatgtcactgtagtgttaatatttctatttttcgtgttaatgttttgtaaatccattttaaggcgtcattttagtgttttcttgtgtttcttagctgattgtctggtactgtgtacagttttgtatttccattttgcttcctatctctcagttagtacgcttgctcattttgagagatggtgttcgtttcttatctcatgtttgaaatatttttttcaaaaaaattgtaggcctatagaacatctccagaagaaagtgtgattcgagagtggctacattctgttcctcgcttgataactgataatgagtccagcatacaagaagaatgtgaaaacttgtttctggaactggtactggaacggatatgtagatctggatcaattgagttgccccctagtaaaggcagtatctgcagttttgaagaggattttgagttgttattccctgaaggtgttctaggtcttctaagagagatttgccatggagaggtggcaccttgggtaaagaaaatatgcacaaaccttggcaaaaagaataagttaaagcccaaaattgctaaagctcttcagacaatcatacaaatgtctgagtctctttggtcaagatattgtctgccaatagaaaagtggacggctccccctggtgcttggtttgttttgtcggaggtgtcagcgtacgttgctaaagctgtagactgggagttcctccaccatcattgggagcttcttgacaaggatgacatgggagtaaatattacgagtcctgatacactaggagaaatctatgatgatgaagaggatgtagaagctaattctgttgcttgggctggggatcgtgtttttttattgcaaacaatttccaatgtttctattgtgctgccccctgaaccagctgcagatttagcccataatttgttcaaaaaacttgacaagttcaatatgcatttgacagaggtactttgttcatcaaattgtaccatcagtatgaattgatggttctattttgtttagaatgttgccattttttaaaaatattacctgcaactaactagtgcctttgttttcaggtcaaggctcatgttaaggcacttaagacactatgcaagcggaaggcttcaagtgcaaacgagtctgattcacttgttatgaaatgggtgaaccagcttctctctaaagcttctaaaattttagaaaaatgcatctcagaaaattcagaagcaaacaaaaatggcagctatatgacacctaaaagttcaactagaaagagcagaaaagcgaagtccatggctaggtcattgtcaaaagcagttacggcagtctatacaattgggtctttggttattcattgtccgtctactgatatgagctcaatcattccacttttacatacaataatcacatcagaaaatcctgatcctaaattgaacaaaatactaggccctagggtcttcttcaagcaagcagccccttctttatatattcagtcatggttggctttgggaaagatttgtcttgcagatgggaaacttgcaaaaagatatattcctctgtttatgcaggtttgttcatcattttcagcctcattttccttctataagctcatgtggtatttctgtaaaaaaaaaaagaaaataaatttaattt

SEQ ID NO: 301077 - DNA, 2108 bp, Cannabis indica
aaaaaaaaactaaataattttttttctattctttcttttcttttccatgttgttcttcttaaaactttttttaggttctatatgttacttgattattcgtctttttcataataccaccaccattaccactcaccaccacccattaccactgacatctatctacatcgaaaccatcactatcgaccaccatgataacctatttttcacatccaatcacaccaaaataaataaaaaactaaaacaaaaattaaaatccaaaactcatatcaccaaactattaaagcaaattcctcacattattcttagctacttgttgattaataacgcatagtcaaataaatgataatataaatatttgaataataaaaatagggatatgattttgtcccgtgatgaactttcacggaatgtattttgtggtacattagatgggtcccaaagtttcattaaatgagtgtcagggtacgtttctactttttaaccctaattactcttagatcaatctcagccgtcagatcaaatgactctctcatctgacggctgtcgtacatcacggattacaatccgtgaaagtacaataacgggacaaaatcatatcccaataaaaagaataaagaactataaatgacaaaagatttatagaggcttggccctgaatcggtaatgacttattttcttttttgttatatatatatgaaatataacaagatcacatgaacctggtcaagtgagtttctggctatctttgaaagttacaagcaatttggcagcacaataactctcttgataatataaaatttggcccccaaaatagtgaatataatgcactatttatagggaaaaagatgtaacatctttacatttaattataataaaaaatatttaatatttgcttgtgtcaatcctatgaaattctcaattccccctaattctcgcaatcccacacttataggcgtcctgactgacctattcgtaataagggataaagttattgggatgaactagacattcctctctaggagtttcttgatcagatgcttcgtccatgaggcgtcttttaaattgtttggtaggatggctagcatgttccgcctatcaattgtttggtactagacgactctatctggcctatacttcgcccaacatcttctggatagtcttacatctgtccaacccctgctatacttttcatgtgtcacattattatgtgccacatcattagggtaacttttgggataatatttgcccctaagtttgtgtggcaacttcaggtcgtatggggacttctcgacttcattatttgcacggtcatgtgacgcatgtccattcctgtgtgaaccgcccttcaaagaaatatgtcaacccaaagaaaatgctctatctgtcctttcaaatatttttctttaattacttttccttgaaaaactgcaccttggtgatcatgtctgacagttacacattcttccatttggtttttaaagcaaagtgttaacccaaaaaattgatctcgatgacatggacatcaatgtttgacatgtgtcaagaaagaaaacatctcagagttgagtagtctcgagtcatagcagtcgatctggaatgggtctttagccctgcggctaggttgacttcaggaactctagaatgggtgtttggatcctgccaaattttttccaactcactatctttcagtagtctgtttcatcaagacatgaagtatccaagtccaaggccttggagctaaaaataaacgaaacaacaccatggaaatcaactcaggcacctagggtttcacctagcacccaagttgacaacccaactagggttttaattttgggactgtctcagtgcaaatgggtcaaacattgtattgtgacatgaactaaacatgtcgcgaacgtatttgaggcatcagaattaaatttgtagaacttttgttttttagcagcaggtgcctcagacacccagcacccgaattgacatattgtcaacttgggccactgttggaaatattttaccaggatctagatttactaccatgtatgtttcattaacatcctaacatgaattctaaaacaatgaaataaacaaatataaagtttaggaaacct

SEQ ID NO: 301078 - DNA, 1741 bp, Cannabis indica
taaattttattttattctatttctatgttttcattcctccataacgttgagtattttcttttaaaattatgttagatcatgtagtgcaaaaacttcaaaaagtatgctgagttaagctcttctcatagagtattttactgtacagcttcgtttacaggtgcttttaagtcatctaaactgtattgttgtacgtgttttctgttcctgcatgcaatcatgcaattacatctaattgcaatttcttaacctattttatttgttattacggttttttgcttcttacttttgatatatacacacatttgaaacaaaacaacgtgcttgtattaatgagaagaataataccaggaaagtctggaaaatcgtcatttatgaaaatagaacactgagagcacaagaaaataattactcataggtacaaaatttactccattatccgagtaaaatagagaaaggaggtgtaaccacaaaacaatccattgtctaattttatccataacttattttactaatatatttttttagttatatgcagtgttattttcatcgtacaatatcagtgtgaatctaggactaaaatgttcttaacagtaaaatcaatgaattgtctatgatgtatgcttgatcttcccttcaaattccatgttgctgattttgggtgaaattaaaattattatttttgttattaaataggcttaggaatgttgagtttgtgattttgtagtatttttgttttggcctcagtaaggttttgttttggcagaggaagcaaaatatatgagaaataaatttccttcatgtttgtttggtagttggaaaaaaacggtagtagtttgctataaatgactctagtatccttggattttaaagttgcgagtaaaaattagttaataatcttttctcacatttctaaacttcatttattttggagtcaaaatttggataggccaaacttgaagtattattcaattaaaacccttgaagtcatatttatatttatttattcttcttctctaccaaacatgaccataaatttgtaggttttacatgaggaggtgagagaacaagggggagtggtggattttttttaattttttgaaaaaaagaaagagaccacttgttttagaccctccccttttagcatgtattgaaaactattaggacttagtataggcccagtacatctcgtcccatttctttattgggcctttgcttttgtattatatatataaatctttactttgtaaaaacctaatttcagccaagtcattttcggctgttcaccttcaatatcagatgttttccctctctaaaatgtaaaatggtatcagatgttatcttcgcccagtgtgggtatctgatccaatccaatttttttttttttctctattcgatccaatccaatcagtaattggatttagaaaatcagcatccgattcaatccaattacaccttaaaatccaatccaatccaatccaactacaccttaaaatccaatccaaaccaattggattggatcggttttttaattagatatctaattacacacttaaatttcaatattaacttaaaaatatgaagaaaaatacgtaaaaactaagtatcaccctttatttaagtttaatacttcataaacataccatcgtgacaagtgtaatgtagctaaaagtttaaaataattaaaataacgacatttttaagtaataaaatagaacaagatatcatgaaaataaatacacaa

SEQ ID NO: 301079 - DNA, 1480 bp, Cannabis indica
ttaaaattaaaaaagcaaaagtgctatcaaacgctctctaaattggtcaattctaatctcgtgtataatctcaatcttaccaaactcattttgtttttgcgtatggacaatatatatattttttgaaacttatatttactatatactaattattttgcaatatatattgatcaacataattagtatttatatattttaactttatttaattatttttatattatattaatttgtttgactcatttaaataatatatataaaaataaataatattaattaattaaataatttattacaaaatatcatcagtataataaacaaaattcttaatattatatttaaattatttatcttatacaattttttttttctatttatatatatgtgaaaataaatactaatttaactataaattaataattttaacaatatatatttaatattaacatattaatttgtatcgtttttcgtgttatatgggttaaccataatccaacctagataattattgtatttgaccacaacttttaatctatgtctattttttatgatcctaatttataagaattcatatcaaatttgttcctattgtatcttgtcatcatctaattatagataaataatttgagagaaaagagatttaactttttttatcaaaagcaaattatataaatatacatagtagcaaatttatatgtatatattaattgggtacggtaacaatatgaatgagaagtacttaattatctaatttaagtgaatatttatagggaaatttgaatttctatccatattttatactcaaattaattctctaaacatatacttataactattgcaaaaataggattacttttccctaaacctctaaaccctaaaatacccctcttattattctcaaccatctctctcttcctcctttctctctcaaatcaaacccaaaattaacacataccataccggccgaatcaccacccacccacccaaatctcttcctcgtggaaccacccacgcgatccctctcttccacgccgatccctctcttcctcctcgaaccacttacgcacggcgttcaccacccacgcccatcaccacccacgccgatcaccacccacgtccatccatctacacccatctcgaccgaaccacgcacgccgatccaccacgcacggcaaaccacaaaaaccagccgaacaccaccggagacccacagccgcaccatctcgaccccgcaccatctcgactgaactaacttgcgagttgggaaaaaaattgggttgggcccgacgggtccgatgggacggcgccgatggggaccgatagggggtccgatgcttgcaagctggggggtccgacgggtccgatgggggagtccgatggatctgatgggggtccgatgcatgtgcgggttgggaaaaaatgaggtcgagttatatgagggttatttttgaatttttgataaaagtgtcatatatttttt

SEQ ID NO: 301080 - DNA, 1311 bp, Cannabis indica
ttgatgatttttaatttctagaggggttagaaaattagggtcaaatagtttaattaatgcaatttatacaattatgtaatgaaataattcatgggagaggtgtttgacgttattgcttaataattaagtgataattataggttacataatgcaatatcatgcatgctttgcttaaaaaaataatattgttttatgttttttattcacaatatacttccctttaattaataaaagtgaatccttattggatgatgtagttggtgttcctcacatatattatttcaataaccatcttatcttctcctaacaaaagccaaaataatattgaaattttttagctagggatagatatttattggtttattttacttgactttctttcttcaaaactatgtgtatataataatgggattatttcacaaatacacaacaacaacaacaaaatttgaaaaatacgatttcacagaattttaaatatttttacaatttttttcttattttatttacaaaaaatacggttttttatgttgtactcttgttaatttgttgttgattttttattatctgtatgttattttttgttgttgttttggtattatttaaatgttattttcatgttatttttatgtaattttcttattgttttcgtgttatttttataaaaaattgtaaaaatgtacaaaataaataaataaataaataaataataccttatgtaactatccaaatttataataatacaccaaacaacaaccacatttcgtattaacatagttttcaatattagttggaaaacgaaacaaaagattatggttgttctacccaaaccatatttatttatataaacatatatgatcacaacctctcaacaaacatatttcttttgttctatatgtcaatgtaaccatcataattaatttaattatagtttgcaagaatttttttaataaaatggcgtagtcttagatcattaattaattaaaacaaaagagcggattacctatagttttccttggtgaaatatatagaaccagctaaataacacctaaataatatgatttcaatttttttagaatgaatcataaaactaatgcaggctatataagtagaaggaacttccaaaaatactataaaatatatagaaagtttataaaaatattgcaacacgaaattttttacatttttaatctaccaattttacaaaaataatgtatttaaagtttcaaaattacaaaaatacaatgtttgagtaaaataaaaaaagaaaaaccaaaaaactgaaaaataatcctataacaacttaataaacaa

SEQ ID NO: 301081 - DNA, 788 bp, Cannabis indica
gagtaaataggaaactaactaaaaatataataacatagctaatatattctaatataaagaaaataacactttgtgttatatagttacattaatataacatagatatctttactaaaatatatattgttatatttttacaatttttcttacatattcttttagttacatttttatagaaaataatatcattgtcacattgcgctaacaaacaaataaaaaagcatatttttaacattaaaaggaacatcatcgcctcataacacacggtcagaaataaaataagatgttcttactaaattatgagcaaccccattagcagtttaataaataaacaaagatgtatgaggtagaatttgtaacaacatcttacaatcaccaaccaacacaccaaaataagaggacaagcaaccctcctccctgatacacaaacgatgttgaagactttgcaccaccaaaaggcaatatatctcaacaatcgttgtttgtagcggtctccgcttaattcagctcaaagcttccttatgcctaatggcttctgcaacttctggacaaacaatcccatactgacatctagtatgagcctcaactaacctccctaatgaatccttgatagcaaaagcaaaaaatgtacctctttaattccgcaaataacgcaacatcaatatttatcttagaaattttctcaatcggtagcccctactacataatatttctactaataatcagagacgatcagagacaattacattttttttttgaaaaatgcgtttataaataaaattgaagtt

SEQ ID NO: 301082 - DNA, 4822 bp, Cannabis indica
gttgttaatccaacatacttgttagtaaatctagatcctggtaaaataatatccaacagtgtgatccctgagtgttatcatcatcataggaaagaaccacttcatcttcatcttcaagattgacaattccttttattttatttgttaaaggatccatgacagcaatagcaagatcacaattaagaggatttccggtatggatgcagattagttaagatgtaatactgtaatagaggctataaactaataaaaaaccgtaaccttgggaccgaccataatggaccaaaactgccttggagcaaaaacgacaaacactctttgtcattgattatattttttaagaataggggtgagcataaaatccaaattttttttaaaaaaaattgttcaaaccgacctaccgaacatcgttggaaccgaaatcgatgaaactaaaaaattgaaaaaactgctaacggttaaaaccaccattgaacagtcagttttttttgggtaataaaccgaccgaaaaaaccgaaactgaccgttatacatatatatattaatttattaatgtttttttttgcatgtattatagttactaataatatagaaaaataatatattattttttattaatattaaagttaaaagaataagatcattagtttttgaacaattaatttgtctgtttgtagttgtaaatgtagaataatgtatttataaaataaattggatcatttttttttttaaagttcagtttggacagtttaaatcgaccaaatcgaagttcaaaatggtcggttttcgaattgcaccaatccagaccgaaaaccgaattttgaatttttatatagaaaaaaattgatcaaaccgacaatgctcaaccctatttaagaatagagaagaaagaaattaaaaaaagtaatataattaaaaatatatatttacttttacatattggtgggtgggtagtgaaatattaatttgtttctcctcatgagttttttttttttttttttgaagaaaagagctgcaagataaaacaatagaaacaacagccacgaagggaaacaccaagtgttcctcttaaccatcctcttgctgcctgatcgcttccttggctagggagtgagcttggacattgaaatggtgaggtaaatgctgcaaggaggcatcagggaaattggagatggattgcctgatctttgaaacaaggctcgagagagcagattgatccttccatgtcccattaactttggagacaaggttgaggcagtcggtgaagataaggttcgatttcagctgagaaaagaagcactaggagagaccttccaacaaagcttgaccttctgcaaaaattggagtggaggctcctgatttatgagtcattgtcgatgctaagacttgattaggacctttcttgaacacaaaacctaaaccagtggtgcaattggcttgattcagtgctgcatctacaaacaaagctgtactattatcagggatgctggaaattgatgcagatgtaaaagaagattgctgctgtcgaggatttgttgaagaagagtctgagcagttaatttgttgggcctccttatattcctgcagataatttaaaacaaattcttccacgttgttagagttataagacttctgaaacagcaaagagtttctggtgttccagatatgccagactaagtttaacaaaaagaggaagatcctcttttgctagtaagtcaaggccttgaagatagaaatcttgaatatcatttcctctatgagctgagtgaaaagtcttaaactttgaatgcttccaaacagtacaagctctgttaaaatttataagtgcatgggtggcggatttcattctgcctccacagaaatgacaaaagggatctttaaggacattcttgtaaaacaggttaagagcacaaggcaggatatgattgaaagctttccaagtaaaatgtttgatttttagtgggatgggaagagtccaaagagttttccaccaatgcttaagggcattaggatcagaaggggatggagagttgacatttgcagaagaggaagcaagatggtatgcagagttaacagtaagaatgctagattggtgatgtccctagatgagagagtcagaagaattgggatcaaggggaatttgaagattagatttggcctggtaaaggggaaggtagagctgcaactttgcaatattccaggtgttgtttgggttgatgaagaaagagacagtggaaagagaaggatcaatgggatgaagaaatgttgggtgagagatgcctggtatccagtttgaagcataaatagggatgtcatttccactaccaattttccaaacaaggctctttttaagagctgacgaccccaaaggaggcttttccaagtaaaagaggtattgtatccgttaggagcagtcaaaaaaatcagagtttttaaagtatctagctttgagaattgaatgaagaagggaatctggattagaccgaattcgccaagcctgcttggcaagaagggcttgattgtgatgggtaagagatctaaaacctaagccaccaaagaattttgaaaccgagagagcagactatttcttccagtgaattttcttagcatttgaagttgaaccccaccaaaatttagagattaggcgttggatagtctgacaaatagattttgggagctcaaaacaggacatgagaaaaaagaggatagcctgaatgactgctttgattagcgtttccttgccggcccttgaaaagaatttatcatgtcagacattcatcttagaagacacgttttggataaggtagtggaagggcgagttggtaactctgccaacacagtgggggactcccaggtatttgttgatgaaaccctcattcgcaagctgcagcgcagtcctgaatgtattttaggaatcctgggaaatgttaggagagaaaagaatgaaagatttgtcccgattaaccaattggccagttgcctgatgatagacatgtagaatatcattaatggcctcacttgactaaggtgtgacaggggtgaataacataatgtcgtcagcaaacaaaagatgggacaaagaaggagctctcttggtgagttggagaagtaaactatagtaaactcataatcgctgttgtttacttccgaatactaatctagtttggcaaagagaataacaaaggctcaaatatatttcattcccagcaaagtaaagcaaatcatatctctcttttatctcccaactcagttactttccttctttcccataacactcataataacccttcaaataccgtttctttctttctgcctcaatattttctccacaaccaaacagaccaaccgatcatcaatccaagtcaaaggtgctgttagattaccaaccagcaagcagaaccagtttctccatgtttccaaatccataaccctacgcatatcatcgtcttccttccactgcttcatggacaaagaaactgaaattctctcttgccttgccgccaaccacatctatcttgcccaattcgagcctctcagggcggtaatcctcgccctcagagaccgaaatccagagcttgctcttgccgtgctccagactattgttgctcactctggtcgttttgaaaacattctgtggtcttcctcttgtccgtctccctctctacttacgttcttggccactctcgagctcttacagttcgataatgcgtcatctgtttggagctttgattccgaggccctgcgtttgcgagccgagtttttgttgttggttcagcacttgatcgaccgggtctcggaatttatgaggaggaattttgatttggagagcattggtactaaggagggagagaatgatggtttaggtgagagttttgaagagcgagctgaattactaaacaagagtgaggataaaactgacgatttgagagcttccagcggtgaatgggagagttccgtaggtgttttggatagaatttttgagttgggagtgaagaggttgaaggtggatgaagttgtggatgctgctgctgatgctgatcatgataatcggaatcaaaatgcggccactactattattgaggaaggagatttggtgtgtttgaggaaggtgatttgggagtatgcggatgtttttgatgccctgtgcttgaatatacagaggcaaataagaggaggctgggaaggttatgacccttctgatttagcgattacaacaaggagtgaagagaatgcgactaaggacgaggacgaggacatggtggttcttggttcgatacaaaggattgttcaactggttcacttagatgctatcaaagagtgtgccaaggagggaaatgtgaatgaggctgttttgcacattcgttttcttcattttgattgtggagtggaggagtctgagtatcggtatgcctatttttcttttcttttagtacttaggttaaatcttccggaactaaaacgattgatggcctcattagctgttgcttaagtagtcttgttgtttatttcgaaacacaacctctagcttgtattacttagagaatgaatagtaatacaaacacaaagtagggaacttcaattagcaattactttaaagccctatctttggctggtaacatggaagcagcagtagccagttgagtattgagcacagatgagttatgatgtgatagaaacttagtacctctataatgtgaaatggatgggctatacttagtctatgagtttttatttaattttatctgcatctttcttcaagtagttttatgaatttccactgaaaccttcaacttcttgggaattcgattatctttttttcttt

SEQ ID NO: 301083 - DNA, 1347 bp, Cannabis indica
tgacaacactataatcattaacaaattcatatgttctggacttaaatagaactcatacattatatgtatataatcatgatattaattatgtgaaccgtgcaacataaaatgttatttttgatctttattaataagtaaatcggattacattaaaatgggttttatttatggcacaaaacccaacagaacctctgttaatggccaaaatcgtgggaagggagtgattcatgggattcaggagccaatgattgtgcaaaagtttggccctgattttgaggagagtattgatgttaataatgtgatgaatatgggtaatcaacttggtggggacacgctggagagagaagaaggggagttaactatttctgaattgaagagaaaaagattaaattcaattgggctgaatgcaatgggctccaatttagatggtatttttgaaaaagagggagaagttggcacaaaaaacttgtttggggcgggtctggattctcaggcttgccgagagccatgagtaccttgagttggaactgccgggggcttgggaaccctcgggctatacagttcttgaaggagttagttttcgaaaagaagcccaaatttatttttctttgtgaaactctttgtggtaaaaatatattagagagggttcatttgtctttgggctatgagggattatttgtggttgaggcccgtggtcatagtggtgggcttgctatgttgtggcaaaataatgaagagggtgaagtaattgatttttctgaaaagcatatcaatatgttaactaaaatatctggtatgccaagatggagaccggtggggatatatggagaggcatatagaggatatcgtgcaaacacttggaatcatattcgtattcttactgaagaaagaagttggtcctgtgtgttaattggagatttaaacaacattacctaccaaagcgataaatggggtggtcgtccgtatcctgaaaggttgattcaagggttcaaccaagttctagccgattgcaatcttgttgacttggatctccatggtcacccgtacacatgggaaagaggaagaggaacatcacactggactgaggttagacttgatagagctttagcttctatctcttgggttaatacttttttatctgccaagctttttaatcttcatgcttcgtcgtccgatcactgtccaatttttttggatccaactgtttgtaattttttcactggagttaagcattttcggtttgagaatgcttggttgagggaacccatttgctaccaacttatccatgattgttggaatgagaaaaattctctttcatttcactggagtcaaagtaatcttatttat

SEQ ID NO: 301084 - DNA, 1373 bp, Cannabis indica
gattttatttatcttgcatatattcagaattagtgataagattactctatgatcacttatgtcactcttcttgtatattgtaaatagagagcaatgaaagatcacatacaactgaaccagtgatttcacagaaaagaacagaaggaattatgagtagtctgaacaagaacagagtagtagatctttccgagaacagtagctttattagcaatgaacactgcagaactcacttggtaatgctgctgagaaagaatgttcattcacaaacactccggttctaagcagtacacattcgagtgaccgagcaactgtggcagatgaacagtttatcgattgtgagcaatctagagcagacaatttatcgtgcagggttgaaaccgcaaccacagctactgcagaaaacttggttgaagtccctgctggtgagaaagaacctgagaaggaatttggtagtgaaaaaccgggaaaggtgtcgggttcaacaacctcaatgccagactggacagatgaacaactcgatgagcttttcgagtttgatgattgacataaaggcaaggagaattgatttttcactagtttagaatagtaatagatatgtgcattggacttagaaataggtaagtttttgttgttgtaaaaactagaaagttttacataatctcattgtaaatctttcacaaaactgtgtttttgtgaaaagtggtttcagttcagttctagtcatatcattaatcaaagtggtttcagttcagttctagttccctgtcttgtgttctttttttctttgaaaacagccctagatatagctgtaaatacgtgtgtgttgtacttgtttggtctatattttgaaaaatccgcaataatatgagttgtgttgtgtcgacccataaaaagatatgaactgcgtcgtgccaatattttaaaaagtaagcttgacacagcttgtaagttcacattttcatgccttgttttactcgggtgggtccgtctttcatagataggtcagttttttttttttttatacaggctgaactcaaacttcacttttgtactatttttttttacaattaatgagttaatcatttaatcataagtattttttatagtttcaattatttttatataatttttcaacaatactttattcataatcatattattattattcacaaatttttgtaatattgtagttttcgggctaatctattcgtacttacgtttcgtgttatatcttgcctaaacttatattttttcgtgctgggtcgtgtggtgtatcttgaactcgcgttgatttcttaccggaaaaatgcctcttttattaatcaattaactaaatttgtctctaattttatatttatttgaaacatacctct

SEQ ID NO: 301085 - DNA, 2737 bp, Cannabis indica
atacttgtgagtagatctaagttcctggtaaaataatttccaacagttatcaaatacaattccacaatcatgaacattattaagtgagttaactctaaaagttaagtggtcccctttttgtaccctagcatataaggaccaaccacatcctttagccttacaaactacttgaacctttgtagggtgattgaagatgtagataaattctttatctgtggctataaaatactcctttagagcttctcttagttgagccacactagcaaactccaatccaagactaaattcaaaatttgaccattcatttgttggtataaattgctttctacttctcttaactttgctttcaccatattcatcttcactatctaagctctgcaaatcatcatcattctcatatccactatatgagttctctaaatcatcttgattgcaaaagtcatcaacacatgcccaccatttactaggtttcacttgtgtttacttcaagttctatttcatcatcttcatctaggatatactcatcttcaagaaattcaacctcctcaacagggacattgtggcccaattcatcatctgttgggcctcactttgccccaaatcagcctctgcttggacctcatttgcagcttcattgtgggccaaatcagggacattttggataacatttgaaacttggttgtgttcccaatcaaaggcactttgggactcactttgacctaccatacaaagccacaaaagatgtgataaggttcacttatatatatgtatgtgattaaaattttaaaatacaaagtaactaatttcaccaaatacaatatagtaaggttgttcaaattaatatcttcatattatttctcaattattgttaaataaaaactgtaatatattaaccaaaacatggtaatactatacttttaccactcactcaacttaatttcatgaataacatgataatttaagagagagtccaaactagctagctaaatcctttctgctattataatttgatgtatcccacttactctgaaacttttcaatgtcaaaataaaccataatcccaaaccaatgcaaagattccataaaacactgtaattgggtcagccacaaaaaatcacttttataattgacccaacaatattataatatatttttattaaaaaaataataatatagtatataaatccacgcatgtaaatacaaagccaccattcagtctattactttaaaagaaaagaaataatatcaagtgaatataaaattctatgaaatcaatccatccaatctaatacaataacatgtggtcccaaaaatatttaaccagagcagataaaaaagtcttgaaactaccgtaaaataaagaagagaaagtatggtttgggtctgaaaagtaataaaaaaaaaagaaagaaaaataagaagcttacaatatacatgagttgggtctagatcccaccaagacattatcttcttctccggcgttgtttaccggaaaaaaattgactttccaccagtaaaaacaccaaaggcagcatgtattaaggtttgtgaaatgtaatttttttttataacttgtgaaatataaacttaagggttcttacttttatttagtttatttttaagtttgattttaagatttaaatctggaaagtgaaaagcctgtgaattaaataaaaaacgtaataaaaaattatttagatatatgatattcattttaaagagaaaaaaaataaattggtgtgatcttagccttacacgtggccacctaagttgactaacaggaatttttaaatggaatgggacggaattaatgttttgtaaacattgggtagtttacccgctaaatataaacaatgggtacttgtcgcttacaaacccaaaacattaggtagttatgccgcaatttaccctaataataataaaataataataataatataaaaactttaaaataattacaaaatacttatatactaacttaaaagtatgtatgtatcctgaaaaagtaagcttacatattttttttcttgttgaacaactagataacaactaacaaaaaattagataataatccaattttttatatgaaaaattaattagacaccaaaaattatgtgaaagctcaaaataaatattgaaaaaaatatacataaaataataaaataaaataaattgtacattaccttaaagatatttataagaatttatatgagtgaaaataacaataaaaattaattcgatctaacatttttgtatgaaattaatacgatttgtttatattagacaatattttaatattgggtttaatttgtaaatattattggaaaaaaaaattaaaaaaatagtaaaagcaaagtattttttttttaaaaaaaacataagtgagtatattcacaaattatctctctcattcttttttaaataactaatataattttttcaataaaaataaaattatttaattaatattattttatgttacttttactttttcaatttttaataaataaaagataaacaaagaaaaaatagtcacaatagtttataaaaaaaataaaaaaaaaaattttaagaaaagtagccaaatggcacatccttctcacaccaggacgaaagtgagccccaacccacttaggtctccatttctcaaagaacctgtaacacctacctaacttacggcgtattacgtgatttttaacgttacttgtgtcagctcgttgctaatcaacgaggtgtt

SEQ ID NO: 301086 - DNA, 919 bp, Cannabis indica
ttcattttgtgtaccacggttttcctgcgccataagtgagactataatctattcgggggagacctgtcaagtggtctccttctccttttcaaaaaaaaaaagaacttagtatatttgatattgattgcagtagaaaagctaattacaagtgagtactcaatacattgcatatcccaattcctcccttataatttttcactcaatactaccctctcaaataaagactcatatacctttattatttactataagctagcacaccctaatcctagggcctaacaaagattaatattgtgctgctttattcttcagaggattgagcctccacttttgtttttgttttttaatctacttgcaggttttcagctgttttggccagtatttttgtctgcattttgaagctttccagctcggtacagctcccgtctacatagctttccttcggtttatgggtgatgatgttgaggcaaagagttataactacagtcttgaagtgggtggacatgggaggaagatggtatggcaggggattccaagaagcattagggacagtcaccgaaaagttcgtgacagttttgatggtctcattatccaacgaaatatggctctctccttctctgggggagaccggaaagagttgaagcttagggtgactggtagaatttggaaagaacagtaactgaaatttctcatttcatcttagttagttactagttagtaggttagaaacaagtgtttgtactagtcatgtgtttttagaattaagaagcaaactctctttgcttctccttctccatctattatgaaaatgcatgagtgaggagaaggtattccttttacatcctctctatatgttatgagtaatgatatgtgcatgcatatacataatgatatgtacatatgattactctctatatat

SEQ ID NO: 301087 - DNA, 1182 bp, Cannabis indica
aaaaaaaaatatttttttttcatccaaacacactttgacagatttttattaattctagaagttaagtcaaaccggtaattataacactttgagttagcttgactagtttcaccggtaacatttgcatctttacttaaggagatggtaattttaacactttaagttaccttgactagtttcactttcaccggtaacatttaagtgactattagctaaaattaggtaagttttaccgaactagtagctattagctaacaattcccaacaagaaagttactatagatttctagctataagtttttcaagttgcttgtcttttttttattttttttaatggaacaaatgttcttattcaagttgtttgtttcatgatagaaaatatatacaccacactacttttttgttgtagtaagagtaagaggtggagtgttcaattcgactaaggatattatcttccctaacaaaataaagatgggtgtgttcttctttctatcttactcttactttgcttttatttgaattttcatacttttgagatttgaaggttataattaaactaatcctcataaatcttttcttaatatataaacacaggcacacacgtatgataatgatgaatttttcacatgttaaactctcttttttcctcttcctttctaaaaagaaaaaagtggctaaaatgattagttccatcataatctcaatggcttgaccattattcaaacacacacaaacaaaaaagaaagagaaaatcagagaaaagtctaaagaaacaagaatataaattatacaagtaacagaaagctataaagggtgtagttatatataaatatatatattgttaatttattggatggatgagcaaaattggtcatttgtaaggccattaatggagttgaataaagagctgaaatgtgtgattgagagagcatgggatatacatggtaagctcaacagtgaaatcgaacagagtattaagctctgtaaggtttgttcagagcatggtcgcttatgcgatgtagcagatcagatcccagttgaggaaagggagagcttgattggcataagagattcattgaagcaagttgagaacacccttttgtttcaacacgtaagtaccattcattcacaaaagattcctttttaatatatatatattatatataaagtgtgtctatataa

SEQ ID NO: 301088 - DNA, 3043 bp, Cannabis indica
  modified_base (3028)..(3028): a, c, t, g, unknown or other
cttactattgttttgtttttaatgaatcaggtaagattaaaaaaaataaaaaaatcagtattaaacactactaaaaaaaacttagtaagtatacagaaaggtgtagtgtgtctttttcagtgaagatcgagtatacagaaaggtgtttgtgagtgttttatcctgtttctattctgttagtcagtatggctgcgagcagtagtaccatgagagatcttgagtccagttatgacaatattgtgttagatgaagaggaagatggaggactgttgtgtgatattgtgtcggatgttggccagactattgatgagagatggtgtctcattggaaagttcctaacttctaggatttttgatttcgatgcgatgcaacacactttggcgtctctttggcaacctggtaaaggaatgtttgtgaaagagctagacactaatcgatatgcttttcagttttaccacgagattgacattcaacgtgtgattgaaggaagcccctggaccttcaatagagcccctttgatttttgagaggttgaagaaaggagaggatcctaaagctataactctaaatagactggatatgtgggtgcagctgcatgacttgcgcccaggatttcaatctgagtttatcgctaagaatgtaggtaactacataggatcttttgtcaagactgatccgaaaaattttctgggcatatgaagggatcatttgagagttcgtgtgactgttcagatagataaacctctgaaaagaaggatgaagatgaagaaagtggatggagactggttttggtgtaatttcaaatatgaacatgttcctaccttctgctttatctgtggaatcataggacattcagaatatttttgtccccgattatttgatactccatcagagtcaattgtcaagccatgtggtctgtttatgaaggctcagccgaggaagaaatctcatctcatcggagctaagtggttgcgtacaaacacggagtcttccgttcacttcaccggtggagatacagctggcagcgatcattcaaaaaatcctgtcaacatggatggttcgagtgattcaggggatactagaatggaaaatatggaggagaatatggagctgattatggttgaccaatctaaaggtattaatgctttacttcccaaaaataaaggcattatgaatattaattcaaatttgtcatctggtggccacgtgagtgggaataatgctgttgcaaagaatacctctctcattatctcagattctaaaaggcgtagacccaatgataatgagaataatattagtgaagatgagatagatagtaccaatgggcttccaaaaaatgggctctcggtgggttctggtgtccaggcccaccaagaattatgagtgttctcagttggaattgccgcgggcttgggaacccacgggctttacaattccttaaggaccttgtggttcaaaagaagcctaactttgtgtttttgtgtgaaacgttatgtaagaaagaggctattgaaaagcttcggttgtctttgggctttgaaggggctgttgcggttgatgttcaaggtagaagtggtgggattgctctcttatggaggtttgaggatgatgttatgttgctgggattttctactaactatatcgatgttaaagtctccaatgatagtggtatatggcgtcttacgggctgctatggagagccaaatagaaatttaagtagtaaaacgtgggtaaattactcactaatcgttgcgtggctgatactctctcccttggtgtatcattggtgatatgaacaacgtcacatctcaaactgaataaaaaaggagggaatgcttatcctaattggctcattgaaggttttaatcaggctttaactgaatgtggtttgtatgatcttgacattcatggttcccagtttacttgggaaagaggcagaggaacaatcgattgggtggaagtccgtcttgaccgtgctatggttacacaatcgtggctcgacaagttcacaaatgctaaactcttcaatattgaaatttcctcatccgatcacacccctattctccttgatccttgtgtcaacaaatgggttagtattcaaaaacaatttcgttttgaaaattgttggcttcgcgaacctgtttgcattcaaattgttaaagattgttgggagtcttgtgaaactaatcacattcagcataagattagtcattgtggtgaaattcttgctaaatggggagaggactacactggtaacttcaaaaagagaattaatttctggaaaaaggaagttaaagtttggaagaaaggaagagattcagctgcagttgaaagatataagcatgccaaaaaggagctctttgaggtgtatacccaacgtgaagtctttggaagcaacgttcgaagcaactctggttaaaggagggtgatcgtaatagtaaatactttcatactgctgctactaatcgcagaaggaagaatgttattgtcaaactgaaagatgagagaggaatttataagtattgggatgatggattgtcgaacctcattacttcatattttactggattgttcagttcaaatgcaaccgattcaacggagattattcccctcattccaaccacaattaacgccaaccataatagagatcttattgctccggttacagaagaggaagttaagaatgctttgtttcaaatgcatcctgataagtctcccggccctgacggaatgacccctggattttaccaaaaatgttggcatgttgtaggaaaggatgtcatttctcaagttcaacagttctttgaatcaggtactcttcctataggtcttaatgacactaatattgtcttaattcctaaaaagaaaaatcctgataatatgagtgatttgagacccatttcccttgcaatgttctctacaagatcatttctaaggttcttgcctaacagacttaagattgtcctacctcatctcatttcggatcattcaaagcgccttcataccgtgaaggctaatcactgataacntaatgatttctatga

SEQ ID NO: 301089 - DNA, 3880 bp, Cannabis indica
cgccgttagttacttccgaaataattttgctgaaatagttgatgctaaatagtcagataagtgatagtgttgactcataagatctgatgcttttgtttaattccgcattattcagtaccatggcacagagcagacaagagagagccttccaaaaacagaaaatccagcattgcagaagggattaaatgcactcacgtcatccatcaattatattggtggcaccattgggaatgccttggaggtcagctttctcccataacattttattagtaacctaaaagtttcatatggttttttgggtagttgagttgttgcagaaattttcttgctgtaccactgtaatgtatctgctaaaccagtaggatttttgtattcccataaattgcgtctgtctgctctatacttctatgttttaatatattagcttttgcgtttacttttttggaagtatattttgaaatcctttaggatatacatgtgtctttcttgttagctaatatgagggaatatggaaataagaaatttgtttgagacgaggaaacaatgtcatatgcttctttgcaactctttcatagaagaagcaatgtaggcttgaatttctctggaagctcttctgaatgctaaaaattcttgtaatatcaaaaaaaaaaaaagaaaaggtccaagttggttttcgatgccacatatctaaattcatgctagtcaggtcacatatatttgtatctttctccaataaatcattttgtatttacatgtttttctctatgttgagaagctgcaaagcatgctaatataattacagatgttataaggctttttgtcatcccttttctatgttttccaggagggaattaccattgtggagaaccgaactgctggcattgttcaagaaactcgtaaccatataagaaaaaagtcaggcacttctgcggtgcaaaacccagcacagaactcgcaatcccagacgcaagctgacttagaacttcaattgaaggcatctcgcgacgtaaggtggcaactgtgtataactagttcatatagtaaagcatctgcatgttggtcccttgtcatgttcttttgctagaatatgagtgatttcggattgttttattcagacacagttagtatcatattaattctgacacacttactatatccatctgtattaatatacttggcacatctggtcaatgtgacgtcttgaatgattctgggtttgattggctgcagtatggaccatttagcttggtccaagaggaaataggtttgagcggaggagtttgagatctggtgttgtagaatgaggatttaccttcatcctaccctatcttatttgattagatgtcttgagtcttgagtaacgaaacagatgattgcattttggttgacactacaggttgcaatggctatggcagcaaaagcaaaacttcttcttcgagagttgaagactgttaaagctgattttgcttttgcaaaggagcgatgtgctcaactagaggaagaaaataaaatcctgcgggagaattgtgaaaggggagataacccagaagatgatgacttggtactatctctttgctttgttttaatccccttaagttcattctcttttttaattttcttttgggccagcaacactgaaggagttatggaattaatttttcattcctttggaaagtagaccatttgaaagtgatttatttagaaaattatttttttctactatgcttgaccacgctcaacatcacactagactacactaggtttttatgctgtaatggcagtatagttcagttttatgatatattttcttgggtatatgtccatcaggaatgtgttttaggttctaattgcatttcagtctcccaattgctttcactccttcacattttgaattagttgcagagtctatttggagtagatattatgtttttgtttgtgccatcacaaaatatctgctgatattttttgctggcttcagcataacaattagcattttagatttaaccaactcttattttacaagcttcatgcaatcaagctacaacatccagaaccaagaaagtttacaagcttagttgctaaacatccttacccttagcgatgtgtttggttttcagtagtgggaagtgttaaccttagtgaacatatttctcttgtgtatagatgtctctaattctgatgcttgtgtttcaatctcagatacgccttcaactcgagtctcttctggcagagaaagcaaggttggcacatgaaaactcaatttatgcacgcgaaaatcgttttctgagggaagttgtagagtaccatcaacttactatgcaggatgttgtgtacttggacgagggtactgaagaagttacagaagtttaccccatcaaggtataccttccagtctattttctgtttcccataccagcatatcacaataccagtgatagtcataaatatatctgttatgagcatataatattacctccaatagtatatgaagtgccataacctctttttctcaacactgtatacaacgcaggtaattccgggtaatgcctcgccatctcgagaaatcagaggggtctcctatagaacccaataaggttctggcttgctggctactgttgccataggataattgaagagaaattcaaatgcttcttattgaatggcaattcccatatattttatataatagttttgaggaaagtctccaactgtgtccacatattgttaaattcccatttttttcttttatggtcagtcatttctaaaaattggctgattgtgtaaaatataaatcccatcaagtcataaaatttaattcatttgactctgttacttaacttgctgtgcttaattttgtgagattattacttgggacaatatggtggagggacagcaacagcgacgaagctagaaatttatttgtcgtatctcaatatattcttttttttgcctgcaatataattttaattttaaggcataaataattttcctatcaaaaaataattgttttcttagtattttcctttgaatagaattactaaattacttttacaaatttatttatatttttgtgtgcagagtcaatacactgaggaatttttttcaaccaaaaaatcttatagtacatatcttgttaattcattttatatcgcatgtttaagacacactcagtcagagagataacaaaaatctaataaatctaataatataatctctttgagagacaccctcagattgagaattaactggaatgacaacaattttagcatcgctctttacaaaaaaaaacaaaaaatctaattgtaaacaccattttaaagtatacaaaattgccaacgcttcggtctcttcaaggaagaaaaaatcagccaaggatttagcaaaatatcttaacagaaagccatcaaaatcatgaaccaaagcctcaaaaccaatagtacttttttcacaacaaatagcagcatctacatttaactttaacaatccaacttgaggtgctatccaatgaataactcgtggggggagagaaatcttaattgtttgcttttgtgatttttgtgcctgaggccaactatcataatattgaaatgccaactcaaaatcgttgaagcattcctaattggggtgtcatgtttttctttgttacgttcagaccaaatgcacacacgccagagtaatgaaaacacaaacctgatgtggcgaaaacactgacaagagataattaaaaatgtgggatattggcagctaaaccatctgtaactttaaattttttaacacttaaccacaaaaatcgattttttgggggtaaaaccactaaactcccattctgttttgctttgtacccctctgtccaaaaatcacagttaagtgccacggtgga

SEQ ID NO: 301090 - DNA, 1800 bp, Cannabis indica
atatttagtgtaattaaatttttatgccacatatatcaaaacttatcttcattttctcatatttttgtaaatagcccaattagaaaactccatacaccaatcactattttcaagcatacacttgtaaaaaatccaaaccaatgctttctctctcaagtaaaattaagaacattcatcttcgggtgctttaaggccagtgaacctctgtggctctatcaacttctagacatgttaagttttcagctcaaattttgaaggacttatttggtaggtcgtataagaattgtattgtattaaacaataaaaaaataatatatttagataatgtattaattattaccgttagatattttattacaatgaaaaaaaatcgagatattataattctattgtaatataatacatgttgacctagatttttggtaactattaatttagtataagtaataatgatttggaaaaatatggaagaagaatttttacatggttctaatattaataaactgtagtccacaaatcacttttatttatgatgggaatgttctcttgatcagagaatattcaagttacagtataagagctcactttagtgtgtgagtgcattagtcctttttcccattacagttccaaggatttatagggaaagaagagtcaaaggagggaaaaagtacatctcctttttgtctctaagtgttatctagaatccgtagtaggagtttggtgagagaaaatttgtcccatgtgcgactgatgtgacagtgcatagccatcactatattttttttaggtaaatgggtcgtcacaatagtatgacttcgtaatgatgttaatcttgcactgaattagtcatacacagtgatctgctttggaatccatgttatgcaaataattgagtcctggagagcctctaatccaagagcttatcacttcttggacgaaaaaagtaatatgtggaccatttttcttgagatgggggactgctcccggacgtgccttacattagcgagtccgagtgcaaaatcttcgcaaggagcgttaatctccccatgagtggggccctttaacaagattgattaaaaagatgttacaacaacactaaactatatatatataagaaatgtagaagtagagattacacaatactatacaacacatatatatatcacaagagaaggatatacatatacactcactcaaaaccttgagcgtagattagtggggatcactatgacttgaacaagatattattacctttgtctaaaagcttatttccccatctctttaagcacaaaggaaattttctagatttgcgaattataagtcttagaattttctaataaagtactttttttgataaaaaatttggtcttctcaagattagcaccttagacctctttatattgtatttatgataccaccatttgaaattcgaactctcataacctcccatggatgttatggacttaatattgagtgtaaatatgagtaaaagatatataactcatgcacacaccataactcatatattattaaaaattcaaattaagatgtataacatttttttacacacttaatataggtgataattctggaggttacacatagtaagaagtaactctaccatatgtgacaaaatatttacatctcaatgtatattatcatatgttacaaattatttatttattaaacacatttaatctatatagtttattattcaaaatagtataacatacccccactagattaaatattatctcattattaacaaacttgtaactttgtaacatttatttaatcaat

SEQ ID NO: 301091 - DNA, 3970 bp, Cannabis indica
ggttaaatttgattgtttgatatgtgcatggtcaacagaacatggtgtaacttgaaactgaattgaacacttcaatcaaccaatgagagcaaatgagccaccgaagccaaaaatatgtggctaaaatttaattcgtctcattggacggacagacctcaagcctaatgaatcagcataaaatcatcccttttgcaaggctaaaatagtccttatcagttagcatgaaaatcgtcccttttcgaagactaaattgtcctagtcagttacttttaaccaacccttttcaaggctaaaatggtccctgctcagtttgcataaaaatcatctcttttcaaggcttaactatatagttttgatgggcaaaataagcagcagccagttaaagctgggccagccacttgccagttacaacatggcattaggaaaattcaaagtaaatcattataacaagttgtactaattaaaaagccacaaaaattattaaaatcaaacaaaaaatccattatcaactaattagttcctcatagaagtgtaaaatatattccaatttaaaaagacactaattaggccatgtacctcttctttacgcaataaagtgaagcaacgtccagcctgtccagctctagcagtccgacctgcccgatgaatgtaagtttttatgtatgcaggcatatcataattaatcacatttttcaccccttcaacgtccatcccacgagtcattgcatcagatgaaacaagtacttgaatctctccttcccgaaatcctttcaatgctttactgcatcacaaaatcttgtcaatgactcaacaaatactaaaatcccattagttgcatgtcattccattgtgtgggagactgcatttagaacccttcaatggttcccaaggcctttagttacaataaatcttttgcttgagatatatctattaaaatcgaggcaaattaattgctcagaaatcttagtttaaccactaacagaacatgaatacagtttaacatccaaatacaaatctttatgtacattcagggacagaaagaaagtgagagtttccaaatatggctagtctaaacgccaacttcatacataatcccactgacataacacatacctcgtattttgctctgttatctttgctatgtacaacagcaaaatgtaatataaaaatcaccatagatgatacaaatcaagtaaaattgtgtattaccttcttacagactggcgttgaagacctgaatactccttaatcttaaatggcagatcatcgaaaaaatttaataaggtgcatagacgatgagttgactccacagatgatgtaaaaacaatgcacttctctccttctaacttttgcagaagagcaaccaaatacaaaggcttgtcttttgtttcacaaatctgtgaagaataaaacatttagaattatatgataatcattcaaagaaaatgcagcacatgatcttgcttttagtagttctcgggaaatatctagacaaacaagaattatggacagaaatgcataaccattgcgtaccaatttgaatgattctaatttttcaggaaattgataacgtgttttccctgttgttaagaacaacgggtgatgtagatcgagctgagctagtttgcttggatcttgggttagagtagcagaaagaatcatcttcacaagcctcgggtaaggtttacccttaaatcccctctcgacacccctgaaacagatcggccaataatcaaaagaaggctaacaattggttgataattttaatatttagaactgacaagacaattagaagtttaaaatagagcgattctccaaaatgcctcaagaccaattgtacggttgtatatattagtctcgacatgtataaattccaaataaatcgacattaatcaaaatgcagattggtttaacatcaataaattggaaacaacatcattgaggtcacatatgaaagcttaaagttcaagctaacatttctcgtacgaccatacctatatttattatcactaatttcaaatcattcttgtctcaagctacataaacataaaacaattccactaaaactaacattttaaaaaaataacaaatgaaaaaacaaatttataaagcagacacaattggacatagaactcacgatcttctaatggtttttaatgaaccaagtgataaagggagaaaagtgggagcacgaggaaagaaaccttcatcgtatctagtcatctggagcaccgtaggcagccaagattgatatgcctccctcagtaatcgatctgtttcatcaacaacctgaaaaaaatcataaccacccaccataaaacttacaatagtaagaatagaaaaacttggtgctatataactatttgcatatggcgttttttgtctcacaatttttatcagagtgctcaatcaactttccgaataaaaaaggctattaattgacgaaaaagccttcagtcctatagaaaattaatactctaaagaaaagaatgtattgcttagaagaaactgattacatcagaaacagatgacaaaaattaatataagtcttaattgtcatgcataacagaccctcaaggctcaaaagccatcaggaggaaagaaactcagggtacactacactataaagcattaaagaaatttgtaacttaatccttacaaggtagcaaagatgctcaagcgtaaaccccttagtcgaattaatatggtccatcaaccttcctggggtggccaccaatatgtccactgaactttgcagcccaggtgaaaaatcttctggatcataacaaatgccagcctcgagcttaggcctcttgattagttcagatatctcatctgcaatggaagactgacccactgccaaaccaacagataagcccactgcaggcgcaatagcagaaaaaacctccttgacctgaaccaaaccgagaacaacaagcatttcaaaaattggctcggtttcaaaccgcatttaaaattgaatgcagtcagcttagtacattgaatgataaaagagtaaattaagttttttttcttctttcctaacaatccagcacaagttacagcatgtgacagtaaagattgttcaattctaataacgctttggattcaattaaaccgagttacaataaccatgctaacactaaccaaatgctaaaacaaattaaaagcaaaataggaagaccaaacctgcaaggccaaatcacgagtaggcaacactaccaaagctctcaaacacttgacagcgcgggtcgaaagggcttgcactattggcaaagcataagctaaagtctttccactcccagttggtgaattaacacacaagtcacgttcaaaggcaccaggtccaattgtctcttgccaaactgccacttgaactggaaagagtgaggagaatcccatgtcttgcaaagcctccattaatctaaaccaaaaacaaaaacaaaaaagaaaaaaagaactcttttttaacaaaacatcactgaaaaagaagaacttgttatctgggtattccataaattcttgaaatcaaccatgaaaactagtggttcgtgggttaatcgagttgaaatgagtataagagaaaagggtaaaaggggtacctggggtcgagacaaggaagcagagcgagtggggattgctcgaagagagtgacatcgactgggcttcgcatccatggtagtatcggcactttgctttccttcttctgctcttgggtctctgccatttctcaacgacggaaaacttcaccaaaattctcacagtgacagagctaaaccccttccgtcatgtctccctctagggttttagcctaaatgtcaataaataaaatattagaacaaaatccctaataataaataagctaattaatggggaaaataccataaaagggattttttcatatatagccttattaaggtcaaattttacatttttattactataagagaaaataaaccaaattaaaaaa

SEQ ID NO: 301092 - DNA, 3070 bp, Cannabis indica
atatttagattctctacttggagaatgctattaggttgtataaatcatttttgagtaatacaaatacttgattcatataaaaaaaaaagtgatatgtttttattttttatcactataattgtaaagactcggtcaaacttgttcaaattttttatcactaataaaatatgcaataataaaatttaattttataaataaatatatcatatattataaataatgattatgttaattcatcttgagaaaaaaaaaattaaaaaaagaatattaagaataatttttaaaaattatttaaatttatattttttttaataataaagtgtatttaaaaactaacacttttatatagatataggtaacatttctcatctttttactgctctaaaccggttctaattgtggtttataattaagtagagtgttacaaaattgatctaacggttgaatgccaaaatagtaaatgaaattgagtctagaatacatcaaacaaaacatttagtacatcaaaatgattgtgacaaaatccattcactattacttctcaagtacttaacttatatttatttgttggacattacttaataataaactctcacacatacacatagaagaagggcatcgtagcaatcgacttacttgtacgtatataaaaaatatataaaatactcttttattttattctaatacatttgtaaactgtgtgtatatatatatctcaataaagatggtactttaggaatttaattaactttaatcactgtaaaacggcgtcgttattattaattcgttctattaccagtacttcccgatctagacgaaatagacaatcttccagcattgaaagtggtcttatgatgataattctcagttccattctcactcccatcctcacccgaaatctcttccaacgatcttcctttagtttcagtcactaaaaaagtgaacaaaatcccaacatattcgtcgcagccaatatcatcatcgccctcttgattgtactcgtcgaaccattcaaagtatagctctgaatcccaaaagcacccaccatagccccagcttttcctgacgctgcgcttatcgcgtgacacgtggatctaagccgcgtcgggaaaagctcagccggcagcacgaaagtcgtgctgttgggaccgaaattagcgaagaaaaaggtcaaaccgtacaaaacggcaaacaaccatttgttgtcgttttttaaatattcgtatttgattcctataatcaacatgaaaaccgacatcatgaagaaacccactaattgtatgatgaaacgaccaagcttttcgattaagaagactgtgaaccagtaacctggaaaggttccaaccaaggcgatcacgaacatggcacgtgatgtttcgaacacctctctaagggcgttgacgtcaacgtctttgttgactaaacccatagctgggaaaatgtctttttgggttaagttttggctgtaaaaagctatgtctagtaagaaccaagttgtactcgttcctatcaaattcaatccatgtcgattccaaaactctatagagaataatttgtagttattagcagccttgagttgagccaattgagcttgatcagcttctatttcgatatccaaaacttgttccatatccatggcggcttgcttcccgtttccgacgatcaacgccgtgtaacgagctgtttccggcatcttcattcgccaatagtacgttagaagagcaggaagagctcccaacatcaatactattcgccacatgtaatcggcgttgggttgcgtggaaaacacgcgattgaattcgccaccgttgtagggcggagcatcattgtagacaaggaatattttcgaaactatcatggaaactagcccggcaaagattatcccgacgccttgcatggcgaaaaccgcggctatgaaagcgcctcgggttttcttgttggcgtattctgacatgatggtggcggagagcgggtaatctccgccaataccaaaccctaaccaaaatcggaaaaagcataggcttccgatcactccttcgggactatgaccgaacgagataccggaacaaatggcacagattaccatcatgatgagggtaattccgtaaactttcttgcggcctagtttgtcaccgagccaaccgaagacgagctgaccggatagggttccgatgagagctacaccggtgacggcgttgttaacattagtaggaagcttaccgggcttttcggaatcgggattgaaatagtaaagacggcccaagagtttggagacggctgtgatgcagaagaggtcgtatgcgtcggtgaagaagcccattccggcgatgactatggctgtgacgtggtaccattgtgtacgagcgttgtctagggcactgagtactgctatggccattttggtaaattaaatttatgggatcgtttcatggaatttgtagccatgattgtgtaggtaatatatagtacttatgaaaattgatcaggacgagttaaactaggtttaaagagaggatagaactcgggatattcttataagatacgaactatttctgattagggtttgtaatgacaatatatatacggatatatatacaagttaatactattcgcctatgtttcctatccaatctccgtgcgttataactatatatataatgtatatattgtattatattttgactacaatatcaagatagtctaggtgtatatattgtatatactcgaaaaattaaataaatatgtacggagaataaggtttttgtacaatacaattaagacaacaacatacaccctctctctccctagttaattaattcatgcatatcgatctataatgtacatgatatatttataattcaggataacctaatatgagcattggtttctacatcacaatattataagggaaatttgattttctatacttacatatacttaataattttttttaaaacacataacatttaatatttgtgggatatgacacattttagaatatccctaaaatacccccatttacattaccgcctccccactctcttcttctctctttgttataaaaaaaaaa

SEQ ID NO: 301093 - DNA, 2039 bp, Cannabis indica
taaactctataaaatttgaaaaattaaaaactcagagttataatgatctcaaaattacaatccaatttaaaatgtaacaaaactacagggaatacggaaaataaacatacatagttaagtatttttaagaattttttttaagaaaacttacgagggccagggatgaagggcagtcgagatgaattcctcactagaaattgaaaataccatgggtctggtatataataatttctcggtatcaaaaaaaatgattgttgtagataagcaagagtaggataagaaaatagaatttttttaaacttgctctaaactagctctgtaaaaacaagaatggcaaaaaagatgatagtgaggagaagacacccttatatagatgccttgtgagaaccattcaatcgtaatgatgaataatcaatggtcattaactcgcgagtcagttgaaaaacaacatttattattggtagaatctttcttgggataataaaatctctaaaaataaaacttattcaatgcgcacaatattggtggtacaattataattttaattattaaaaagttctttcacatgtagaaagtactttttaaggagtaattgttatacccatattttgagcaataaatgaatgggtctactcacatgacatgtatacaaaacatcaaacgatctccccccaaagagaatacatgaaggaagtcctctcgacaaacatcaagtatgccaggatgacaaacgaggcgaatattgcatcaataaggcttatctcaaatatcacaagatataagacataacctgagcaaataggaaggccaagcttgttgcgagatgaaatatcgttacctcaactcgcatgaagcttacatcttgaaaaagcttacttataaggaaatgaatcatttagtcaaacctcattcttgtaagcgaccagcaagaaaggctagcccatccaagttatttgaggggacatcacgattaacatgtgacaatccctcaatgtatttctcgaggaataatgaagttgctctgtaaaaacatgatgaatatccagattataaaataataattatttattgtaaattgtttgcaccaattggtagatatatgaaacgtgagaaatgtacaaatttgataactatatttcaaataaggatgagataactgctatcctaatcctataaatagtaggactcatgttgtagaaaggacgaccaattttcttataactgagagaaattctaccaagttgtattctgcaaaaagaaaatttagaaatgaaaaagactcatgaaatatgtagatttaactacaaaactacgtaaaaaaaccacttatctttattttataattaatttcttaacaatatttttacagattcatcattcttcaaaacccttatttatgttgacgaaattttgagttaacaattgttgatcttgaatgattgttgagagtgaagattgactctgaactatttcttattagtataagatctatctttatttgctttctagtttgtgttattcaatctttatattgaaaacctaatttttaattcttagttcaaatcctggaataataatttgagaatagtcttcgtgggattgacctgtatttattgttatattgaaataattggtaattttgaaagaaaaaattagtaaatttggtacgacttaagacacgcatcagtatactccctatctgtttcgacatttagaaaagtttttaattcattttttttttatcatcacgtatgttgtaattctttagaaccactttaaaatttttaaaaaagtttgaacatattacagtatcaaagtaaagtttaaatagttgtttactactaatataagaaataaaaacaaatcacatatgtaacaaaatatttatactttatttttagcattgtaagttttttgtaaattttttaaaatttaacttgaaaatttataaataacaaacacaatgatcatgaagaagaaaaaaaatagaaaaaaaaaaataaagaaaaaaaaaaaaacgaaaaaactaactacctaag

SEQ ID NO: 301094 - DNA, 2293 bp, Cannabis indica
tggtggtatgctatggcttgtgctgttttcaccattaacagacttcccacaccagttattggtaacatgagtctgtatgagtgtctttttggcactaaactagactacaatattttaaaaccttttgggtgtagctgctttccacatttgaggccatataatactcacaaactagagttgagatctcaggagtgtatatttttgggttattcttcacatcataaagggtatttgtgtgaacacccatctggcagggtctatatatctcgaaatgtcaccttcaatgaaggccatttccctgccttgtccatctcaccaactgatgcatcccaccaggtattgtccttatctcaacttccctcatttacttttcaaactaatacacctactttacatactaatcctgttgttgttcactctccaaccatacatactacaacggctaatgagggaaatgacaacacatcatcacaaggaccacctaataccactgtacaacctactttcccaccacttattaccccacggcctatacccaacattgcaccacaaaatgacaacatgacttccactacccatgctcttcctattcctagcatagacacacctaccaatgttgtccctttacccaacacaacccttaatacattaaataatactatatgcccagctttatcatccattcctgcagaaagcaattctaaccccacactacactccactgtaccaacggctacacaatgtactattccattgcaagacacactccatcatacacctattttacccattatacattctaatcttcccagtgacactcaacctacgggtaacactcctataaggactcataatatgcaaacaaggtctctaagtggcattagaaaacccaaagctttcactgcaaccaaataccctctacccgaatcccttattccctctgaaccaaagaacaccacagcagctgtcaacaacccaaggtggttccaagctatgaatcaagaatatgaagctctaaaaaaggcaggtacatggtctttggttccttattccccacacatgacagtgattggcaataaatggattcacaaggtgaaacttgatgcatttggcaatcttgatcgactgaagtcgagacttgtagctaaggggtacttacaaacaccgggaatagattatgaggatacattctctcctgttgttaaaccagccacagtgagaattattctcacaatttcagtatctcttcattggcatgtaaagcaattaaatgtttctaatgcttttctaaatggtgaactacaagaaactgtctacatgagtcaacccgaaggatttgtggatccaaccaaacctattcatgtgtgtcaacttcacagggcactatatgggttaaagcaggctcctcgtgcatggaatcaaactcttcgagacaaactactggaatggggttttagtgcatcaaaatcggacactccttgttcacctatggctcgggtaacaacactataattcttcttgtctatgtggatgaatttttagtgacaggtcctaatgtttccctcatctccaagttcatttctgatcccaacaagtccttctcactaaaggacttagggccggtccgttattttcttggtgtagaaatttatcgagatcacacaggcatgtatttgtcacagacgaagtatattactgatttactggttcgtctcaatatggaaggagttaaaccttgttctaacccaaccagttcatctattaaactctctcttactgatggggaaccatttggtgatcatacactttatagaagtacattgggtgccttacaataccttactcttacaagaccagatgtagcattcattattaataaactcagcagtttattcattctcccacaactctccattgggaagcttgcaagcggctgatgcgctatctcaaaggcaccatacatcatggtcttcatctcacacctgcttcctctctaactcttgaaggttactctgatgcggattgggcttcgtgtgttgatgatagacgaagcataggggggttatgtgatgttttttgggggtaatcttgtgtcatggtatgccaagaagcaacatgttgttgctaggtccagtagtgagagtgaattcagggccttagcaaatgttgctgctgaaatcaagtggttagtgtcacttctttctgagttacatattgcttctcctcattgtccaatactatgggttgacaatcaaagtgcagctgctattgctgcgaatcctgtattctatgc

SEQ ID NO: 301095 - DNA, 3171 bp, Cannabis indica
cttcatttttatctaaagtcgtttttttaaaaaaacatttttgagtttagtttttagctcatgagatgtatattacattaaaaaatattatgttaatatatacttaaattttaatcttatatttttataagagtttatattaataggtattaattttttttttgaaaaattttaaaataatttattgtatccaaaacaaagtttataattttacaagcgtataaaaacaaatacaataattaaattattgttatattttcaatattataaattatttagacatttaaacaaatatttaatggattagataactaaatttatgttgtaatatatgtaaatagaattataaagctaaataaaagaaactatttgatgctttctcctgtagaattacagccttccgttagaaatgctgcaaaagttcgaaaccactatggatgaactactagcaaaaactacaaaccttacagtattggatgaagatggatgggaaatcaattaggcagggggtgccgaagttgggagacactatgcgaaggcaagattttgttcaaacaggccgatgagtcatcctctgctgaagacgataccgggacgtgtttggggtatctccgaccgtgattggggtgtggagattaaacttatcactaacaattcaagtttcctggtcttttctttcaaatctgcccaagatttgtacagaattctgtttaagagtccttggttcctaaataatggtactttgattcttgaaagaatggagagtattcctcaagattgggaaaaggaactgttgcgatttccaataagtgggcgagtccttcatttacctgctcgttcgattactcaggaaaacttggttcgattggtgaatttggctggtgaggcgattgaagtgcagaacgctgatatccctagaattgtggctaaagattatttcaccttcaaagtctggtgcgacattagcaaaccgctatgtccagggcttctttttccttgtgatggcaggaaaatatggctcccattcaggtatgatctccttccctttatgtgctttaaatgtgtttttttggggcatgatactcgggtttgtgcagaaccaattaagatgtttgatgatattcttggaaactggatgccgagctatggtacttggttaaaagtggacgaaaggaaggatgccaaggctggtatgcataatggtgttcttgactcctccgtgcggttgcccaataattcggaccaaaatggggaagagcaatctttttctactatcaagattactggcttgggcaatggagatttattatcctctccatcagaacctaggaaggaggttgagtcgagttctggatcgggtattaatgttcagaaggggaatattgatagtagtgggaaagggaaggagactagtattgagatggtgacggatggggtggcagatgggcaaattaattgtaaaagaagtggatcctggagggatgacagaagggaatttaaagtttttgcagtaatggctaagaaaagtagctctcaatctcagccacaggggaaggagagtaagttttctttgactaattcctacaatttagtggaggttcccataagttatgaggctaggattgatactcaaagtcaggtggaaggctctacaaaaagaagaaaggtgactccaaagcgaattaagaacaaagggggtactggacagcccgagataaacaagttggagatggttaagacagaaggaggtaattcatcaaggggaatttctaataatttggatttgaccctagattctaagatggaagcagcgaacctagtggagctgggtcgccgagagccatgattgccttgttttggaatgtccaaggtcttgggaacccttgaacattaaatactcttaaatcccacgtcaaagaatatcatctctggatgatttatctgtctgaaactcggttaactagtgttgaaatggaaatggttcaggtgcagttgggttttgctggctgtttttggtggatgttaaaggcaaatgcgagggtttggctcttctttggtttgatgattttgaggtgcagatcaagtcttttacggtttctcacattaatgctttagttgagaacaacttggggttcgcttggcgtttcattggcttctatgggagtctggactcgggaggaagaacggaaagctgaaagttattacagcggctaaagacaatgtccaatagtgcttggatatgtggtggagactttaatgagattaaaagtcacaaagaaaaaaagggaggagggaaaaaaccagcttaccttatgagaaactttagaaaggttatctcggattgtcgattccgggaaataactacagctggggattccttcacttggtgcaatgggagagcctcaaatatggcttttgagaagcttgatagagttctgtgtaactcggaatggttgggaaaatttaagacaaataagatcactcttcttaaatggtggaattcggaccataggccggttttactggaagctgagcaaggtaataaggggagttcttttcgaaggaaatgggattctagatttcattatgaacatgcttgggccgacaatgacgaatgtctcaggatcatcaatgaagtttgggaggctaaagagaggggcaggcctttagataatcttacacaattactgtccaattgtgggaggaggctccaagagtggaatatcaaaaaaaaaaaaatgatctctttactagatccaaggagttaaaagggaaaatagattggctctcaaagtcgtccaatttgacatattggctagctcgtcaaaaacttgaaaaggatcttaattgcgtggaagagaaaagagagttgtattggaaacaaagaagccgtgcactttggttaaaacatggagatcgaaataccaatttttccacttcaaagcaaccaatagaaggaaaaagaataccatcatggggttgtatgatgatcagcttcactggagaacttcagaaaaggatattgctgccatagccattagttatttttagaatttgttttcaaaatctaatgggggaattgatgttaaagaagctcttaggggttgtatcccttgccgtattagtactgaagaaaaccgttgtttactagagcctttcacaagagaagaa

SEQ ID NO: 301096 - DNA, 6943 bp, Cannabis indica
ttacaaaaatactgtctttttatgaaataaccgtaaaacaacaaaacagaacaattaaaacaacagtagaacaactaaaaaataaccgtgaaataacagtaaaaacttgacacagtatattgtataaaaaatacacggtattttttaattaaatttcgttccacattaaaaaaacaattaaaaattttaacatgtggtgttaacatccttatatataatggtaattagttcaaacgaatgttagctgattagaagagataaaatgggagaatatatatacatatgatttgaacccttaaataaagatgaagagaaagaaaaggataattattaattatagtaatgaaacaaactagctacctagctagtactccaaacatgtggagtcttaatttgtttgcaataaatttacatctttaatatattgacaccaaatcttttcaatttcaaattcatcataaaaacatatatgttaacgttcggtagaaaataaataaaatagcaaaaaccaaaagaagaacaagatagaaattaataatggatgtgtttcttttattatatatagagcaactaattccaattataaaaatgattaatattatatacaatccaaatttattgtgtaactaattctacttggaactttattgttcagccaaaatttcgctcaaattataaaaattactaagaatatgcccttttatttacattctgtttcacagtcttgttggtatcgctcaggcttttgccgtcgattatttatatatgtagcctcggtctgtggtggctctgctcgtgttgttggtgacttatctacaattcattttgttagattttataaatatatatttgtatgtataacttgtaattgtagacgttacgttgatatttatttgtgtccgttaaatttgagatatctcaaatctaaatttttttctttctttattttttcgtttgtgcaagtgcaaaaccgacgcagatgttgtgcaaatctaattttgcaattgttgcgtcagtttgaattgacacaaacactttgtatatgtctccatcgatgcaaacgctcctaattaattttgcgtcaatagtatataagttaatttttcgaaccgatgcaataggcataaatgtcgattcaaaatcgatacagtagggactttttggtggtctctaaaaataaattattaaaccatgtatgcatcttacaaaagtgtttaaacactcaattctctagctaatgtcagttattattagttgcataaacctttgtattgcaagacaaaatgtaccaaatgggcaaatttacaatggttgctacagctcagttggaattttcaccatgcaaaaaaaaatcctggaaccaaaattcaaataaattcaaagggaaaagaagtaatatttttaccctaaaatatttattagaactacaatcataaataaataaaatcctaattaaaagtaataatcataaaattatgctcttcaccttctactttgatttcttttttataggtggagtactaatggaggtttataaatttgggtcaatttggggaagattggatatagggctgggtgttagattttgggttgggggagcccaagaacaagcaattaagagaaaatgatctaggctcagatagagacgtatgagaccttgtgcgtctaggcaaggtcggaacaaaggtgttgtgaatagatttgctgagtgaacaaaacttaatgtagacaaatgctttgggctagtaaaattagttatttattaataatttatattgatatgtacacacaaaatatacattaaagcactgtattttagtaatacataacaatattattcaattaatcccatctgaatattaagatgaaacctaccatttagaaaaataatagtcactagctagatgtaatagttttgtgtgctagtgtcattatataaaagattgtgttaaagagttcttcttaatttttgaaaataaagcgttcattgaaacataaattagaactcgtggtcgttgcaaaataagtttattggaatagacgatacaggtaagctaccaaactgtttgtgggtaaaagttcacttaaccacattatcaacagtaaaattataagttctgaaagaaagcttacagcgaaaagaataataattctcaaactcccagcaaatctccttgcgattgagagaattgatgattattttagagtcgctctccaaactgataaatttgtaatctttaagctttaccaaatcgatcgctaaacaacacaccctgcctcctctccataaagagcatcgaaaaaagtcaattagctcttttgagatgaaactatacatcttagagttctacattgtaataacgtaccacaaggctgtattgcatgcattgattgtgtatatagttcttaacagagcagagagcatatgcatgcttttgtggtccttattggtattaatcaatatgattgtttagcacaaaaatatcattattattttctctccaaccaatggaattattaattaatgtggggttcaacactccattccatattctgaataattgagcagataattcctttttgaactggtaggttttgttctgtctacttttttttttcctctctttaatatatggttgaacaacttttgctgtatatatgtgtaaattccattcaaattctactttgctaaaaagttcatcaatatccaagtaagtgatcaagttttagtggggccgctaccataaataaaagatttcgaataaaaaatattcttgatcctcgagatgagacacaaccatgcaagttttatttttatttatttatttatttattatgaaagttttatttaatttagtgatgttttttcctttgacttttttttttttctttctctctttctcaagtatattggttatatgtttttttttttttggcgaagtgtatgctggtgttacttaagtgaatttgttcaagttcaaaatcatgatcacaattgttatgttatttataatggatcatgagtcaaatttatatggtatattttaaaacaaaatttacaatataaagatatgattattataattttattacgtggatactataagaataatttttaatttgatgagccaaaatataaaataatttatgttttttggtccttaatccttaaaggtgcttgccaaatgagcattctcattcttttcttactttaattttttttttcctcttgaacacaaaatgaaatgagctcattaagagttcacttcttcctttgagagttgtaacttatattgaattgtttgaattgtggaggaagagagataagcactaaatacacaagcaagtcatctgaaaactcaagctttagtgcgttcaactttgaagcaaggtgagacattttcataatgtattttcttatattttccttgcccttgaacctcatgaaaataagtttcattaaaagagtacttgtttccgcctgatttctttttgcaaagcatttctcaatttcagcaactaaagttgtggcatcggtgatctcctcggacaccgcacccctaaaagcttcaagtattccacgcttaatgatcatatataagactcatgcggtttgaacggtcccacttctcataaatcctccttcgcttggaggtattgacatccataagagaagcaggtcgatccatccttaatgcaaggtcaagtccatgcaaccaagaacaatgaaaatatttgaagagaacaagagattacatgctcacatataggatgtcagatcactttgaaatcattgaatattcttattccaactttgcagcatgccaagatagtaggagatctacttcgggctacatatatctattaggtggtggagctatatcatggagaagtggaaaacaaacactcatagcttcatccaccatggcatcagaatttattgcatgttatgaggcatccaaccatagtatatggttgaggaactttgtcactgggttgcgcattgtagatgtaattaaaagaccacttaagttttattgtgataataaattagctgtattgtatttcaataacaataggagcttgacaaagtcaaaatatattgacatcaagttctttgttgtaaaagaaaaggtatagagttgacagatttgtatggaataggtacaaattccatgattgcagaccctcttactaaggatttgtcacccaagatcttttatgagcacactgctcatatagatgttttagagtataatgatatctagattcagtgagagtttatctttcttatcctttgtatttttatttgtttcatgaagcttgtgtgtttgaatatttttttatcagaaattatgttattcaatttatttcactttgtacattaagctaaagttttgatctccacaaagtaaagcaggaccaaatgaaaattaacatgaatatatcaccatgcatgtaattttcataccatattgtcatgattgatctatgtcatttgactatgtcgatgtatgtgaccattgatgagtagttgtgattgatgttcggcaaattttgatacgcaagtatacgtaatcgaaacaagtaatataatgataaataaagatcgttcctaggaagattgattatcacgtaccaatcaattaattatttggttctatttgatgaataataatttttggatgaaaagtaaataaataaacaataataataatgaaaatgaaaattttaaaaaataacaataataaaaataatgattattatgatcttcaactatcttttattttacttcatagtgtaattacttaatttttcttcttcctattcaattgataagttgagttaagaagtttataatctggttaagacttataaattcaatctatgtgaaaacttcctatatttctaaagtaagtttaatcacacaaataatattaaatatagcaactaattaataaaattatacaaacaacctaggtactttcgttttaaatcaatttgcatctatatcaatcaaaacatattcaaatatcaccttttagacttttgacttgaattcataaaacaattatagatgaccagtaaataattgtaaaagtaaaaataattaaatagaaattgaataaagagaagaagtagaaattacatcatcacattaatctataaaataatctcaagtggttcacataataatccttaaaagaacttagctactaaaagacattctaaaataaaaaaaattcaatgaaaaacataaaagatagagatgaaagagaaataacattgtttggagtcctccactagtgccttctgctccttactctccttctacactcagaatcctctcaattttcgtatggtaacaaagatttgccatcaaccccctttaaatagagccaaaaattgaagtttcccatttttttactactaaggccacggcctttcttgcaaggccgcgaccttacaagcgatttctccttttattcgaagtttttcgtttttattttctgctgcaacgactgatagtattttagtcataactctctcaatataactcggaattagatgattcaagatgttttggaaagataaaagagagatctagaacttttacttaatttttttttcctaaaagtgaatggatcacagtcaaaaattagcttaaagtttcaagtttattttctattacaaacggaggatgttaaatattaaaacttagaaatttcaatttatttttggaaagtgatcactattgactattaaccacaaactaaagggctgaaaatgcaatctttaatctattttgagaaatagtaaattactccaagctaaaaaaagttttcttccttcattatattttctcatttttgcttaaaaaggcttgcagaacaccaaaattaccaaaattaaagatctccaaatatttttctaaaaaataaataaaaacaaaaactaaacataattctgcacgataaaataataaaaatactaaaatactctctaaattagactataaaaattgcataaaaataatcctaacaattgatacaatgaaaatcgttttgatcatatgttgatatagttaatggatgaggttgcacatgtctacggttatgatgacaaagatatgagctcaataagattaacacatttatatgtatacatatgtggccattaagagattgttaaaaatttatttagggccacaattgtatatataaatatgcattgagttatcatatatgtttactaagatgttcaaaaactaattaaatgaaagctttagaaattaaataactattaagtaaatgagaagaatgattttaggtagtttggacatcaattatttctagtccacaagtaagaaaaatccaactaagcttttaaaagtttcatttcttccttatatttttctatttttactcaaaaaagcttgcagaatcaccaaaattatcaaaaacggagatcttcaaatagtttctctagaagacaaatataagtaaaaactaaacataaatttgcacgataaagtaataaaaatactaaaacacacactaaaataaactctaaaattgcataaaaataaacctaacaagaatattcatacatgtgtgtacataaaaaaatagataaatttgttatcatgttatttgtcttcttctcaagatacaccaatgataaatttttatttatttagaatattaattaattttcttatttttattaatttggttaataaattttatttaattaattttttatttttatttaaaatatacattagaatttatatgttatttgatataaatttaaattgaaaaaaaaataatatgatttgataatcaattacatgattttatttaggtctgtaatttcaataattgtgttaatattaacatttaaagttatacaattaattatgcaattattatatttattt

SEQ ID NO: 301097 - DNA, 2054 bp, Cannabis indica
agaagaagaagaagaagagagactctgtattttaagagcagagaaaaccgaaactgtgagcgataataaaatatagagagagaaaacaaaaaaaatagttagagatttcagagctttctctctcttattatctctgtagttaacctctaaacagtccaaattttcactcacaagaagaagaagaagaggagaagagagtctcgttaccagaaagcaatgcctgcaattcccattacccaatgtcccttcttctcttcacggattttgacgtttcttctcacgcattaacatatataaatatatttttatacactgaaaaacttgaacgagaaaaagacgacctttcatgttaaggtgagaatctcattttcatttacgagttttttttttctgcattgggagtttgtcgctttgggttttctaaatttggggttattttcgcctgacatgaagattccggcggagaaacagaggtttccggtggtttcagttgtgatttaaatgattggtttgtattggatattgaagtgaaaagtgaaaagagaaaagagaatagacatattttcttgctattgaaatggtaaaagcaaacaatgtgtttatttatttatttcttcttttcttttcttttttccggcgttgaaaaagttcagtcaagaagcgtaaaggagaatattggagatttagttatctaattttagtattattattttttcttcttttgttgcagctgagttatgctttatggagtattacctgtgtcaaagtcgagatcttgaatcctaatgcagtttccggaagaaaaatctgatgacagagtgtttgatccgcttgaaacaatgaacaaatttatgggttttgaccgaatttgctaattcataatcagagaatgcagatttgggctgaattgtgaataaaacaaacttaaagtaagctgagtttttctgtcgatttagaggcgaactacaatggcgacgtgggaacattttggggagattgcgaatgtagcccaactggccggcttcgatgccgtccggttgattgccatgatcgtcaaagctgcgagcacagctcgaatgcacaagaagaattgcaggcagtttgctcagcatattaagttgattggtaacttgcttgaacagctcaagatctcggagctgaagaggtacccagaaacaagggaacccttagaacagcttgaggatgctctcagaaggtcttacattttggtcaatagctgtcaggaccggagctacctttatttgctcgctatgggttggaacattgtttatcagttcaggaaggctcagaacgaaatcgatagatacttgcgccttgttcctctaattaccctcgttgataatgctcgagtgagggtattgattcttattcctcatcttgatttattattattattattattattgattattattttattatgtattaatactattctgggttatttctttagtctttctttttttttgttatattatgggtatgaaagaagctttgttgaaagatcatcttcttgatgtcagtcgaaaaaagggaaatctttaaactaaaaaaaaacccacgagtcggaatcttaaacaaacttgggtaatttacgatttgggttctagctggaagtggaatctactcaatcctttagttggaatgtttattctaactattgaagtgataaagacagttacttttaatttctggacctctaatctactccagagtctagactatagtttgaatacgaaacatgcaactgacaaagatgtctcatttgtggtgatggatctggcattttgttctcttgttagtagaacctaggagttctctggtttagttggtgtgaactagaattgaatttgaatattcatcttttgttgaccgatatgagttagaataacccagattgggcactagacggatttgtagtttctggcttgtaggaaacatatatgcgtttagggtgatcaaatgatatgagctgagggtagtcagctccattgtatggcacatagtgcattgggggatttttcgttcagaat

SEQ ID NO: 301098 - DNA, 1149 bp, Cannabis indica
ctctttgcagttataatgaaatcaatcttagactaactaacagtctaaaccttcacatgaaaccaaaaacattatttggattgtggtttggtatatttttataccagttacttagcagatgtgcacagttcagtcactacccatgtgggaaaagaataaaaaaatcttttatggtgagcattgtaagatgttagttacctttctacaggaaaaactactatagagagggagattttgtatatccacaatttgatgctgttgaagcctataggaggtccatgaagacttgggctaagtggatcgataaaaatgtgaagccggagaagcaaatggtcttctaccgagggtactctactgctcatttcaggtaagttattgccaattaacttcagataaccttgattcatgcattctatgtaataaagcatgctatgaataatttttcttcaattttatacatcaattaaacaaaataaagaaaaggatacaatctgttaattgattagttaagaaaaaatgattgcagaggcggagattgggattcaggagggtcctgtaatggtgaaacaaagcctgcttttagtggagctattcttgaaaactatcctttgaaaatgaaaattaccgaggaagtgatcaaagacatccgtgtacccgtaaaactactaaacgttacaagcttgacaaacttccgtaaggatggccatccgtcaatttatggcaagaattcaactgcaggcaagaaggtttcaagaagaaagcaagactgcagccattggtgtctaccaggtgtccctgatgcgtggaatgaacttatttatgcctccctagtttttcaccagacaaattcagttagtaatacttgagaagattctgtcttttatgtatttaattcattacgtgcttatgtttcttcaaaagaatcactacttgttcgtggagtttcaagcatgtatgtatttgatggtagggtgtgtttagaaagttaatagggaattagaattgggtgtaattaaaggtaattacacatttttgtgtatttgtctaatcatatactataaccatttaagtaggataatttacaaaaaagactagattttgacctaatttttacaaaaatactaccacacggtaaaagtaacttttata

SEQ ID NO: 301099 - DNA, 1701 bp, Cannabis indica
aaatattaattttaaaaaaattaaaccataaaattttaatttaatgacaaataataataaagaaattcaaatttatattacaatgactaaaacaaatgtgaaatataaaatacacatgtatacaaatttaaattaatgaaagaaaaataataacaatggggagttgcccctctggcaccatataagtccgctaatatatttgtacatattggtgataagtatagaaagatcagctggaaaaaaaaaattatgcccttttatgtttggccgataatattttaaaactatatcttatacattagttatatttaaaattgttagtttttttttcattgattagacataatttaagaattatttgtttttattttttgagcatgacatattcgaaaataatgtataattgttttgcaaccttttagctaagatatggagtaatttggtatatatattttttatgaattatgttatatactattttttttaaaaaaatttatagtttaagttgcttcattgtggttgttttgattaatttttttgtcggttgctatataaattttaattgtgatttaaattgttttattaatttttatgtgaaattccgtaaaaatattaaaaagaaaatactttaaagtgtaaaaaaaaattctataaaagaaaaagagttgcgaggaattaaaaaatttaagaaaatacattatccacccattccaatatagataataaattttgtgaaagaatatatatgtttcataggagccttaatgtgcaaaaaattaagaattgagcaaaattaaaaacaatgatcataagtcagtagtagttttatatctctcctcagaaagatgagatcccaaattagaattattcttttctcaataaaaaaatggagctttttttcatttttacacttcaaaataatttttctttgcatttttacgaaattttacatagaaactcctattgtaactagcgctgcaatctaaattgcaactagcgctgcaatctaaattgcaacaaaaaatcgtatagaaattcctattgcaactagcactgcaaccactttggaaactcaaaccgtaaatttaaaaaaaatagtatttataggataatttccataaaaaaaaaacagaataaaaagaaatattatatataatctaagagattaattaagatttttttttttttttcctgcagttaaaatgaatttaattaatcgggtggtagtggtactgtattatgttgacatgaaaagcgataaaaagaaattaagactctaattaattatttaatgaatttgacatgggagaaaagagtttataaaaacaatctttatttaggtgtcaaaaaactttcccataaataaagtctccaatagccaaataaaataagaaaaaattaaattgatgattacatattaaagaaaagaaaagaaaagaggtattgtcaatcagtgattgcactatataaatatatatcataatcagaacatattccctcttcactgtcgccggccgccataccaaaacccaaaccccctaacaaataaaagtctatctatgtatctatctttatgtactactactgccccacatataatatctttatatattaaaagtgcctatctaacggtaattcttggtttaacagaatatactcaagaatattctgttaaatttaacgattaggtttgatctcccg

SEQ ID NO: 301100 - DNA, 1913 bp, Cannabis indica
gagcttttattttacttagttatagaagctttgagtcatgttggttggaataatgctatgagtaatgaacatgtagctcttgttaaaaacatgacatggaatttggtgcctagatctcacagttgaatgtaacaaatggatttttaaaataaaaaggaacttaaatggctcttttcagcgctacaaagctagatttgtagtcaaaagtttcaaccaaagactgggtttagattttggtaaaactttcagccctctaattaaagcattaacagtgagaattattttcaccatagctatatatagaaaaggcatggaaagtaaggtaatgttttgtataaagttgcgactaaactaatatgctctaggtagagaaacattttacttgatattattactcaaaaccaaagtggttttgttcaaggtaggtacatttttgatactattatggtctgtcaagacttggtcaaacattatgggagaaaaaaattcaaaattgagttgtatgataaagtcttatttgagataagcatatgacacactagattgagattttattgaagagatgctaacaacttttaattttctagacaacttcatcaaactaattatggtatgcattaaaacctcctgatttagcttgatgatcaatgacaatatgacaggcctttttgacgtaagaagaaggctcagacaaggtgatcctatgtctcctcttctcttctatttgttcttgggatggaatatgtttcccaaataatgataaaagttgggcacttggaggattttaagttttatgatagatttacagggatgaaagtaaaccatctttgttttactgacaatttgttattattttatcatggggactttaaattaatttattttatgcttcaagggcttacgcgacctaatgaatctaaatatgcatctattgttgtggaatgagtgatcaagaaattcaaacgtttgtagatatatttggatttcaaagtactatgccttttaggtacctgggaatctcatttgtgctataaagaattctcagcaactgaatgtgaactattggggaaaaaatagtaaaaataataagtacatggagctcaataaacctctcttttttaggtaaggttgtattagttcactttgttttacattccatacattcttattggtctcaaattatgcttctttcaaaaacaattttgcaaaataaataaataaataaactcaatttccaagaactttttctgaaaggatgtagttgaactaattatctaggttatcatgtttgtgaagatgcttggaaactaaagaaagaaaggagcttgggatttaggaatatacaaaaacatcgaatattgttgctatcgacaagtatgtatgggctatagtgatgaagcaagataatatttggatgaaatgggtacatgtggggaatgaagattaatggtgggcttatgtagcattagtacaaagcaattggtattggagaatggttgtagcagtaaaagatcagcaaaagaaccacatacactttttaactttcatagttcgaaagtatagtattatttaacagtataaatgggtaaaattgtgtcaaaaataaagtgcaatggcaagaggaagttttgaacataaataacattcacaaacatcgctttgagctatggttgattgtgctagatagactacaaacaaagacccaacttaacaagttcaatatctttcaagatactaactacattctttgtggatccattaaaaaaaatcttacttttagtcacaacaaaatttgtgattacaagtgaacaagttgtgacaaattataaattatcgttcctacattgtgactaaaagattcgtagctaaaagtattagtcaaaaaattaaatgtatttttagtcacaatactt

SEQ ID NO: 301101 - DNA, 2134 bp, Cannabis indica
aaattaattaaatatttaaaataaaaaatatattttaaaataatgagatttaattataagacattcgatcttcattgttggttggttgttgcttttaatgggacctcaagacgctagacatggtcccccaacgggtaatcatctgttaggcaatctaaacccgtaagatttcaaaagataagtaatttatgatgttaaattctaagagctccattcctttgaatgactacgtagattgggttatatatatgaatcaatagtagaagctcataaaatatgaataatcttgactcttgcttaattaccggaataatgttattcttatcgaataaaagattgctaaaatatattcattttagataagttgactactctatttaactaatgtatctttgattctcatttactagagacattgtatagcatttggtccaaaactttggaaattatttgagatatgtttgttctgtattttttcatatcttcattgattgctaaatgtttaaaaaaaattcgcaatgtgtatgaatttatagtgaaccatcattgacttctgttatatattaattatatagtatcaatttcgaactccattgctggtctaacttaattgattgttttttatgggattcatccccaatagatggtcatccattagacattctaaaagtgttagatctcgacaaataagtgtttgtaaatgcaaaatctagtcgactcatccccaatagatgacaacttagactagcgtttataatgttgaaataatggagaacttataaaataaggataactttaactctcacctaatcgggacatcgttggattcttattttaatcggaatttatctttatatttcctcttagcttttccattaagaaattgctaaagatagtatatcattggacaagaaagtttataaaacatctgcttacgatgtcacactattttcttccaaaataatgaatggacttagacctggaccccggacctagaccccgaactcggatcctggactcgaaccccggcccggccctgaacacttgaacccagaccccgaacccgcggttcgggttcaggtcccagtacttcaggtctggggtttggggattcaagttcgagttcggagtccaggtcctgtttcgtgtttgagtccgaggcatgtttcgggtctggagtctgggttcggattcggatccgagtcgagatctttatttcgggtccgagtccaggttgtggtcggggttaggatcgaatttattgtaaagaatttataattttacacaacctataagtacaagtaaatattaaatataatattttattaaataatactaatataatacaccacactactatacaatacaatataatgcaatacactacaatatatcacgatgtattaaatgagcccttaattatatactttattttcacagtactaaaacactagctagttagttgacaataaaatttcaatttttgtgactaatatttttagtcacataacatatgcataattgcacctagtgacatcattccacattctataaaatatataaaggtaaatttaactttcttgctaaacttatttattattgtaattgtgttgagaattggaatcatgcatgcatgttggttaccttcacttcattatattaatctacaaagccaaaggcatcatcatgattaggaagacttctcttttagtagctacctagctctctcaaccgcaaaaactttaattttttctacaatccacgtaagtactatgtatatacatatatataaattccttgtcctttaaatcatcatcatcatctcatctaaattattattaaactaatgatcaagaaacaatatgcaccgactcttcttcatatttattaatatactctaatcttttactaaaaacactaaagtatgctatgaattaatcaaatcattattatgttagtcacatgtgttcaatgagaagtacctctttaaccaaatctcatgacctcattaccattatcttaaagcttaccttaaaactttcataaattaataatcctttttctatcagtgtgtagtattcataagatacttatattttatattttcatatagaaatggagggtataatttact

SEQ ID NO: 301102 - DNA, 2772 bp, Cannabis indica
agtaattatattatatatatatatatagagagagagagagaggtaggtagctagggcaggaccaccacaacgttgttcgtatagaaatcccatgcgcatactacaaaaatcacttccccaacgttaaataaaaattagtttaaattaaaataataaagagagaaaggaacaatatgggtcctcatcgacacgtatatcatatataaatagcctatatagaagacaatatataaaaataatatatataatgagaaaaagaaaacagttagggacaaatgccaagacaattgcctcgaagtgattgtgttagggatcttgttccctttcccttttcaaatattagcttaggctccgtagtgactattttaccaccccataatcatatattacataataactaatattttctaatttatatataattaagcacaaccaagattgtagggccgatttggaacaacaactccttgcacttgcttatgcatgtctcttctaggatacctacatgggagattggggtgaactcaacgaagagattgtcaacaattttcattttttaaaatataacacattttattcaaacatggtctttgaggtctttgagttgatgataaaaattaggctggatatccgatccaatttaatttttttttctagtttaatctaattcaatcaattagtaattagatttggaaaaacatcattcgatccaattcaattagtcctctaaattcaatccaattactaataattggattgtatcgattttttaattgaatattcaattacataccaaatttttaatattaactttaaaatatgaagaaaaaaatatgtaaaagttaaatatcactctttatttaagtttaatactctatatataaagatatcatccttacaagtttaatataaaatttaaaataattaagacaacactgtcaagtaataaaatagaacaaaatatgaaaataaatacacaaagttatgaattaaaaaaaaccgctaacaacatgtatatatattttttaatattgttattatatataaataaatataaataattgtttaaatatatagaaacgtaattgaattggatctatatttaattgaattttgatattgatattcactataatcgatccaattcaactaaaatttaacttttaatatcaaatccaatgatctaattataaatgaaaatccaattttttataataaaattaaattagatcaattagttcaattaaattaaattagatgttgtccatcctaataaaaacaacctaatctaaatattaatcaagtatagctaggcaaacatatgttaacaataatgttgctgatttgtcttccacaatgggaatcgaccacttataacatagttgctaattaagagcgatatatttgtgattttaaaaagtaactagctaagacagttgggaaataataataataataataataataataataataataataataataataattaggatttttgtcctctaaaccttaatatgtactaaatcatgttttctaaatttttatggccgttaaaagttccccctaaactattaagattgttagatttaaggacttttgtctaatttcatttaattttactatttcagtgattgtttatgtactaaaccatacttttcagactttgaaatctatcaaatcacgccccttgaatcttgacatatattaaatcaaattccttgaactttcatcaatgttagactttcaccaaagcataatttaatacatgttaaagatggagggagaaaaatcttaattagcttaataataataaaaaaaagaaagtaggatttgggaaagttgactgaccccatttgggtctttctcgctcgaaaaaagttaaaaagggtaggagagaactctacaattatttatttatttattttggtaaagagagaactctactattattactattttatatggagctagatatttgggagtagttcaaatgccactttcacaatagtttaatttgttggtcgtgaattaattatacatactaattttaatttgcaacaaattaaattaaaaatttatatatcatatatgggtgcatggtatccttataataagtgttatatgaataaaaaaatgcaaaggtggccggtcatgatgacttgctctataatggactggacgtagatttttggcatcgagaccttaaattgaccatccggcaaaaactgaattttctgggccaacaagcaatattattaaattctaaaattatttttatattagtttttgctagaattatttttatatattattattaggacttgataatattatgaaacccaaccttaaacagacccttgttcccctcttgcatgtttattgggtcggtgacatgcaaaatgacctaatatgacctgtaaaaataaataaaacacactccaaatatatatttatatatattccttaattatactgattaattaattaattaattttaattactatatctatagcagtagcatgtagctcgaccgaaaatattacgtgcgtgcttgtcgattttgattgttgttaattgtgaactaacatacatatcttattaattattatcttaagagtatttcatcaaaattaaaattattatatatatatatatatatcaatgtccaatcgcgcgcatatagatgttaatatatgacaacatatttacacatatattatatttggatcctgtagtactactcaggtctcaggtatattatatat

SEQ ID NO: 301103 - DNA, 1285 bp, Cannabis indica
tatatatttaatatttataataaataagaatccattattggattttttttttctgaacaaaagccattattggattgattgattagtaatgtatattttttacttaatgattaccattgatcgaaaatatttcatccacctgggttaattctaattccccagctatatataatcatatttaataattatcatatataacagaaacttatcacgtgaattataagctatttgcagacgatacatgaataataaaaccttattattatgataatgatgtttaattaacttatgattgcgtatatactttatatatatatatttttggggaggagggttatacaaacaaagctatgtatattgtttaataaaaaaactttggaaacacatgatgcagtctctggtcctcatcatcatcgatctattctcttttctttttttttctcttggttacatatataaataaataaatatatatatgtatgaaaagtcagcaaaccaaactctgaaaaaatcaaagattttattcttacgaaagataaaaggagacgtttcaatgccaaccatgaaagaaggtcatcaagtcagaagaagaagaccaaaagctagaaggctgacatacatgcatgcatgactccatatatatatatatatatggaggaccactttagatattgtagcccagaagatctctctctgcttataactttttttcatttttctgggtcattactataaacactaccgagcaggaatcatatcctaataatttattaaatattatcatatgtcaatttgcaaattgttctgtgctcttataacatatacaagctgagcaaaaatataaaagtagtgagtgtgagtgtgagtgtatatatggctagagggatcaatgaagagaatttaaatatatattatgatgtcaaatcataatcattcggcggcaatgagataattatggcttcatgaagtcgtacgatgtacactacacacacccatatatatcgatctgtaaattaatttacatgaggggggtatcgcatccctagataaaattttaataaagttgatcgattttgctaggtggggtctcactgtctctacaaggatgtccaaaaagagaattaataatggaaaaaaggttgtggacataacccgttgtgtactattgtcaacaattaaaaagtgtttatagcagagaaaagaaatatgagaaaagcgctctctattgattagtttaggtgttgcactttgaatttgattctaattaatccaaaaaaaaaaaaaa

SEQ ID NO: 301104 - DNA, 2394 bp, Cannabis indica
atggggcgggggcgggaataatactatcgcaccatatccgaccccaatataaatatatatatatttttttgtttttttttttcaaactttgacacatatttagtttttattttctattaagttatgctttttttaagtaggtttattttttatcttctatgaattatgaatgcataataaatatttgtgagaatattggtttaacttattttttttcaattattttaaattaatttgttttttcattttaccttaatggatacccgatgagttccctataaccgatgggtattcccctaccccgaatccgttggttattagacggagatggagcggggacggcggtataaatacgtagcgggaatgggagcggaaattgcattccccatacattaatcgaccaatttccatctctaactccaccccttttgtatatgaatatattatgatgatatttatgctttttgctaagtttttttttttggctcaattgttctgtagtgtaggtaaggataggacttaggttgttggaaaaggtaataatatctatcaccaatggttactcctacactcaattatcaaacaacaaaatttatattgtgagtgtgattaaatctatcaaaaaaaatcaaacgacaaaaatcacaatatttaatacaaaaatcaaatcttatagaaattgtaaaaatgttcttgtttttcttcttttgatatgagaaaccgtcaaaatgtcgtttctatattcccaaatcaaacgacattacaatgagcacgtcttttcgacttgatacggcgtcgtattatgtgtaatgagtgagcacgttggtctgagtcaaagaaagagcttgagaatatggtatacagatccgaaggtgagaagagagagatgagtttaacaaggcttcggcaagaagaagaaaaagaagcttctctgcttttcaattatcttcctcatgaacaatctttctgggtctcttcctagaaccgttttcagagctaaagcgagaatgggttcagttccggtgattcgctttcccatcatcttcttcatcagacttttcggaatcattgtcgccgctctgctttttacctggacaaaccattttagaggaggcttggctctcatctctgataacaaagatctcatttttaatgtatcccatctctctctctctctctttcgtttttgttttgtgattctcattatgatccttacttttgttttttgaattcaaatgctgctattctgaatcttctttctctcatggttaatgggtttagcttcttattcttttggacttttgatttgggtgaatttatcgtttactaattgagatcaccgttggttccattgttacttctgattctttatttcaacttagtctttgagttaatcatatgattatatgttttttttattctttgtatagagagctaatgaaaatgttttccttacacctaaagttgtaacgaattcagtttgtagagattatggtatcatgtatcaattggattcatgttattaattcgggctttttatcgatcttgagccatttcttgggatatttcattgcttctatggcattagataaaacttatagacttggaaaaagaaattggtatgtcagatatttctttctttctggaatatgtcttttattttgtttcagcatctgaagcacgcccatgaacattgattatcttggttttagcattttatgttttttttttttaacttggcattcttgtctcgtatgcaggttcatcctgtgttgatggtacttggtcttgtactactaaatggagaaggtaaacgcttttccccttttgcaaattcacttctatttaaaattcattgtttgaacttcataagaaaagattttgttaaaagaggagtttgtgcttgttaatttttgtacttcaatgtgctagaatcttgccaactccttaatatggcatttttgaatttgatggagttcaattttcccttagaactgaagttgttttatcgttctccattttgaaatgatgaaagttgattaatatcattctcaattcgatgataaccacttaagttcacaagaattttctctataggactgcataactgaattctagaacacgggctggtgaattcagattcgtttttaatttcttgaactaaatgactgttgtggattggtgcagccatgttagtgtacaagactgtatctggaacaaaaagcttcaaaaaattagttcatcttggactacagtttcttgctttttgtttcagcattattggtgtatgggctgctttgaaatttcacaatgacaagggcattgacaacttttacagcctacattcctggttaggcctagcttgcctatttttattcaccctccaggtaactt

SEQ ID NO: 301105 - DNA, 1727 bp, Cannabis indica
aaattacaaaattatttttttaaaaaaataataaataatgagcacgacccatgtggtgcctactgctatggctggcaattttaaagatttcaagtaggcactacacctgtggtgccatttgttcaggcagttggcatgatgttatttgtggcaccagtttttatgttttggcacgactaaaatggcacgacaaatcgtgccaatataatgatgggcactaaaaaataagtttgttggcactaatttaatcgtaccaatacccttttattcttgtagtgaatgctcactagtgactcaccattaaagcactccatcacaattcggtccgacgataacttagctttcatttcagcttcaaacggtctagcgttgaaattcaaacaagtaactaaagcaaactccaatcgactaaatctacatattttctttccaatatgaaagtggactttctatgattttttagtgctaaaattgtgcaacattagttgatggatcaatgcacccaagaattttaatggctccaccataaagaactgtttgaaaggggattccttcaccctctctattaacttttgtgccataaatttctcttttatctttcctacgtactagttcccactccaagtgacacgtccagtaaaataatcgtgtactggaactatcaaccgtggactctttaaattctcaataaaaattttttaaaaattaagttatggattttgccaactattataccgctatctgacgacaaccttaccctattgggtatctcaaaaacaataaaacctggaaaaaatttaacaccattaggcacacaatcgtaccccatcgtatcttattgggtaacacaaataataaaaattggaaaattgttatgatcctattgggtacacactcttaccccattgtaccctattgggaaacacattgaacattaaaaatggatacttcttttaatgatttgggcaaactatcaaattgtatcataccactatcaggtactcatcttcaacctcaaactctaattattaacattggactatcgagcatctatataacctatatcgtactctatcgggaaaagcaggaaaataaaagaaaaaattatagatttaacgattgtttatcgagattttcaaaaactactaaatccaagcttaagaaaggaataaaacagtaaataatagacaattgatttttacgtggtttgtgcgttaatgatccctagtccacgagttagttgtattggccctttaggcaagtgtttgaataatacaagtgtttataatataaaccctacctttgcactcctttcgtttcccttgatcaagaagaaagctagtaggaattttagcagatgttcgactagtacaaattttctcaccccctttgcacatgaaaaatgagggtatttaaagacttaaatgtgggcaagggcattccctttacccacttagggcttcgtactcaacatgctgcaagggctatcactacaacgtgacgatctgaccgttgattggtaggaagcttccccatcgtgtggtgtacgactgtagtgaaggatttcgtatggacggggacacacgtcactcaaaggtttcaccttgaaaagttgttgcctagacaagccgttggacaacaaggaggcttcagagacgtgtacgcgcactaccatggtctgacgcaaagggataatgttgggttttatgccctaaataaaactcttt

SEQ ID NO: 301106 - DNA, 2212 bp, Cannabis indica
aaacacatgaatgataatttgtatagaagtaccaacctaatacaaaagaaattaaaaagagaccaaacatgtagcaagcttcaatattgttttttatatgtaaaattaaattgacaaaaaagttttcaatacataaccaaattaagtcaagcactacttgtgtcttcctcttgagaagctctattttctccatttgcattttcattgtgtgtttttgaattgtaactgtcaagataatcttgataaacatatgaaatgaaaccccaaatagccaacaacaatgaaatcaccttcactccatacatttttctttgaagaaaaacacagctaagattggtactattggcaagcccaaaacacttatggcattagaaaagagtgaagacatctcaagaatcaatcctattgtcccaaggaaaaaagcttgccatgatatagatgtcccaactaatgtcatgacatatgacactttccctaatcgaaatgcatacatttcattactcaaatctttccattctccactcgcaaagagtcccactagagaaatacttgttgctagtaatgattccaagattgtgatatctataacaacagagaaagtttctctttttagtacttttgcgataacaaattgtgtcacagatagcaacaagccgtacaatgcggatgcagccaccgtacaaatgaatccaatcacaaactttcgtttggaggagatatcatgtgcaccttcttctgaatcatcattaaaagcaacgagagtagaagatatggtgagcaacacaagagaattgacaataaaaggagtgaacttttgcgagttgagaaagaaggagaaaaaggcattgaaggccaattgagaggccgaaatgagagagtatgtagagattggaaggtaagaaaggccgacggagtacaagaaacaatccacaactaaaactattccaagaaagatagaaactagtacaagaattaaaagagattttggtgatgagttactaaaagtggtacttaattcgctctttcgccctgcgaaacaatagtaaggaaggaggattggaaagccaactagttgaactagtgttgccatccaattactatttccacctttggcaaaatacaatcttcctaatagcactgctgatgcttggccagatatgagaagaaaagcataacaaatcactctaagccattgaaaatacttcctacctctagaacttggtatcgattcgaacttgttgttactattagagccaacaaaattcacttccttagctgaaaagattacagattttatggtatcatgttaatcaaaaagagtacccgtgtatataatgaaattatttcaactaaattactgtatgtaatatattttggtgcacatatcattattcttatttatataaaaaaaaactacattaagaaatcaaataaaatatatcaacaaaaaagtgtaactctaaattagatatgagattatgagacttacccatgattttgagtttgagatgatcatctttttccatgtttttcttaagttaaagagaaatttttttatgtgtaatgtaaccctttaacatttttggcattgttgttgattaagttcttggaaacatagttataatgttcatttgtgactttcactccttgtcttcttatatgattcaatagtgtttaaacggcagttgaagaaagatcttacaattttaagttttttctttttctttaatagcttataatattatgtttgatggtgcattatcttagtttgtatcatgaattagttattaataaaatcatcatcaaatatatattatatatatttttaaagaaaaaacattaaaataagaaaatatataaaattatattggtggaaaattaaataattaagtaaattttaaaaattgatttaatatatttttttaatattaggatgccaatatatagggagtaaatataatgtaaatttatttggtataattaaatatgggttatatattatatttaaattgaacttgtatcatatattttaaattaagtcatttttattaataattattaagtctcatgtatttttctaaactataattaataattatggaaaattcgaaaggttttttagtcttttttatatgatcatgttcgttcttgttattttaagacattttgtaaaattttaaaaaaatttaaaaaaatttaacaagctgaaaat

SEQ ID NO: 301107 - DNA, 1864 bp, Cannabis indica
gttattttttgcatatatattcttattgttgttttcttattacttttacatggttttcttattatttcttatattttataaaatattataaaaatgtaaaaaataacaacaatttaaacaaaaaagtgtaaaaaattaaaaaaaaaatagcaatatatgtaccttttccaaaataaaagtgcaatagttgttataaaataactgctaattaaatcattaaatattaaataatatgaagattgaagtacaagtacaacacactacatagaatactcttggcaagcttttctctctacacaatgacaaatatgtaaataaattaaacttaaagaataaaacataacaactagtacatatcaaattgattttaaattaacaaaaaaaaaaagactctactagttataaaaagtaaactcatacattcataatcataactataaatattttttttttttttttcaattttttctccttcatcatcacaatgcattgctcttctgctcaatctcattggaatgataatagtccacattggttggacttgtacttatttgaaccctatacttgtacctcttagcaacaaacaaatagacaacaaaattaatcaaactcataattgaaagtaaccaatagaatagattcaaatgattggtgttgagattattcccaaccaaccatcctccacttctagtactcttcttagttgcactattaacaatcttcaccaaaatagtgcttaaaaagtaccctaaagccatagaagtccaaagaaaggaagttgagaaagatttgagagcttttggagcctcggagtagaaaaattcgagtaaccctacataggtaaacatgtcagctatcccgaatatgaagtactgaaaggagagccagaagatgctaattggtagggcttggacttgaggtatggcctcgagcaagccatggtctcgggcaaccccctttcgttttacttctaggatagctgcgacggccatggagatggccgagaggatcaggcctactcctatgcgttggaggtgtgtgacacctgtggggatgcctgttaggcgacgaaggaaggggacaacaaggcgatcgtagatggggatgaggaagataaggaaaattactgggagaatagctagtgaggctggtggaatcttaaaggatggtgatataacacttctgtccatagtttgagcctgttgaatggagaatgtttggagttgagctagacaaagtgtcatgattattgtgcacccgaaaatcgggaacatacctaggagggtcttggcattttccacttgtgttaccctacttagtctccatggagaagtagttgtttcttgtattattgctgccttgtctaaacacctatataattattaattaagcttctcattaattaatatataaaaaataatagtatctaattaatttaaatttctacttaatagatataagaacacacctaaatgcttgtgtatgaggaaggaagttagcttggatagcagcttctttgtctttgttaatttcgtataggtttgatggatcctctggaagacttagatttctatttcgaatcgctgccacgtacacctgaaatttatttttctctaaattgtattatggtgtttattgtaattataacacatttttttcttcaaaattttaagaaatttaaagaaaatttattgtacccaaattaaagtgtagacagtcttctttcaggcataaaaaagaaacgaaaaaatgaatgatcaatatctcttattaaaaagtagtgtcttatattgtgttgaaccaattaaaatttgacacgtcaattaattttttatttataaaaaaattaaacttctaataaagt

SEQ ID NO: 301108 - DNA, 1860 bp, Cannabis indica
ataatcagagaaaataaattgcttctgatttagagatctagggaggaagacttagttgatagtattgcactatcaaattggagtaaatgctgtggatcaatcagagataattgctatggatcaatcaggtacacatacctaattattatatcttattattgtgttctatgttatatacaaatagatcttgggttaattgttaatttatctaacacatatttattcaaatgatttaaatttatgtcaaacttcaaataatttgcttagggaaaacctgaatataaaaaaaaattccatacctgtgacaatattattggtcctccttgagaagcatacaaactctccgacttcatcatgcttactatcattgttgtgaaatttttcatgtgaaactgtaaataatataaatgtaaattatatcataacatatgatatgtagatcaatttaataatttttagagaataatatttaggagtctttctattgatttttacatttttttttatttttacagaattcatgtaataaactaacatatcaatcatattcgtaatctaaatttacataacaacttatatagaaattatcagaacagctcaaaccgtaaaaagaaaaaaaaaatttaaaaaataagtaatataaaatgaaatccccaaactatattcatagagaatacgttgagtatgatgaaaaatcatatgataataccatattgactttgcttttatagactaggtaaaagcttaagcaacatgcaatacacctacacgcttgaatttttttattattttatctttattatatttttaataaacattgtactacaagttttaaataaaaaaaaatttatatacataattctccatcatttcaaaagttaaaaaatgaatatataatttaataaatatatatacattaatacgacatgttaattttaatttgctaatattattgtttcattctaaaggtgttcatctaattttaccatttgatcaactttatcttttcaaggtaagtgagagatacataccttaaatggttcattatcagttcgaaaagtgatattgggtatatcatgcagccaaaatggaaaccctctgtaatttgtaaatttgcaacactcgttaatagagaaaacaatgcttaatttattaaacaagaaaacaaaaaaggtgtgtgtaaatgaatatttaattaggtgtaattggcgtcctaatcctattttcttcttcttttgtaatacttaatcccccattctggctttgtggtgacaaaacctaacatctattttgttagcaaatctataatatcatttaaacccaacgattaaattctaaatatgccctacttagactcattcaaatcatgtctatgtctatgtcataatgattaaggtcaatgaatatatgagccatattaatgtgccatattgagtttcccaaatacaagtctaataggaaaaaaaattgtgtataagaaagagcttatgatcatcaaagtgggcttagaaaataatgaagcctttagccttatacttataggctcataggttgtacaagatgggttgatgaccacaaccacgtcctctacacgcataacacacatttcacatattgaatatttaattacaaaatgatcaatttattgtaaaaagcctaaaacacattccctctttttatatagttattatagatataaaggcaacttaataatattttctcctaggtttgatcctataggttcatccctgcaactaaccaatttttttttgtgtgttccaatgtgaaacagtagatatagtgatatgattaatgtaaatgtatcacgtctttttttttttttttttatgttagaagaaa

SEQ ID NO: 301109 - DNA, 1846 bp, Cannabis indica
ataaaatctatgtctaagaagttgtgaagcttctttagcaattccaacataagagactcatggatcctggcgagcctgctctgcagacatcgccattacgtcatccaccaaactagtggaagctttagtatcaatacattgtcgacccttcttactactttccttcttatgttctgactcaagcttacatttattcgcacccccaaccctaggacttagtttattcttggcattagcaacaatcacatgggacaattttggactaagagggagaggacctgaacaaggagagctctttgatgcacggttgcaggtggaactctctttcattttttcatttttttgcaccttgataattggttctaaagtctgttgtaatgcttgctaaaatgataactcatgttggcttgcataagaaaattgtttttcccttgtctttcggttaatccacactaaccatcgcagagatgttcattttaggttgaactatagatacgtccaacatgacattcccatcaccactaggagctaactcaccatccatatccttgtcctccacacccactgagttcacaccattcttgttaattcactttagttgagcttccacattatcacttatgtcataaccgccctcaaccaaaccacattgtttttcaatattgcgtggctccgaaataccaatttcactcaaagatgggttcctagtttcttcttccctttctcgagcctccagaatagaagtgggggctaactcctccaccgtagttatagaataacgaacatgacccctcttaaccactttaataatctgagacacctcccccatagacataattggtcagttatatggagacacactactcttcctattgttacaaaatcgatcacggggaggtgagtttagggcacacatccatatattataatgatctcgctcaacgactagattaccaccattaaaatccctcaagggtcagtccaacaccttatgaccgataatcccacaatcaaagcagaaatccgacaagtgatcatattgaaagataagagagactttagtcccttgatcgtccaccgcaactctaagtccccgcttgagaggctttgttatgttgatcaagccctcactttcatagccccatttgaaatcttgatgtcctccaacttttcaatactctctccccactcccttgcaaataactcattcatacacgctagaggaacattattaatacaaatccgaaataagaaataattgaaattcatcttacagatctcccccaaccccataggcttaacaaaataaattaattacttatcaattgtccaagggcctcccttatagctcctcagtctgtcctccttatacccaaagaagaaccaaaacatattctttaaatttaactcctcaacctgaaattggtgattgattttccaaacaccgttcatagccttcacgataccctccttgttggccagtctagcaccgatgaccttgccaataaggcataagtccaattttttcttaccttctttcacaccatctttattcagtgacagtaccggcccatcaccctcatcaagaattaagacttcagcaagacgattaacaagattaagatctatgatcaaaccaaagaaaataaaaatcgcactaaagaactcaacccttcctataaaaggattttttcttcccaagtaatttcaacatagaaaaactatccggagaatcaaaacagttactcttttggattcttatttatattacaatatttgatttataataaattatataatttatttactaaatattatgtagcgccctaatgctaaggcacgctac

SEQ ID NO: 301110 - DNA, 2271 bp, Cannabis indica
caaaaacaataaataaatcaaaaacagcccgaccctagcttcaatgaccttaaagcatcatctcaagattcaaaggcaacattgagtaagcaccttctttgatcctctagaaactactttctcaagattgtaatcttgaacatagcgaatctttccataaagtttgacattatcagctttagacctttccagctctgctgtgagctgccctatcttctccttcaactgtcttgtttcctaaagcattaaatagagctaagaaaaattgcaacagtgaacagaatattccaaatagaacaagatacaaaaataaaaaaaacaaaaggaatattcacaaaggttgaattaaattcttgcaaaagatatcaaacctcctccgtctcacgcaagcgggtcctgaatcgatctcgttgattacatatcaccttaagcattgagctttgatcttgatctgaggaaacatgtttttgatctgtgctctgttttggaaagaattatgaagaataatagagttatttaaataccatatatatctataaatatatatattgtaagaaaaaagaagacacttgaagaataataagagaaaataatggggtagagatttaaaaaacacaggatggtagagagaagtcatccatgcagtactgtctcctaaatattttccattgtgaacaaaaaatggctcaacatggaatataaggattacaaacgtcacaactctcttcggaaacatacctcagataattcagtgctcctagcctctgaaagatcccaatcatcaaatagattatttctttgatctttggaattataaccctgagtcaaaagtaaacaaaagacattttggaaaaccaaagttaacctaaagagcctgaactttcatgacaacaacgctttttatgctatataatgcctttgtttatttgtgaaaacccttgttatcccaggattgtttagtttctatttataaaggtttagtagactagaaaattcaatattttgtatattttattttttattaactgattctgggaatttcagaagtcattgaaccaaacctttaatatatcatcctccaatttctgtattaacttctgttgttcgttaaccttcgcagttagttttgctattgtgccttcagctgtttccaacaatgatgctttctctaatagtttgacctggaagcaacaaaataagtgttaaaagacccagatcatgcataacaattaacggattatgtccaactagcccctacagatttccatcagtattttaaattccgaagaccaggatggttgattgtgttgactcaattttattttgaatatctaattatttgttactaattaatttatatattgtagcagatttttaagtaatatacttaaaagctaaatattatatcaaggataaaggatatgaagccaaaatttcaagatcaccaactggacttcaagaaaacatcaagacctcaaagaactcaagaccaaagtatacttactgaagaattaataactattttgttatttaataaaaagatttgtcttgtcgttatatagatgatattggtataatataagtttcctatcattgttctacgccctaaaatataataagaaaagttgtaattgactgctagcagtgctagggctgtatagtagatcataagaaaataataaaaaatcatatcagttcttctttccttttccctgccatatgtctataatattcaaggcttaaatatagttcttactcttgtaaagtgatttgcatgcatatcttttgaattaaagcacaaatttactcactcgtgcaaaaagttatttcacataaataagcattttctaaataatcttttttatacatactataataatttacactttgaaccattaaaagaatctcggttttaaataggagatcaattcgcttaaagttcgaaaaatagagtttactctctgcccaccaaccgtcttgtcaatcataggatctttaaaatatggtaaatgagttttatgtagtattcggcagaatagtatatatttatgaattttttgccgctaaactctctcaagtattgcttcacttgcactcaaccctccaagttcaaattttaactgtaaaaccttccaaactactaaactattaacaaatttaaggtgtcatccgcttaacgcttaactgcgaccatgaaatgcttatgtatatactcttgtacacgtaacacatttatattggtacacttcatattattatttcaaatttatt

SEQ ID NO: 301111 - DNA, 2831 bp, Cannabis indica
tctctctctctctcttggctttgtcgcctcatcgacaaccaccccacctcctctgtctttctttttctctttctctctcttggcaccatttctccatcacctgatgtctctctctccatccatcgttgttgcgaggtttctctctctcaccgcctccccgttcttgttggtgggcgacagtccaagaatgacaactctgtggcgtggtctctctatcatcgtctctcctttctctccaaatctttaatttgtgtattatttaaatatatattgtgtaatgtctaataattatagtgtaatatatataggatccctatatatatttagataaatatatattgtgtttaatatttgtgtaatattgtacagttatgtttatattgtgtaatattgagatttgtggtttattatgattttgattgtggctcaagtttgtaagggtgtagatttagatttttttgtgtgtgtggtggtttaaaattgttggtaatagtggctcactatagctgatggtttaaaaccgtcgagtgtctattcccgactatttaaatagtacttgttattgttgacggttttaaacagtctaaaataggcatagccaactattttctaccgatgcatattatttctatccacttttgtgatggtgtaaaggtcgacgataatattataccactgactatttttaacagtcagaaaatcttttagtattaaaagtttagatatataaaaaatcaaaattgattttcttacactgtattgactacaacacttgctagactgaaggtttttttttcaataaagagtcgaagtcttatgttaatttaatcaaattagaaaaagtatacgtaattgctcttaaatgtcaaaaccgtgttgtgtgtatagcaaaacataatcgtttaaaatatttatagtaaagcgctctacacttttaacaatttttttggttagggtcatacttttggtctaatattgatagaatcgtctttgttttaaatatttagaaaattataatttaaatttgttaatatcatagtgtatatatatatatatatacggtagtaatataagaaatcacaaaggtttttttttggtaaaattatgaataattttatggtattcaaaatagactttaaaataacttttacgtgcatatataaattaaacaagcttcaaaatatcagtttcagctttttagcatatgaatggattacaatccaaattatatattatatatatatacatatatttgagaaaatatagtgttgtaagtttgtgcctgttgtgctgactcgatctatacttatttgttatttttaaaaaaatggatcgtatcataccgtgcacaaaaaaaatataggccatgtcgtgttgtgccaatatttttaaaaagtatgctcaatacgacttgtaagcctggtattttcatgcagtgtttggaatattcgtgacgtgatttgctcataacggccagtctgtatttcttaaataggtcaactcgtttttatatgtatccggacttaaattcattctctattttttttttacaattactaaagtatatatattatagctttagttatattcatatcacttttaaacaatattttacagataatcatataaaaaaaaaaattattaacatcattagaactttaatatttacttataaatactcaaatttttacatctcaccctataaataaattaatatataaccttaatttttcatattttaatacttgtaatcatataattacaatattacctattatatttaaattttattgttattttaaataattgataaattcatatattattataaggttttttaatatgttgtgtctttgtttatgggtttgttttatgtcctgcttttcgagttagtctattcgtgcttacgtgtcatgccttttgtgattctcgtgtcatgtcgtgccaatttgttagaaaaattatatttaatatataataaatagccaatttatgttaatgtgtgaatgagaaattgatgccttaaatgtggtccattgttagcggctaataaatgcagatttggtcaagaatgtaatcaccataataatagtaaatatactgattgatatcaaaaattatggtaaaaattttgattgatcattaattttttaggattttttggcattaatttccttgtgttcacacttagtataccaccccatataaagcctataaaaggaggttttacctttcattctaatgacaccatcaaaaagctagagtcactcactcaaaagctctcttgtctttttcttctttttctttttcacaagtcttaaggatatagaaagaaggtattaattcgagttcactgaagtagtgaaagtggtgtattcatctacttgttaattgttgtatcttggtaaatggttgctcgttgatcttctagcactgctcaagtaaaggggcaaatttgctttaaagaaagcgcgtttctcacatgccttgactttccttttaattactgattttacatcttattatttgtattatatttttgttcttcaattaatttataatacattattatgtttgttggttttcttcatattctctttaggttattattctaataaatttgtagcaccgtatcgtattgtgctcaatgcttatatttttcgtacttaatcgtgttcgtgtcaattttatgtgtcaaaaaaacatataacccgtatttagagtaagaatatatcatatatctattctatataaagtgtgcctatataactgaaattcttggtttaagaaaaatttatgggtgactttttatttttatttaatagaataat

SEQ ID NO: 301112 - DNA, 6679 bp, Cannabis indica
atgaaatgcacatacacggattgaagaacaacacttctctttaccaaagttttaatctttctttaacaatgttaaacaaattttcacatacccaaactaaagaatgaacaagatgcaaaagaagaagaaaaattgtacattcggagacacttacttgtacaaacccaccgcggtcggagacggagccggagacacaaaaaacgaagtacactaagtccaaaagtactacagtttcctcccccaaattttaaaataattttattccctaaaagaaaatgtgaataagaagaagaaaatgtgaagaagaagaagaaaactctgccctaaaagaaacgaacccacaaacccacgaagaagaaggaaagacaaatgtattttgaaaaatggtaactgtcactacatcaatcactatcaattttttttaaaaataaataaattttaaaataaaataccaacccgttaccattttttactaccctaactactactttaaccccagccctcagatcatgccccaatataatcgtaacggctacagtacaatcaaggattgtattctcttatttggcataagaggacaaaatcatgtcccttatagataatatagatagagtagatatactaaagtagattgcaaagtcaaacaaattgcaaataaatagaaaaagagtcaactgtttatgaaatggcaagttgtctttgcaccgtactttatttgcacaaatgattcaaaatccgcaattgcactgcaaaaagttctgaaccatatctttaatacgcaattgtggtgtggtttgataaacactcctaaacggtattttgtgtgcaaggaaattaactgggatatgatttatatggaaagcaaactaaaaggtggggttgggtatttgaggcaaatattttgatcagcatcccactttttcacaagtgaattgtgttcaaactctgttagtttgactcattgtatttagtagagcaattaaaattaagagtttgaaattcacaacccacgttagtactaagctacttatttctttaattatgtttagtgacataattgagttgcagaagtattttgaatggtgcaaagagataccattgataagaaggcagtacttttgtagatttggtagcatgttctatcaaaatttattcatactacacgagtatatgtgaaactttatcatacacgtacgtaccactaacaaagaccatgtctgttacatgataagcctgcaaaatttggtgactcacttaaattggtacactcgctagaaatattcatgaaatacagacaacctataaagtcagttaaaatataagggtgatgcagaaatcaatttccaaatgacatataaagatttgcttacatctcaactttcatggataacaaaagtatgacactgcaaaaatactgcacatacaaaccaataccacagagaaaggtggggtgacttatattaatgatcaagtaacataaagaaaactttggatcatgtatattatattatgtatttatatatatttgaacttaattaaatctattggaagaactgaagcaatcagaatctacagcaaagaaggccctgcctccaacccttatcttttcgaaaacgtcgccgatcagccttggccattctaactggactgctattccattcagactgtaatctgcacaacaatttcaacaaatttgcattgttagtaattcatttgatctatgaacaatagactagtatgaagagcaatatgagtttatattatttacacgggaaaggcaaaagaacgtgtgcttgttgtactgctatctgatcgaagagagacactgcctgaatatggtataggccctgaataatttatccgacctgacattggaccagcggcagagaaactggactctccatggctataatgaaattgacccgaaacagtatgtgcaccgaatgtcccatcttcaaacatgggcatgtctcgactttggtgagcgtcactatttcggggagactctttatccatgacatgttcgactgggcttgaaacattctgtgtctcggaattcctttcatcaaccgaggaagtatttgtagtttcattacgtccactaacaccatggtgagagcactcctctgtggccaattcttgctgagagctcattgcagaagtctcactctcaacctcaaccattgtgttcggagttttgtcgcctccacagacaccatgttgcagatcctcctctctagttacattaacagaagaacgattgtgttgaacttggtctggaacaaccatcctgtcatcaacgggagacgcatcttcaatttcaagacattcacttatgccattgtgagagcactcctcttttgtagtgcctgcagaaactaaggaatcaaaatcaccagtactacttcccttctccttcttactattgttggataactggttgtcaaggctgctgctacttgatgattcttcggctgcagatagagaagatggtatttccgattcttcctcgatgttattatctagcttctcagctgccatagcagagcccatgctatccatctgtgttgtttcacttgcattgtcacttgatgtctgcattgaaattaattgcatacatcacaatctaacacatcaaaaagcttcgagtttaatctgacaatgtatactccaaactgtcagcttaaaaatagctccaattagaactgaaatttcaacgaggaacaatatttttaataggttgctgagtaacaaactatgtttagatcctaaactactaacatgttacgtgtaaactccaaacaggtagtccccaaacaacaagagacttaattcacaacattggcaaagtgcatagccatacatgattacatagagcctattgattaaaaaaagggatacctgaacttgcacagatgcaatgccatcacaactagaagacttggagtgaagattctctatgcataactccctcatcataactaaatcttcaggaaaaattttatcactgggtgcatcacatttcacctcgcctctcggcatcaaatccttggattcacaatccacgacaaattctttttctgactgatttttgacagaagattttaaagcgattgaacttgggatgccaatatccatgtgttctttactgtgttgttcattttcatctgcatcaggaaaaacaaacgtacaaagatctttcttgttttcaccatttccaaataagaacttgtcctgggacggcactccttcatcgatgcagatgtccttgacagaactgaaaccactctctttgtagcaaacttgaagttccggcagttcacattccataacacttttgtctgtataataatttgatccgttttttatttctaaagaagatttggtgaatggagccgcaaattcttcaatctcatattcgtcctgattgtttatatcatccaccttattaaaacaatcaacttttgatgcagccaaactaccttcatcattcatcaagtaaattaactgagcagcatctttctcgttgtccttaaaatcacacaacggccgattttgaccatcttttgtgatgctttgcgacttcaacccggtggattccaaagagatgttattgtaatcgaacaacttgctatcaggcttgtgtcccggagatatatggccaaacacagattccctttctgcatatgcatcaaaaatcccaattgattcaagttagaacctttttcagttgaaaaccatgagtactcaaatgaacgagactttatcttgaagatacataaatatatatagctttcttctttgaaaatacattaaagaataatagtcaataaactattaaatatattcctagctcactgttaaaaggatttgattacagatatcaaagaagccagagtgagaagtgttcaaatagaacaaactaaaatagtcaaatgttaattaccaagtttcatgggttatggatgtgcactgacaatagaatcttcagagctacaggaagggaaattctcaagcatgaatcctgccagagaaaatacacgaaaacacatgttaaaaaaccttcagatatggcacactgaaaaaaaatgataaaaggaattgaaagagaaataaagacaggaatacgaaatttacttgagcacaaacataaagagaatatacttcactaaattatcaaacttgaaagcaatctcagatgcagaagtgatgctaatcactaaattcagcagacatatgaccataaaagttatcaaaactgtctgaaattattaatttcacccaatatttaatttgagcgagaaaaaagggccgccaaactataactactatatatataagaaactaatttatggccgactcaaagaacagcttacctgatttttttttataaaacaattgtggattacaactacgcagcaatcagaccaactaaaaataataaataaagaaaacccagacaaaatataagttccaaccacagtttccattacaaactaaaaatcataataaataaaaattattcataacgaaaaaaaaaaacttttacttttaaagtgaaaataaataaacatgtccatgtccactttcaaaaagacccctcaaccaaaaaaaaaaatgaagatgaagaagaagaagaagaaaataaatgaaaattaatataagatttcatacattagactatgaataaagctttgagttaacagtggggaatcttaaaagtcagttcttaatttacaacaagacaggagagagtttggagcttttgaaaagcttacgcttcaacaacaaaactatgactgaaaatgtaaatcacaaggaaatttctaaaactaaggttgtcttcttacgcaatatttctttcttttgtcatgtagctagcaattatcagatccaactgggtaaaaaaaatcttagttgtaaaaaaaaaaacatttttataataaaaaaacccaggtgagtcttattagtttacaggcggaagaaccagtaaaaaccaaaatgaaagaataagaaagatctaatatcagatccaacccccacccaagtgagagagagaaagaagagcggggaagaaacccaaaaaaaattgtgagatataagaacaaaaaagtgagtacctttaatattttttatttttatttttcctgaatcaaatatgacgaagagaatactagaagagaagaactatgtattctcttaccttaagaagcactgcaacactaatataagaaaacccttttaacttatatcaatctgttgagattagagcaaaaataatactaaggaatcttcttctaccccaggagcaaatatagatgtgagtttgctgaaaccataaaccgtagacagccagagaacggagaaaatgataaaaagttctagagaggaccaaatagtgaaagaacgaagaagaaaacaagagagtaacaaatataacataaataaatatattatattaagaatgaaataaaagtaaactgggttgggcacaccgctttccacgactctctccgcaataaattctgggcgagagagagaaagagttgagtgagagcaacaaacggctcctttcaattaattaataaatagcattcattaactaaccccatctcctccttctctttcttcctctctctctttctatctctatctctactgctacactctacaactccccccatttaattcaccaccaatacctactctctctctctctctctctctctcgtttatcatttacaacaagaaaaaaaaaaaaaagagagaaaaaaatcacttcattccttaccagccccaccttccacaattccgttactttcccacgaatccaaacaagtttatgtcctcccaaacgccctgtaatctctttccgcgtttaaaaaataagaacaaaatagttatgggattattatggcgctcaccttactgaaaatggcctctccgacgagtatctgaactaaacaacctcttccttccgttaattcactctccaaaagtcaaaactttcaactctgctttttcacgtgaaaagaaagttcagtttttcttttttttttcttcccctcgttagaaactccaaaagcaaaatgagttccctctgaaaaatctcagggtgtcgttaatggagagagaagaagaagaagaagtaaaggagaagagataggactttggagtttggacttaggagaaaggatctgtttgttaatttttgagctggctccgtcgttgactagcccatcatcgtcgtcatcatcgctaaggatctaattttctatattttttataatttcattggccccacttcttcattactttttccactttcatccctcccactcagttagaccgattccgtacatcggtgttcacctcactcacgtgagtcgccgatttttcaccgaatgatttcaagaatctgcgcgagcctacggtcttaatatggagtcggatgcagataactgacgctagtgatggaaaaaatgaagctgcagtttcctgggatcggcagcggaggttggtcaaaatgacatggccctgattggctcacacgtgtcgggtctcgggcatatactacgtgcgcctgggaggaccgggcaccttcgtttgtcgctgtattggggcatgagctagtggtatgtgtaatttcaattgattatagactccgctgtactttgta

SEQ ID NO: 301113 - DNA, 1901 bp, Cannabis indica
tattgttaaatttttttataaaattatataagaaaaaaataaataaaaattatttgaacactcggaaacaaaaaagaattattagtattttataaaagaaataattattattgtaaaaaagttgtcacattccattccaatgtcaaccaaacacggtaatgttgtttttttaggtttatcattcccttcattactctaaagtaatattaaacctattctcatgaaatgaaacatgcataccaaacggccaggtgaggatttactcaataatagcatcagttaccaacaaatttgagtacaatattgggatttctggagaaaaactacaactgctatctttgaaaatagacactgagggaccatgacctccaattattattattattttatattacatgcaaaaataattaaaacaaaataaataattttttaatttttctttatatatatgtacgttataaatttttgggttacgtacatccaatcacgtaactaagtcaataaagaattcataatagataaagtatgataggttagaatatttgtaaatataagtttcgaagttcgactagttaaggtggctagtgttttttattaaacgccaattcagttaattacttttgcttataagttacatattgaaatcaggaggtcctacaaaacctttgttttcctagggagacaagaacctagctagctatcatttcattatatatacactgcatataaaaccttgttttatatttatttttaatttaatttttaaaactaagggtctaaatcagtgtacacgtaaaagcctctgattctacgcacctgctgattttctaacttagtcgaatcggaccatattatgtatgggacaccacataatatcatcgaatattaaccgtaccccactttattttatgcatatatatatatgctagtacaattaattaaacttctaataatacaatttcattccttttgatgtatatatagttggccccttgttatatcatgggtgatctatttatatatttgttttgtaataaactatgctagcctaactctccataatagtaataaaaaaactataatagcatataactcatgattgggtcaataaatgcataaagctatgtataatatatattttttaaaaaataattttgaatcattagtaggagaataaaaggaaaatatctaaatataagactatatttaataagagatgtaagtataatatgagttatattttgaaaaagaaaaaataactttgtcataaatttatatcaatttttattatattactcttatataaaattataaaacttgatgtttgatgtaaaatttaatgtttaactaattttattaaaaaaaaataaaaaaatatttttatcattaatgtttttattatttttttttataaaacaattaatgttgtttggtaattcatagaacaaaacaaatacgaatttaacaactttcattaattatttgtcaggttagtcaaatactatagtattagttcatgatgtttgttaaaatgttgtagcattctatttagtttattataagtgcaccccgtagttagtttgaatctttcattacctatttaaaggctttagacattcttgtaatgtgagtaacaattcatattgaattgagagagagtgagatcgagtgggagagtgtaacaccctaattagtataggcgtattacgtaatttttaaacgtaatgtgcagctcgttgctaatcaacgaggtttatggaaatcatgattaattaaaattttttcttttaattaaacttatataatatttcatacaaaatactttgggatcccatttacaaaatacttacaaaaaatttactgtctattacaaaatacttgtcacccagcgactaactaca

SEQ ID NO: 301114 - DNA, 3017 bp, Cannabis indica
atcatgtcagaaatcaacaaaaaaaaccatttagaatattaggcaatttcaagtttaccaggatgagagagagcatgagcaagttgaaaagattcccaatcaatctgtgtatgattttattaattactagaaattaaatgattaaacttggtaaagctaattataccatttccaaacattttactcaagcttttctcctgatatggtctgggttgtgcttgaggcttcagctccatgtcaaggtccggattgacctatagtaccatatgagcacgatggttccgtatatcagacatacccaataaatcagagaaaatctctcacttgtacactgaccaccacagctatctaaagcaaggaaaagatcttgtaaacttacagtatcatttctgaaatcatactcctctaacatgggataatttagagcatttggcaagcaacgttgcttgacattttcaacctgccaatacttaaatccttactaaaaaaacaaaaaaaaatctaacataaagcaagtaaagattcaaataaagtggtttacaaaagaatataaaattatataattaggcacaaagcaacatttccaaccctaacgtgggcaatgcatttcagcatttgtcatttttgagggaaaattcaatgatatttatgtataaaaaatatacaattttatatttagtgatggtatttgaatcaaaagaacatgggtgtctaataaaccagcacttacttcacaagctagtatacaataatatgaaactgagaagtgctataaggcacatgacaaaagtaggcctcgcaaacctgtgaaggatcaacttcaaatgagtgagtttctttttcttcggctgcagctgcaatttctgcttcattcagcaacccatcatgaccatctaccatctcacccatacttttgctaatagtaaatccatcgtttccattcagaccctataaacaatttgaagttagatacatttcacaaaacaatcaactaataaactaagcagacatataaatgaccaatctaaaacctaaatacatataagcaactaaggacgtatgaacttctcaaagtcaaaattgaaacacatgcttggaagggtgataaattcaccatacaatccaaaatgtatttacttatgaatatgcacttaacaataaggagagcaagaatgaaatgtcaggagaacaaaaaatcctaactagaaacattatgacatcgaataacttacctcagaaataatccttgctcgagatataacttcatccttgagcaaattctttagcacctgcatataattaaaacaaaaaaaattatgatcctaaattcccgatggcaatatgcataatgtgataagaaagaggtgaagtatgagagtggtaagtatcttgcctctgggaagggggattcgacaaagtatctattcttcttaagaacgagcttcactttgccataattagccgtagagccatgtatgaagtctatcatctcttttggaagcttagtcttagacaatttattcaaaacagctatgattgtttcagtttcaagaccaacagacacagcggcatacaaagaatgcggtgtcaagttgtattcgtgcattgattctggcctagaaaacaagtcacaggcataggcatagatgttcaataaccccacaaacaatatatagcaaatgtcgactacaactaacaaactacattaggattagactttaaatttcatacctgcaaactggttcagcaattgcaataagaaaatcgtaagcttgtttatacaaaggtgagaaggtttcaaggaaaatgcgtccatccgcacaagcccacaatggcctattggcgtggtcaggtttcaattctaatttggtaaaatccctccttttcccctcaccttgaatcaatcatagattggccaaaatcaatcaatcaatcaatacccataatccttaatcgaccaaccaataaagaaaatagaaagtagtagaaagaaaccccttaccttcacgcaaatcctcatcgacttcatccccataataaccaccatcgtcttcaacaaatggatgattcctatgctcttcctgaacacatttccctaatcaaattaaagcccaataacaatgataaaactaacataaaactattgcatcaaataaacgaatgaatgaattaaaccttcgccgatgatttgtgcttcttatggggtcgacccttattatcacctgaaacatcgattcaaacaattaacacaaaagaaaaaggatctagagtgagtctgatgagaaagagagaatttgggaaaaataccgtgtcccatagcttagcttctatgaatcaaaatattaatgtgatcagcttctgcaaaagtatataacttgaacttctactcaatccacttgttcacttcaaaaaccacattttcttcttcatattccataagtaatgatatataaaacaatacatcatacatatactaatctaaataaatatatgataaaaataacacaacaaagtgagaacaaattataatcaattatttaaaaaactatttttactccttacatttttaacactacccgaatttgcccactcgttaattatgaccctttattgtgttaggttaagtttttttttttttttaatgttcaaaattagtatttttatcctttaaattttgaccaatacaaaattttttccttattattaaaaaaaattaatttaaaaattataatattctatgaattctaaaaaaaaaatataataaaaattatttaacaaactataaaaatactaaattaattaaaaaatattaattttacttaaaaaatataaattattcgtaaaataatatttttaaactttattttattttaaacacatatcttaaaaaataaaactaaaatattgaaaatccaataaataatttaaacaaactaagattttttgaaaaaaaaatcaaacttatttgtatttataaactcatatcttaaaaaataattaaaaattcaataaaaata

SEQ ID NO: 301115 - DNA, 1827 bp, Cannabis indica
gtattggtagagaagatagcaaattacaaatcctgatcgagcattgtgtcgcattcgatcatcctccaaaaactcaccatctccgctatggacggtccccttccaaatgtctaaccttgacttgttaaggtcagacgagatcaagatcatcatcttcataatcatcatagccaaagctttttttgaatcggaaaaaatgttgaagcttcctggtggaggtcgctatggactgtccccttccaaactcaccattttgtttgctttattatctgtgtaattttcaaaatgtgttcttatatttcaggtatgatgttatgaaagtatcatcactaattttgttgcagctattttttaattcagaaaaaactaaaagacgaactgaaacttcagtgtttaaatcgaaaacattctctctctcatattgacggcagaacatttgataccatttttagataattgaaatcataaactagctctgcatcatttattaaattaacactacagtgtacgtataaagttcatatatgcatacatatattaatatatttaatatgttgttcccaaatttagcttatgtttacgttttgtaatatgttattctgacattatttggtcatacttttcgcatattgggagagatgcggactctaagaagttgatacatctcggggaaggcaacccaaactttctgaagcgccagagtatcaaaactgcataagtagtaattgtttgttatatattctttgctcatttacaatcacagacaagtagtaaatctctctctcattttttagacttctatatatccatctgtcaatgttattaatgttgcaaaatatcactttttttttatttatttattctcttatctatttttcattttatgcaactgttataaaacagagatcttggagggttttgatttgcagaggacctttggcttgagtgacacactgaagaagtccatcattcatatttcttgtacagtggtaatataagtgaatattaaattttttatttgatgttaagttaatattgtgaaaattacttgtctatattaatttactgatgtttaatattttaatgtgccactgtttaagaaggccctagaagtgatggtaaagccataatttatgtatatatatatatatataaactaaagtttggatgtgttagtgtcttcttccaatactttggttcgaaagaagtcggtgaatatcatgattgttggatgaaatttttttttgttcttatttggtcttggttggcctaaatttttagtctattattaagtttttcatagtcatagataacttctatagcatgaagatttttacttgtattacactttttctgaatctggttcaacctacaatcccaacaggtgcagagaccaattgcatatgattatttattgaatcaatttcaattttaagttttcctttaatgagatatacaaacatacgtgcatttacacgtaacttccacctagtatacataaaagaacaaaaaattatagttaataaaaagatattattatattttattttattgtccatgtgtatatagatgggtgtagtgtgtacatgttgaattagttttgttatgtgtaggtggtagtagtagccatgagccaatcaggtatgaaacgacaaataacggtcagataattacaaagaaaccatctccatctcagagatttctgctgctaacgtgtcgcaacaaattattataataaaataataattatcaatcaatatcaatcatcaatcaatatcaatatcaatatatataaataaaggaaagcacaatagtgatgacatggca

SEQ ID NO: 301116 - DNA, 1607 bp, Cannabis indica
tgaagatgagttgtacatgttcaagccaagctagaccatgaggttgtgtcctacaaggaattatatagaaattccaatctcttagattaaaacttttgcttggataatgtcttctaactggattcccatgaaaagaaatctcattagtcatggtcttttgaatgatggtgtatgccatgtttgcgatgatcaattagaggcgactcatcatgtttcatggggatgttcttctcttgctccatataggaaaatgtgtgattttaacctgggaaattcgcttgtgtcttgcacagatttttttggttttatccataagtttataaatccccttcccaagcatcaaattgagttggttttagtggttttatggagatgatggtaacgaaggaataagtggatgcataataataagctaatccatcctggattggttgttaattgggcttttaattttttagttacctactaaaaaaaaagtcatcggttcatgtggggagaggctgatctttgcagttcaatctctatctacactacctcaacaggcgatggtgccccgtcgatcaccaccccctttgggtatgttaaagtcaatatcgatgccactttggatgtgtctaaaggttgtcgtggtttaggtatgattgtttggaatgaaaaaaaaggaggtcttggcctccatttcgtggtttattgatggaggcttcccacccgaaatttttgaagctttggctataaggaatgctggatcactatcttatttatttggctttcataatactatttttgagtctgattgtcttaatttggtgtttaagtttaataatcatgtgttgttcgagtcttctttaagaattttggatgattctggtttgtcattttagatattttaatatagtaaatcttatgcattgtcttagaattgttaatatagaagctcacaccttggctaagtatgctttgtcggatacttttagcaaagtttgatggccttgctatcctctttgtattcagtctctttttctgcatgatgcaattgatgtgaatacaaatttagtacccttcttttcttagagtttcttctctaagaaagtggagtttcacttggaccatttaaaaaaaaaatactacgcattcatgttatttttattattatattattaacattatgttattcattttatattattatatttaattattatcaataatatatatataaaaatattagtgttggaatatttttaataaatattcaattaaaaatattaatttttgtaaaaaaaattcaagatagatctcacctgttaaaaaagacttgtcacacataaatttataattacaacttgtcacattgatatcacataaataagaattaagggcataaattttttaaaaaatttggctgcattttataattgaattctaaattttgaatacaatacgtgtataattatttaaaaagtcatcaaaagcttacaattttattaaaatatataaaaatcttattaaatatctttatgtataaaaagtgtctatctaatggtaatttttggtttaacgattttttttaacgattcttttttttttatttagccttacacgattaa

SEQ ID NO: 301117 - DNA, 6579 bp, Cannabis indica
gtatctatcataaactttattgaaatttatagttttttcattttatgtacttaaacattagaaaaggagaattcgaagacttctttttatgaggagaattataacactactaggctataaaattataaatatatatctaatccaattctaacttattattgttgtatctagttaaattaataataaattattaagtagtctataaaatattgttttgattaatatttcgtggtattttttttttcttaatggaatttttttatttttctttttcatattagatcttagacaacacaacatttactataatcattttggcgatctggttgatgactgtggttgttgttcctattgtaacactcactcacagaagctttagaaactccgaaaagtgctcacaaaggtctttgattagcttacaaccagactcagagctccgagttcttgcatgttttcactcttctcatgaagtcagcagcataatcaaccttcttgatgcctccaaccccacaaaacaatctccgatattcattttcgccatccatctcgttgagaacaacggtcgtgcagccgctatgctcattgtccacgacgcttgtaggattaacgttggaggagacaaaaaggatcacgagctattggactcttctcaacatgtggcgactgcagctttcgatggcttcaagaacaagaaagaaggcataacggttcaaccgctcaccactgtatcagcgtacgacactatgcacgaggacatatgcaaccttgctgaggagaatcgcaccaacatcataattctcacgtttcagcctaatgcgaaaagcacaggaggaggaactaatcctggactaattaataaccatcatcttagaagcattaacaagaaagtgatggaaaaatcgccttgctcggtggctatacttgtggaccgtggccacagaccgcctgtagcatccgattccccttctggcaactgccaagttggccatcatttcatggtgcttttcattagcggaccagatgaccgtgaggccttggcttatgctgagaggatgtccaggagtcgaactgttgcgttgactgtaatgcgcttcattgcttctgattacattgacaacaatagaaatgatgataatgatggtgatgatagggaagagaaagagaaagcaatggacgatcagtactttgaagggtttcgccaaaagacaagggacaatccacttgtgaatgttggagaagttgttgtcaacagtgtggaagaggttgtgaaagccattggaaccatggcagaagagtatgacatcatcatagtcggaaaaggaagaagatcatcagatgggcaatcatcttcaaagatgttggaggggatggaatggagcgactatccagagttaggtcttttaggagacgcactggtgtgctcgactattgccgtcagtgcctggattcttatagttcaacaaggtggctccaatggtgacgatatttgttggaacgggcaagtagtggataatggcagtggtagactggaagaaaaattaggacataccatatggcagcctctcagagttgaaactcccgaattcacaccatttgtgtcccgttcgagtagctgttgttgataatcataacaaatatagcaacatgaaatatttttgtgtaaattgtgttgtttatcaattagtgttttgaaaagattgttcatatatttagctctcctaaccaaagaaaagaaaaaaacacatagccatagtttccaaattttggttcaaattttttgacaacaatgaccaaaccataataacttgattgatggtaatcttttataacttttcattttgcatcaaatttgagacaaccatgttaatggagacttagagaaactgaattaccaacaaagaaaaaagagatgtatagttttaaatttgagaaattacgagacatttaatcgaaaaacaatagtaaatggttgttagcctaagcagaagtgttagaagctaaaagatatagctagagagattatgtttatgaggcaaaattttcttctgaaaaccagactgtacatacaaaaaagtttgagttcatattaacataatcaagatggggtaattatgagaaactaaccgcaactgccataatctctgtgcaacaaacaatttaaggatatgatatacaagccagcagttttgagcagatctgccttagctccattgaaggatctgtcaaagatatactagacagtaccgaccttgcctctaccagtccacccgatatgctctccaaaatctcatcatcactacccataagagatgccattagcttagatccagccatcttttcctgatgagcaacatattaatccatcaacacttgatttcataaaatctgacattttcaaagctaaactaatcactacaaaatctaaagaataaaggagttatgtgagtttctttctcatgcaatcagttgtcaaatgaaagatgagaactaaggtttttgattatatatcatatataagaagttcgggtgttagctaagcttcagtaccttctccgaaccctttttaagagctttgacagacagttttagaagatcacatgcgtaaggaccgacaacagacttcaaatgatacacagctgaaaagagaacttggatgcatgccgctctgatatctgactctgttatcgcctgtatcatttcacaagccatttaaaaaaaaggactgaaagtgactttaacaacttgaggcaacaagaatgcaatatttctgaacatggtacaatcaaaatacctcaacagatcgaatgagaagaggaagagtttgtttagcaaatggcttcttgccagagtctgaaattttttgacaagcactgatgagagcattggccatgcacaaacgaaatggaagaggaacttgcgccccaaatttgcttatctccccgcccaactgggggtttgaaacaggttcattcttaaaagatgtaagttgattgatcacataagcgaggacagagtttctggatgcagcttcacctgaaattttggtttataaaggtcagtccttgatatgttacttaaacatgccctgcgaattagttattaaccagaatcagttttcctctcaccaataagaatttttcctttgttaaagtccttaagtaatgattctgaagcttgtaggtcagcacatatcatcagcgcaagacaatcgatgcacccatgttgagctttggaaactgaggagaaaacaatccgtagaacttaagaaattaataataagatgttagcaagtaagttccacatattcacataccttcatccccgtctagagaagaccataataacaccctctccagcgatttcctgacgtcaaacatggcaggctgagaaagtgaatctttgcctctgaccttggaatcataaagagtgcagcaaaatgtaaagtgagaagttatggtttagagcagttagggaaagaaaaagtacatagacgagagttcatgtcagtctacaaatgactaatagaagaagaggtaatcaccacaagggatgtgcagagtgaaaacaaacaagcttttatctttagtaaatctcgagaacttccagcatgttctagctgggaagaaatgatcggtataagcacctagaaaatgaaatggcatgtaaggttaactggtcgatttatgataaagcaatgataatcatgtacacataaagatcttgaaaaaaacaaattcaagatggaaatttaaaagatcttcttaaagcattagttaagcttcctgccaaacacatacattactgtaacttgagtctcgttctaaagaataaaacctccaaattaagcctctaaaaggtgaaatccatatgcaacattttaaaaatatatataatatataaaaactaaggatgattcgaggacttaggagaggactgaatgggctacgtaggggaaaaaaagaacagcaaattcaagataataaatgttctcaagaatgacactattctgcctgaaactgcctggaataacaagtagaaaataaaattatatacttgaggatgaattctcccacagagctcagcggccagtttccgcacatcttcaaattcaaacttgtaaaatgccctgaaatttatcataaattaacattatcataatgcccatttcagctttgaagtctagtaatgtttctgcaaaaaccaaccttttgaaaaggaggctagcaacacactcatcactgaagatcttgtagtctgtgtcatctaaacttaaaaaaattaaaaatatatgagaaaaccagtcatctcagacacagaaagagcgtcagtcaaagaacatcacgaatgcagcagtcatatcatatagaaaagtaaaatactccaaaagcatggacaaatgatagtggcatttatagtatgtatgcatagaagagatatcacaaaataatagtagtttgatgaataaccttgattgataaatttgccatacatgattgatgactttaggtcattaaagacacttaatggaagcattctgataataagtaatgggcaaaggtgctcgaaaagcaacttctccacattttcagagtcatcacttgcaaggtttcgattctcccatctggagaagctgctctcatccatactgaaaaaagaagtgtggatgagtaacaacaaaacacaactataaaagttcgatattattaagaatatctcaagctcaaaatattttgacaaaaatgcagcacatattcaaatgatgatatcttaaagaaataaactcatgtttaagatctttcatttttctacacatataaaggagaaatttttcatggacacatgctttatgttaaaagccaatatgtttgtcatgaacatttagattttctttctaaaaatggacaaaaagaaatgcgtaaattctagtttctagaaatgggtttgcagaatgtcctcaagggaccaagtttatcaaaattaggaacaaaagtatcatgattcatggtcatgattatgcaacctaagctgcaattgtagtacagcataataacatataatgaagttcaatcattattatgattatagatatattggtgtgtaaaacacttactccttctgtccttttgtaagcaacaaaacgtgatcgagaattatatcagcaacttccaccaggtgtccacttatataactcaaaaacctaacaatagttgcatttgaaggctgtgcaaacatcttgtcaatcaatggtccaatcaagatgttccagttttcaacctacaatgtttagataacatcaacaagtgctttatgaactaacaaaagactctcaaagcgatattgaaccatcaaaatcttaaacctcaaccacaaagtgttcaagagattgaggttgtctattttgatcacataaaaatgaaatcataaaattattataatctggctttgcaaactcaagtatgtcatccctttgaacctaaaaaagctttgaaatataggagactgggtccctaaaactgctcccgaaacttcacaagatcatcaattcatgagcatgatatctaaaccgcagcaactaatgctccctgccccaatcatacacacaaaataaaattacggaaagtattacaaaaagtagtcttacactccttgaccattctgggatcaacttgaacacttgatcagtctcggattttgatcctgtaaagagtacaaaggagaagagcttaaaactatatttattatgggaacaataacaataaaaatagttgagaatcacttcttaatgctctaaatagtaaccaaaatggagagagagaaaaattacaacaagaatacagttgacagttcactaaatttctagtccatctcaaggtttaaaatgattgaaaaaaaaaataatcaaacctagcaattacaaagtatgaaaacacaccatctaacatttaaaacttctatattaaattagagctgatgaattgaaacgatgcgaacgcaaacagacaagggataatagcaggatctagtaattcaaaacaccgaaatagtaactatctaccttccccatttccttcacttctctgaaaattaggaccttgactaatatttctgcatgaggtgatgagacagtaaggaatttcggatttaaattcagcatcttggtatcatatgatagatccataaaaacgactttagaaattgaacttggcaatttgaagaagaaattaaaaagtaccctagacagtcaagcagcatgcatataacttcggcagacttattgtgatatttgagcaaccgtagaagggcatcagatgcacatgattgcactctttcatccgatgaataaacaagacgaactaacgaaggcaaaatcatggaaggatctgaaaagaaaaaaaatgagatgcaaattgcaacaggaaacattagcaaatgaaattgaaaatagatccaaataacatggaaggagattgattgaaacttttatttgttctcttttttttttgaaaaagagaaaagatccttttgtcattgacaggatccttcccgataagtattagaagcctcccttgtggtgggaga

SEQ ID NO: 301118 - DNA, 1506 bp, Cannabis indica
acactaaattaattataatttaattgtttgattagtagttataaatataaattagtggccatacaattttttctattcaatttatatatatcacagtatcaaattaatagttttttataaagttttttatttttaattataaatttcaatatgtcaattagtacattactaaaacaacttaaatggttcattaaaaaaataaataaaagaaatgaactattgcgatttttgccttctaaacttttcaggccactaaaaattttcctcgaactattgctattgttggaattaaggatttttgtccaattccatttaattttactaacgtaacaattgtccatctatcaaatgtgtcctcagagctttgatatatactaaattatgtcttctgaacattcattaacatcatacttttattagtaaaattagacaaaaatctttaaatctacaatcttaataatttaaggagaatttttaacaatttttgaaatttcagagtgcataatttagttcatattttagaatttgaagagaaaaaaattgtttttttaaatcaatttattttttatttaccctaaggagcgataaatagaaaactctgtagtaaatttattttattgttaaaatttcacaaataatataaactaataattttttttttatttaacatagttgattaaagattttaataaattagttaaaaaaaaccttaaaaactataaaattatttatctagttaataaaaaaaaccattgaaaatagagaaataattttctaagtattaagtataaacaaacaaaatttaaattgatctattaaagtaataatgtatacaataacaataaataaagatgttacttatagggtaggacatatatttttattataagaaaaatagataagtagataagaacactcccaatgactttttcactctatttttcaaaattcttatcaattttttttttttttttatctcacacatttattttacaccatacatcaactttttaaacttttttctatataatttaaataatttatttataatacacaaataataaaatattattatattatgttatgttatatttatttatttgtttatttttacacttattttttatttttattttttttgacaaatatttttacacttattaattaaatagaagacatgaaaaatataatacaaaattatatgcatttactatagcaataaaaggtaaaaaatttgctaagagttaaaataaaaatgtcaaagaatctcaagagtttttagctgtatttaactagtagctaaaaattgttttattatagctcctctattgtacatgttttttttatatatttttttttaactctttatctatatttttacctagttattctacattagctattctaaactgagtagaaacatagaaaatctaaaacttaaagaggaaaaaaaaaaaacaaaaactatagagactatattatctataattacaaaaaaaaaaaaaa

SEQ ID NO: 301119 - DNA, 3168 bp, Cannabis indica
ataaaaataactctaaatcttagagttatcaaccatccttaacataaatagtctttcttttagcctcaatctatcaatgacagtaagccacaaaatatacctgtgtttcagaattgaaagcctgttccaaactcctccttgccatagttgtatctaagtagatgggcataaaaccttgcaaacttcttttaatccaattgctctacttagagtaatcaatagtggggattgccttgagtttctctttcactttcacaacctatttccaataccagctacttgttgtaggtgctccgtattccttccacttcttttgttccaagtacactacatgtacccatttgatccataaggaatcttgttttgtttcaactgcccagacatatttccctattgcagcttcattccactcttgaactctcctgaaacccaaaccccctgctttttttggtctgcagatttcatcccatgccactagtcctagaccatttgcctcggctaaaccttttcaaaggaagctcctacagattgtattgactctctgaaggactttcttaggaataatcatcaattgggcctagtacgaatggatggacataagcactgaggtaactagcactgctcggcctgtatatgatagattttgagagctccaaactcttatgctctgcaccatcttttcaataataatctcacattctgaagctggaatttgccttgcacatactggaatccccaaatacttgaaaggcaaactactcttgctgaaaccagaaactgcagccactctattaacttcatgttcattcatttggcaacaataaattgatgacttggtatcactcggttgtaaacctgaagtattagagaacagttttaggccttgcagcattctataaatcgacacataatcaccatgacaaaaaagaataacatcatcagcaaaacataagtggtttacccttggcttcccacatctttcatgaaacttgaagtcttcttttgtacccactttcatcaatagctttgacaaatatttcattcccaacacaaaaatcaaaggcgacattgggtctccttgtcgcaaccctcttttcgcttcaaataatccatgcattgtcccattaaacatcaagctatactttggagttctcacacagttcattaccaagtttataaattttggcaggaactttagttcaacgagcatttccccaataaaagcccattctattgtatcatatgctttcatcaagtccaacttgatcatacattttggcttcaagttattcattccataatggcgaaccaagtcttggcacaccattatattataggcaatgtaccttccttgaaaaaacccactttgattctaagatctgatgtgcggaagaatcttcctcagcttagtgcaaataagtttggttgcaactttatagatagttttacaacacgctatcggtctaaagtccaccactgaatctgggcacttgctcttgggaatgagagtcaatgttgttgagttaatttctttgagtaagtttcctatgtgcaaaaaagacagcactgcttcacaaacactatctcccacaatatcccagttgtcttggaagaaagcttcataccatccggtcccggagacttgttaccaggtatctcaaacacaactgcttttacttcttctttagtgaaatcagcctgcaaaaaactagcttgatcttttgaaataagaggaccaagttgcactatctttctctttaccttcttcatatcattcattttctggccaagtaaagattgataaaagtctaagaaagcttcgattacctgatcgggcttgtgttggtctttaatcgaataaattcaatttgtttttagctcttatacttgcatggaaaaaacttgagttatcatctccttccttaagccaattcaacttggctttttgttgtagaaacgagatgtaattagcatgagtctcagcatagttcttttgggcaactttttcattctccactaactctttacttctaggattctactgcaattcctgctgaaattgcaccagattattgtacacccgggcatcttcggcttgaatatccccatacttgcttctattgatttttcttagttcagccttcaagagcttcattttctggactatctaaaacataggagtgtcgtctattctcttctaccatatttcttttaaccagttctggaactcaggtccccccagctatattatgaaatacttgaatggtttcttgcctttgcttaattctggatttaacgtaaggattcgcagacaatggtcaaatattcattcctccatacagtgtacttctgtattaggatacttgtctagccatttttgattagctagaattctatctttcttagaataaattcttgtttgttgctccaagtaaaaaaaactacccaagaatttgatatcctccatgaaacatttctccacacattctcgaaacaaagtagagggatgttgttttttgtttcccccgatcctttcttccacactcaatatttcattgaaatctcccaaaataatccatggaaaacttgtattcttggaaatactaatcaaatcctcccataattgccttcttcctatttcatcatttagagcatatacgaaagttaccataaactcttctcttcccgctattgctatgacattcagatgcattaattgactagtgtattgtaaaatattcactgcaaacatccctagattccaactcactattattcttccccctttatgccaagcattattcgtccagaaataccatcccgaaaacatatttacatatacaaccccaaattgtaagactgtacctttgtttcaaggaaaccaactaaacccacttgcattgtaaaaattactctcttgactttctcttgtgaaaaactgagtttttgcaaatgtcaataatatatacaaaaatataaaattgtatacgtctgcagaagcagaatgtaattctgttactgtagagacaagttttgcagcgacaaaacagaacagacagaatataaaaataattgtagaacagagatttgcacggggccacacccagagattgaaatcaattaataaagtattaacaattacaaagacaattgacttaaacaagttta

SEQ ID NO: 301120 - DNA, 5578 bp, Cannabis indica
ctctctctctctctctcttaccttgtgaccctctcttattgcttcctctgcactcctatttactacatcaattgccattgggaccaacccttttctcctaagtctctcaactttcattttgtaaactttgtctctgccttcaccctctttggagccagcctcctctctgttatgcctttctctggtatgtatgtcattcttactcagattctgttttactcgtttatgtcctctttctcctttctctgtactttcatttatgacttcttcaaggtgttcttattgggaaggagaaatgaaagtgggatcttcttgttaattctagattattttttaagctacttatttgataccattattgataaattggctggaaaagaaaaatgcaatcttgtattcaacggactgcctgacttgtatactgttcatataatatgttttctgtcattgaataggaagtcttttaattatagaagaagaaatggactcaaagttttatttgagtgaatagttgtttctcatatatagattgaggtcctggactgttgtaaaagtttgtgccttatttaccagttgatgtaatgtggttttatattgtgaactaagttgagtaattattatatattttctatttctgtagtaattgggcattgtgagaaggattttatgactcccttcaaagaataatgcattaagcttttgtgttagatttctctttgcggaaaaaatggaaaatatttttgaactaacaaaagattgacttgtgtaatttgtaaagttaagtgtctgacacttcttctaacgcttatgttgctattttctctgcattactttagggttatgctaagttggataaagacatttgcaatcagaaatgggttctggaaacttgtttagaacaatatttagattaaagaaatctaaagttggttcaaaaccagtgaaggtaatagagcttctctgttttgtccttggttattttctgtcttaaaaaaccaaaataaaagtgggcacacgaatgagatttcttatttttgtaaaaacaggagtccacaaaaccaaatggtataaaagtgaagaataaatcacataagggactcagtcgtttcatgaatggatcccataacatgccaattgaggatgtagctgcaactcggatacaaactgcatttcgtgcatacaaggtatgtttgggtacacgttttgttcacatgtctttagacatttcaagattggctttaccaacttacattggttatcaatgtaagctctggtctatttcagagacacttcttagaaacttgatcttacattgtttatgagaagtgaatagacatggtttctcttcaaactgtatgatatttgattacttttgacttccatttccaagtgccaggaaggaataaatttctgtctgttactagatagagttcattaacatagattctttattcagaagtgctttttcttccatgaaaaccttttcaaagttaacaaggtgctttcatgtactatttatgtttcttgctaagagtagtacaatttattgttttgtatgttacaggctagaaaagctttacgccgtttaaaaggggcagtaagattacagacacttgcccaaggctatcctattaaaaagcaatccactactactttgagtcttatacattcatggtgcaatatacaaacccagattaaagctcgtcgactttgtatggtaacggaagggcgggtaaaacagaagaaactaatgaatcaacaaaaacttgaggcaaagcttcacgacatagagtgagatcacctattttcctttgtgggagcttagatacattaaatgtttcgaataatcaggcactttaacttgcttcatgaacttctgatactattttatattatctcattctacttgtagttgtagttgtggaggtagaaagaagatattgtttatagaattttatttcaactttggcatctatgattaggacttgttaacaatttttctttagtcaaaactaatgcttgaataaatgaaagattacaatcaatcagttggagaaaaatcacccaagaggatttgctacaatggtaaggcatggggtttgctcccacaagggctgaggttcgagtctctcctggttacctttatagctattgttatagtttcctgattccaaaatattgtagggcttggcagtgatcatagttccaaaaaataaaatcagttggagaaaaatccacaaaagacgaaacagccaaatagccagccaatgtctaatatttgtcccacagaaacctctatgtctacttcgattctttcaaagattatcttttttgtttctttcttgccaaatagtccaccaaatagggacaacataattgatagttaagcagatgatgacatgacttgatgtctgttacctactagcataaatgattgtacataagcttctgcaatttcaacagccacccatggtatcggtactttggtatcttaatcataagcacatacatatatatgtaatatgcttcctaaagttgctacaaatgttatgctaatagctgggattgccttcttagcttttcctgactgttttacagaacgtgctgcttgagttgcatcacccttggcagagtgtcttgaacaaatcaagggacactatctttttctctcttaaataatagttgatggatttcaggtggaatggtgtggtggctctgaaacaatggatgaaattcttggaaggatctatcacagagaagaagcagcagttaaacgagagcgagccatggcatatgccttttcccatcaagttagtttttcttagtgcttttccattacatttccttatctttgtacctgcaagacactcagcaaacaagctctaattgcagtggagagccaactgcagtcaaagccaagggttgggcaatgatgaacttggaaaagctaactggggttggagttggaaagaacgatggattgctgctcgtccatgggaaagccgagttgcacctcaattcatcagcccaaagaaaattcagagcaagcaggccaacaagattagcaaaacgccaaaaactccaatatcagttaagacctcttcaccaaatgggaaattaagcaccaaagctcggaggttatctttcccatcttctgagaaacttgttgaaaatggagaaagcaataaagtggaagagacaaatataaagaaagaagagttggtatcctagcaaaccaaaatgtgggttttatattgtatcactgaaattgcaggaagtaagagaagatccatttttttattcccattattaatgtatttctattttctgtacatggagtggtgtgacagtcatatgctgtggcttgataagaacaaaatgaagaaaagacctggatttgggattgacctggtcatttttctatttttactttgtatacctacaaaacaatatggtatttgtaatgtaaatagaaaatctatttgttaagagtggcagatattttgttctttgttttcacactgatttctctattcctttctttgagctatctcatgttacaaaccataaaattgacaattacattgtaattttccttgttatgtgtcttggggtggagagaatgaaaaaaattataattgtcacctgttttgtttttttgttcaattaaccaagtaaccagcttccagcttcatcgaacagatgccaaagagaaattcaattaatataaaccttaaaaggtgacatatgcctcactcaagacatcaagtcagagacaatagttatatttcttcgctaaattataatgcccctctattattgaagttagtatctatgttgccaatgctctgacaaaagcctacattttctttgctggaagcaattatttaagggccttttaataacataggtggtctctgaagtagacaaaaattgtcgaggatctgctctctcatcggtaccttacgatgtttcattaccaatttaccactaaatgggggtgggggggaggggttaagtgctcaccagctgaaattaatatatgagtagactttttctttctattatattggatgtatgggagcaacgaagtttcataagacaagtgtgacagaatgttcaaatattacgaataaaagataaacagaaacaatcaaatatcacagaggagatagaatgacaactaatgagtcgagaaaaacacaaatttgtgtacaatcattacccatattttctatccttattgagcctacatcacataaaaattgattttttttatcctcagaaaagatattgactgcaaggtgattttcatcactgaaaataaaaacgaagaacaacacttggattacattttctgagacagcatttttgcttctgctcttcataatggctttgagatttaaatcccaagaaatcaaccagaggaaagtccagtagttgaatataagtgggaatttggtgattgagtatgggagtgaccatttaaagaaattggaggactagctgaagcaagaactgagattaaattactggactgaaggggtccccgctgagcaaaaaactcttcttcccagagaagtggctgctgcagtattgcaggcaacgagttaaagataaactcttcttcatcattgaatgaacaagaattcaaatccatgaaaactgtactcaaggttgataaatttgtaggacggctgagttctccgacgaaatcaatgggattcaactggtggcaatggaaattcgaggctttggaaggctgaagattattttcagtaaggcagtcctggtactggcttgaaaaggatgtagtaccaccagccattgagaaaatgatttcattgttcatggtgatctcgttcagaggttgttgggcctctatattacaaccttggtaatgctgaagctgatttattttctcttgacatactccttgctctgtctgtgttacagagttagaaaaatcagctaactcatagttttggccaggcagggcctcaagggatgcaatggcagcttttgccttttcgatgagccaatcaacagctttacttggtcgatcatagccaagccgatcttggacatcataaaactgtatggcagtataagctgacagtcgaacacgccgatctcttggacctctagaggtggacaccttgttgtgacgctcctttcgttctatgggccgtgaaacatgcccgccatgaccttgtaaagaaactcgtgaattctctcgccgcctctttgtctctccaactttcttctttcctcctttcttcagtgccaactgcagggagtgacaacaacttttcctaaccagattctgtgtaatttgtattatgatcataagttttatcgcaaagtggtacatcaacatgttctacctgttgatccacatatttcccaaccctattcacatactgctgttctctttgttgtaacatttggttaggaacactctctagtagataactcatgaggggatctagctttttttcttcctatgctgtatcataatatgacactgctaaaaatctccattaaaactctctctctctctctctctctctctctc

SEQ ID NO: 301121 - DNA, 3402 bp, Cannabis indica
aattggaacatgacaattgtattcgtcatatctttagcaattaacaaaacatggatctttttctaactttcttcaatcaaagaacaatagagacaaaactatcactgaaaaattcaaagcacgcacctatggcctccaccaacagcataatcactttcccatgatttacaatgtattctacaaaagactgtacaacgtaagcgcagccctgcatgtgaaagtggacgtgattgaatcatttagttttggttgttacagaatttagcctacaactcataattagttcccaaatgaaacaacgtaaagttggcagagtgtgcttcatcaacatatcagcttacattcttcacatgtctggtaactcctggaacatgtcctggcacttatttcccaggagttacagtgacatgtgaagaagatattgtgcaaagaagaacagcaaaggaaagaaagaataatcacatgagtaataagtgtatatgaattttgtttgtaacttaggcgttcccgtgataaaagaaaaagggaaatgataatgactgtagaaatttgatattatcacaaaataataaattaaaaacacctgtcaagcttcatagaaaggcttctgtttagcttctttctattataattattatttgggccattgggtgtgtgaacaattcagattgtacgataagtaaaaaggattacttgtcagttatctttctctgtttcactcttcattgattcgtcatcactgagtcagaacatttacctcttctactgcttatatgcagtgaagatatcctttcaatttatatctgttgttcgttcaacaataaattccttccgaggcacaagagactagcgaaatgctaagttattcccacaagaaatagaactccaaacctcacaaggtcaaatcatgagcctaaccactgaccttaattatgcttactgatatggttttagtgttcaaaatacaaatgaattgtatggacattgttaaattcgagcagagtcatgttagatgttagctgttaggagttagttatagctttcagttatagttgttacattctgttacaacagctatactattagttagctctttctcttgttttctcaattgtatataattggtactggaacactattggtcaattaatgaagatcagtttctctcaatctattattctttctttcgtggtatcagagtaatcctttaagttctctctctcaatctttgatcttcttcttcctcctggttcgtctactctgtcttcttgctctgttttcatggcaaaaataaatccacaagcatagcaagcagctcctgctgcaatcttttaccctgtgttcttttctcacgaactttctgttaaactcaataacaacaactatctcctctggcagccgcaagtgatttctatcatttgaagccataatcttcaagactatatctcagatcagcctcctccagcaaaatttctctctgatcaagatcgtgcgttggatattgttaatcctctgtttacacagtgaaaacaacaacatcagctcctttattcatggttcatttcttcaatgactgaaggagttcttacatgagtggttggcagtcaaaccacagctcaagtctggaacactcttgaggtatacttctccactcaaacgtctgctaaaattgaccaattcactaatcaattgcagaatatcaagaaaggagccttgtccatcaatgactacttgttgcgtatcaagactgttgtggatcttcttggttcagtaggtcatcgtgtcactgtcaaagaacacatcgctaaaatcttcaagggtctacctgttgagtacgacaccttttttatctctgtgaactccaaaaatcaaccatacacagttgttgaaattgagtcacttcttttctctcaagaacatcgtatggacaatcatcatcgagatctttgctaatgtcgccatgaatagaaatcatcgtagcaggcactcttatcttactgctgattccaaatctaacttcaatatacctcctggttttgggcgtggtcgatctgtttggaatccctatgctattcctcctcgtggtggttctttctcaccgccacctccttctgctactggtagaggtacaaatccaaatccttcaatgcctgctacttcaaacaacactagttcacgcccaatctgtcaactgtgttcgaaacctggccatcttgttgcacgctgttatcagcgttttaatatggaatttccaggaattggagctgctaacatggatcatctcacaacaaatatagctacctctgaaactgttagtgatccttcctggaatcctgactcaggtgcaaccagccattgcactgctaatgaatctgtctgtactcaaagagaaccatattatggtcatgaggagattcatatgggagatggtgttggtctctccattcaacatgttggtaagaaaaccttccacggacctttcacttcacaaacattacatctagatcacttccttcatgtttcaaatatcactaaaacttgattagtgtctcccaattctctagtgataataatgcctattttgaattctatcctaaccattgttttgtcaaggatcagcattcgaaagcagttctcatggaaggccatcttgattgtggtctttatgtcatcccctcctctcaattgcagtatgttcaatccactgctactcagtcatcatacaaggcccccctacagatgtagtgtactccatcaacaacattcaagcttgctcgggtaatgtcaattccatgctttctctttggcatagcagattagctcacccggcagctaaaactgcaaagcatattatgtatatttgtaatatacctcataacaataaaactgcccatgacttttgtgaagcttgttgtaaaggaaaaatacataaatttcctttttctttgtctacaattgtgtacactaaaccccttgaattaatacacactgatctttggggtccttctcctattctctcctcaaatggtttcagttactacataaatttattgatgcatattctagatacacacgggtttctctactcaaatctaagtctgaagctgttcagacttttatcaactttagaactcaggtggaaaaggaattggaaacatcaatcaaagttgtccaatctaactatgggggagagtatcaagcctttggaaaatacttagtgtttaatggcattaatcatagactatcttgccccacaactcatcaacaaaatggagttgctgagagagaacataagcatttagttgaaatagccctcactctccttgcacatgcatctttacccttatctttttgggatgaaagggttagaactgctgcctaaaccataaactaaccaaacac

SEQ ID NO: 301122 - DNA, 3012 bp, Cannabis indica
atctttataagataaattattaacacaatgggaattacatatatcttttgggctaaatgttcagtacaaactacttaaccaaaaaaaaaaaaaatgttcagtacaaactctctaccaagactcttaacaaaaaccagctacaatttaaaacaagaaaaacagttacaacaaacccaagaactaaccagaaaattttgctcaaccagaatttggaccaagttttcaatccaaattgtagcatagcacctagtactatagaaagacctactgctaagagaagaagagtacttgaagccttattcatgtgagagccatcgttgtagagagaagctctcgaattgtattcatacaccaaaaaaaaaaatatatatgtattttgattatttacaacatatatttattatcaaaggtaataaatataaacacaataatagttttgacatgtttcttaagctatcttatatatgttatagaggttaagagttcaaatcctggtaaaagtatctttattaattttaatatttaccatacaaaagaaaatatatcccctcaactttaattctagggtttggattaatgaagttcaagcactctgagagacgtaacccatctttctagggtgaactctaagatcaaatgtggtattcttcttcttctgtgcgctatttgttttctctcaaactcaaaccatatcttctattgtgttcatgaagatcaagcactctgaggtagcttgacagagacgtaggccatctttctagggtgaactatgagatcaaattgttgtattattcttcttctgtgcgttatttgttttctctcagactcaaacattatcttctattgtgttatgtgtatgtttgtgctcttcatactgtgtgttgtgatttctgtgttgtgtgtgtttgatctaagagattgcagacgatttctgaaatcttgaaaccctagtttttctctcttttggaagagacatagtcttgaggtgtttctcgaatctttagactgagtgatcaatttgtttttgttagggtttgcctgtgtaaggcttggcttgttctggcttgggcctttttgggccattgagtttttaattttactattttagttgtggatacataactaaattgaaaaataccatagaaccattttgtgtgttaattttgtatcctgagtgtgtaggagctgcatattctaacaataattatttgtgaaaatattactggtaacaataaaaactccctaaaaacatgagtgatgagtgatgagtgatgagaggtagcttggtgtttgcggtgcgggtgatgcagtttttaatattttttcaaaccaatctgtacatgcgatttttttaatttcccaaatcgcacccacaccgcgaaagtaaaaaccgcaaaaatggcaccacaaaatatagtgcggtgcggtgcaatttctgcggtttggactatcattaaataattaaactatcacaaatacattaaaacttgagtaacacttgtcaaaaataccataaggcttgaaaataaatatgaaaaaaaaaagtttcaagtttcaacaatacaataattagtgggcttggaattggacctaaataaatataaaacttggtatttttataatatgcgatgtagtgcggtttaaaccgcatattaacaattcaaaactgcaaactgcaaaccgcactgtaccgcgcggtttttaggttaaattcaaactgcgactgcaacgaaaaaaaattcaaaccgtatattttttgtggtgcgggcgatttatgcaatttgagcagtttaatgaacactcttagtaactaggcactatatttaaattttaaagaaaagaaaaacaaagatgggatttgggggaggaggattgactattgaggagggagacaaaaagcattatatatagtataatatagtattagtatgtgcttaaattattattcattcccaatcccaattgccaaattaacgagagatgagtttgatcatcgaaaactgtgtcagtactactccaaactccaagaagctagaaaaagaagaagaagaagataaaaaataaagaaagatatgatttttggtcaaaatggcctccctccctttcctgatcatcatcatcataatacaattcagattcagattcagattcaggattagtcaagtcatcaaatcaactactttttacaaatatattatttaatatataatattctctttgtcctagctacttctacatattattcctcttcctttaatattttcaaaataataaaaagaggaaatagtagtatttgtcataataataactgatcgatatggtgtgtgttggcactatcaaataaatgcaaaattcaaaacaatttaagttttctactaaccccacacccacacccacacccgcacacacacaaataaaaaaatacaaaagatatacatgatatcatcacttaaagaaaatcatgttattggtattaatttatacaaatatatatataatcttttatttgaattcatgatcattttgtattaattaagatagccgtactactaatcataaatatataaagatgatatggttttaatttgataaaggggttgtgttaaaattaaggtcattataattctcagtatgtatacttatagcggtggaaattaattaataatgttatggatgcaagtgaaagtacaaatatatatggattaattgtaatcgtggattgttattattaacaataattagtacgtatacaacaattcagctgaagtactatgtgaatagagagagaagcatatatagtatagttattacgcagtactttttatatttttatatataggtagtaatttacgattgattagtgatattctttaaaaatgataatatttagttacattaatattactataaaattgatcaaggagtgtattagagcatctcagagttgtccattggaattgtcttaccatatatgtaacatgatctaattttttaagactaattttatataaa

SEQ ID NO: 301123 - DNA, 3512 bp, Cannabis indica
tacaaaaataaaaatatagctaaaaggtaaaaaaaaattgaaaaaaatacacgtacaataaataagctataattgcgcaaattttaagctaatgaacaatgcttagctatattgtctaactaaattattagctaagaacaatctcaacagtttctttactctgtccttcaaaatagatcactaaatcaccatgttttctattttacatcaaacttttacaacataccatccatcggcttctctatcttttgtaaatattgtatttttatttattttaatatttctcacttctaataattgaatgatataacgaaattgatgtatggtaaatgtaaatgtataaggtaaaatagagagtaaaatataggtgtggtactttgaaggatggggtagggaagctgttgggagtgcttagtcaagttgtttcaataatctaaatccttcacacactttcagaaaagaaaaaaaagaaacctaccaggcacagtcggacctgatccaatatcagttccatagtcagcaaaaataactcctccaacaggccccacctacaaacacaagatgaataagccagcaagaccataatatgcgaagtgaactagagaaattaagaatcttacaatcattacaggcttttaaaaagaatttcatgatacttgtggatgaagaaatgtttacaattcaaatatgatttcaatacgtaccatggggaaagaaatttctccagagccgatcgcataagaccgaccagaaccaacagcaccttcttcgtatcctctaacactatttgttccaccaatggtaaaagcttcatgggggtgaaaaattgccaacaacatgaccaccggataaactagaaatggagacaatattgaaaccattaaaataagcatgattattagttgtaacaaacaaaaataataaaccaaaacaacatagaagcaaagataatatgataattttccaaccacatttaatttagtttcagatacatagcagtaacaggtacaataccttaaaagaagtcgagctgggccaatttgaacatcctttcttgcacgggcattcacacggttaaagaacaaccattctgacaacacaggaagtccttgctccagattgaaaacaatctacaaattcaacaaaatcaggaaagatgcccagttaaaggtatatattatatacaagtattgtctgataagtgttacggggatgaaacttccaattactaaccattggtgatccatcaccagaaccagtgtagacagtctcaaatctagcaagcaatgtatgatcatagttcttgccgctgaaaccaaaagcaaaaattgtaacaactagtgaatgacaattagaccatatagtagtcccatgatagagcctccatgtagtaaattacctagcagtaagggggctgccaaaacaatccttgataatattttctcctttttcattatgagcttcagtttgctggtagaagatgcaacatacattgatttataagagcaaaaataagcttctccaggacaaattagaaatggtattagaacgattgaaaacccaatttggtatcaccagctaagagttaactatgtacctgaaagattagtccagctgtaccactccatttaggtcttaatggtcggctaaattcgataccgcctgtgacacgagcaatggttgggctaaaatcctcatcgtgcaccttaccgtgaacaagtgtgccaggggttctggaattctagcaaaataaatatcactcaagagtttaatatctcatttatcacgaaaaaaggaaggataggacagataataataattaattacctgacccataattgttctagaggttcgcttatcatctcctgcaatccatggatctgtgtagtttatccgaaatattgagtcaatttggcctctttctaatgaaacatggaatttctggtttcttccaaatagattcctctgagagtacgcaaagctacaacacaaacaatgtataaatgagccgaaagcataaaatgcaatatcacaaaaatgtaaatggattttgaaccaaacaaattaaaagttctctagaaatgattaacataaaagtgctcaagtatttttccactgaatggctaaggcttttattgagccaaaatctagagaagctaaaccggggcagaaggaaacaagctcaagctaatttattgggaaacttaactgtctcccttcgtaccattcattaattaaaaacaaggacaacacttagtaagaggaagctattattacaatttgagtcgcaacaacagggtaaaaaaaagctatgtgacgcaagcctaaatgattaaggttgatccagaaaaaaaaaactacatattcctcactcctcattccaaaccctgcatcagattatggtatggtctgaccaagtagcacataaagaaaaagtttgtgggcttaccttccaatgagtcctggtaaaaggccatttgtagttctacattatgaaatacacctcattagtatcatatgaaataacaattaaataataactggaaattaattatataaaagtaaataacaattaggaacattacttacccacttgagataccaccaccagctgaaaaacctccacttggacgctcaacaacattcatcaccaaatcaactttaccagtatctgaaacattgttgagagaaatttcaaataacctatagcaatgcaaatgaaaaaagagaaaaatctacaccagacagtaaaatctaacaattaatttcaaacttttgcccggctacctataaattaaaatatagattgttatcctgaatttgcattccgtcttgttagttagcctttagttttaaaaatcaatcgaagcgtacaccttgaggcgaggtggtgaaaaaacatatctgaggatacgcctcatctgctgttattgaggcatacggctgacactaatagggtgtacttgaggcgcacgcctctaaagtgggctttttttgtgtgtgtgtgttagcactgtcattttgtgagctggtttgggctttatttttgtaaagcttttctaatgggatttagttttggcctttttttaacagatatttatagaaaatataggaaaatataaccctaaaaactgtaaggctgtgtttggtaggtaggaggagagtaggatgggcgcagagttaatgaaggatgaagaatataaggaaaggaaggcggaggagaataatgatcattttatgttgtttggtagaaggatagagtgatgtagggatagataattactaatttataaaattactgtattatccttataattattttttaataatatctattgagggtatttttgtaagtaaaaatattaaagaggggtagtttcagtccttccattaatggagggattctaaattggaggtttgagaggatttgttatcctctcacctctctttcaatccctcttgccaaacaaatgaatttgtcatctcctcccacctctctccctcctctcctc

SEQ ID NO: 301124 - DNA, 3816 bp, Cannabis indica
attcgcaaattattatgggtactagataaggacatgcatattaaactttattatcctcacatatgtcactactactattagattattgaattaggaacgaaattagttgacataattaattattaataataataatccccaattccactatcccaccattaccctccttcccaaactgccagcgtgtccatttatatatggtgtttttagtttatacgagtaaatcattactatactaattatacttatcctttcattaaataaatactcataatacttatatatagtaatgataatcaaaaaatggtagtccatcgccgttttttgtcgtcagcgttgtacgccgtccacgttttcttattcactcgagaaatattattcctgtgtttttatttcacctctattattattattattattattattattattattattattattatggctaatcaaaatttttattccccgtaattgttacgtgtactaaatcatactcgaaaactattaagttgttgaatttaaagaattttgtttaattttagtaaaaaagtctaacataaattcagaaaatcgttatactctcattttaagtcctggttggagaaataggacacggaatcttggtatagagaattaatcagtctaacctgcttttctgtcgaaaaaattcaatctcatttatcatgagtcatgaaaaacgcatgagacaaattataatcacaagtatttcattgtctgtagcaccaaaataaagagctaaagaaactacacacaagctagaatcaatttcgttacagagtcgattcactggattgcactaaatggcatccgagtggcttgtattaactgatgaaagatcaaagatcccctacatatacgaaaatgggtccattaaacccaaaaatcataattgcaagtagctgatgaatttatgtatttctagttttaaaaaaacattatggtacaacaaaaatgagtcaaaattcaaaacccgtggcttggctagagcaatagcatatatagtgttacccaccacagacctaactctaattaatgttacatttttattttcatggcttgagaatgggaccacagccgcaatgaacaagttattttcatcaaccaaaaaatatatgatgatggtgattatgaacatggagatgaaatggtcggtcgaagtcgttttcttccgatgtctgagtggacacaattgtgccagctcagctggaccaaacattacaatttattttttctctacataaaattcttcccgttaaatcaatagcaagggcaattatgtaattcaaaagatggggctagaaaatgattggtcggccacaagataataaaataaattgaatttaattatagatattggtcccaccacctctccaccttacttcattccaatgggttatggaggttatataaccactctctcttactctgtctctcactcacaactcaattggagatatcaccaaacaaataacatttatctttttacattaaaaaaaaatggagggcaaagaagaggatgttagattgggagctaacaaattctctgagaggcagccgatcggtacggcggctcaaacccaagacgaagggaaggactacaaggagccaccaccggcgccgctctttgagccgggtgagctgacttcatggtctttctacagggctggaatcgccgagttcatcgcaacatttttgttcctctacatctcggtgttgactgttatgggagtcgtcaaggacaagaccaagtgcacaactgttggaattcaaggcattgcttgggcttttggtggcatgatttttgctctcgtttactgtaccgctggaatctcaggtaattaaaaagaatcatttaattttttaaaataaaaacaaaaaagcatatcctgaaacgcccaccgtggggctcgaacccacgaccacaaggttaagagccttgcgctctaccaactgagctagacgggctttgtttgattactgtatggttaaataattaattattggtactattaacagggggtcacataaacccggctgtgactttcggactattcctggcgagaaagctgtcgttgactcgggcggtattctacatggtgatgcagtgtctgggtgcgatttgcggtgctggagttgttaaggggttcaagaaagagctgtacatgactcaaggtggaggagctaacaccgttgccgctggttacacaaaaggtgatggccttggtgctgagattgttggcaccttcgtccttgtctacaccgttttctcagccactgacgccaagcgtagcgccagagattctcacgtcccagtaagtttatatcaatatcatagtactctactctggatcgattatcttattaactaatttctcttcgaaagaaaagaaaagaaaaatagttgattaattggtttatattttgatcagattttggcacctttgcctattgggttcgctgtcttcttggtccatttggcaaccatccccatcaccggaaccggtattaacccagctcgtagtctcggtgctgcgatcatctacaacagggaccacgcttgggatgaccacgtaagtctccctagctaccgatctataaatatattatatatatatataataatacacagttggtcttatgaaattgtcattaaacagttaaaagataattttcttggtgagaagtttatacgtggacgatattctatcacaatcgatttataaatagtgccttaacagtatattgaaatttgtaattttgcagtggattttctgggtgggacctttcattggtgcagccttggcagccctataccaccaagttgtgatcagagcaattccattcaaatcaaagtgatgatcgatcatggaccgttgatgatgatcatgatcaaatgatcaaaaacaaaacaaacaacaacgtgaatatgattatatagctttgtcttttttgtggctttcccgttgttgctgctctttcaaaattagatcatctcatgatataattaaagaaaaacaagaacaagccaagttggccctgcttttctttttcaacttgttgctctttattgtctctgtgtatttgtattattatgtacgtaagaatctgtaataatagtaagctttgtgttgttctttatctaaagggttcttttctatttctttatttggttgaagaggggggcctatctcatgtgagtggtggcctggcgtggtctgtatggcagtgacaagtgaatatatgaatttgtgaatttttaaataatatatatccaaaaaatgattatcaagaacgatcacactatatttaatatttatacatatatattaaatatacctgctcaactgctcaactcaaatatacgatgatgaaaccatgtatttttaatattctcatcttcaattcacaaaactaaagcattaaatatatgggaatagaccagcaatgtgttaggtagaattgcaagattggctatgagaggtattagtttgtttgtctcaatcactcattagagataatagcaaaaaaatactgtaatttggtatcttaaagaacaccacaccaatgcacactaactaaaaatatgcttttcgcatccgttgagaattaacacaaaaaaactcatttgcgttataattattctgacacaaatacacttaggaggcgtttggttgggaggaatgaaaatataggaataggaatgggaatgagaataggaatggaatggaataaaattaaaaatggataaaaaaaattagataaaaaaataattaaatttttttcttgttacat

SEQ ID NO: 301125 - DNA, 2423 bp, Cannabis indica
tttgttttttttttattatataatatattagggaaaattttatttgtcatttctttatttggtggcctaccctgaaatcatattttatttgaaactatattgaaccatattttccaggcacaaatgctctgcatgctacaagcaatttaagaaaaaggaacatttagttgagcacatgaagtgttcattccactctgttcatcaacctagatgtggggtgtgtaaaaagcattgcaagtcttttgaatcactcagggaacatctcactggtgggaatataaatataatcaaatgtttcttttgaatcatgttgttgcattgtcttttgcattgcttatcattgataaaattctctcatttaggtccattgccaaagtcaaattgttcaacaatttattccgaacggggttgcaatctatgcctcaaaatctgtgatagcctcacttctctcaatgaccataagaaaatttgttgcctatctgcacctgttcctttagtaagccttccagtatacaaactcctctgggataacttttttatctgttgattcattgttctagtattgttaagtctattgactttactggacatgtacttaatcatttcagggcactactaagaagtcggatgcagaatctcagattgaggtttcaaactctaatgatgtaaacctaattggaagtggttctaaagcggtagctttagactgtgaaatggtaggaggtggagatgatggaacactcgacgtctgtgctagagtctgcctcattgatgaagatgagaatttgctgtttcatgcttacgtgcatcctctaatttctgtcactaattacaggtacttgtgttgttgattatgccgctttctttctaacgagtttattgggaaattcctttttgtttgaaactaggataaactatagcaatttctatgtagagggtacccagaagggactcgaactctgatgcctgaccatttgagctactcctcttaggtagtttttgggcaattccattgcgtgctgaataataacataaatccctaatggttacagatatgaagtaactggattaacagaagagcatctgagtaatgccatgccactaaaagaagtgcaagaaaagatttcacaaattctgtacaatggagagtctactgggagtgaatggtcggatggtgctaaagccagacttcttgtgggacatagtataaagcatgatttggattgcttgagaatgaattatcctgatcacttgctaaggtatttcagcattacgactctctcattaaaaagttatgggcagtaatttatcttacagatgtttgtaggtaagctaagcttgcaccaatatgatcatgtgttgttataagcttctagtacatatttgtgttgttgcctgaaattggcattttcttgtctaacggatacttattttatacacagggatactgcaaactatcgaccattgatgaaaacgaacctggttagccaccctctgaagtacctcacacgaacatatctggggcaagttctatgaaactcaacttctattggttgtcatttttgttgattacggaacaactttaatgtgctttttcaattaacttcacgtgaatcttttcttcttcttcttaacaaaagaagaaatcaattttaatctccattgttctatatcctcaatcattgcattgcattggttttttgagtcactagtaataagctgatgcattaagcaaatgcaaagtgctgtggttcaagtgcctctctttcttggctttccaggtatgatattcaatctggcacgcacgatccatacgaagattgtgtgtctgtaatgagactttacaaaagaatgcgtgatttaaaccacaaagagagcattgaggcatcattttctgttcaccgtaccgaaagcttcagagttgatctgagttcatggaccaaagaactggagacgatgaccccagatgagctttatcaaatgtccacatccaactacacgtgctggtgcctagatcaaaggcagaatgcaaataccaactgaactcttactctatccataggaagatatatgatgaactcttgaggttagttactcaagttttgttttggctcagattaacgccaaattaaatatcattaggatattacagatcttgtaatgctggtgacttttacttaattttatttgtagtgtatagagtttgtaaatacacattgtgtggttcccttcctttaaccatcgcattgcattggttttgacttttgagttaaaactctcttctatgatttaaattttatacatcttccatataggataggtggaaaagaacagcattttttgtatttgtgccataaataagagtacatagggtgttcattggaccacatttaatatttttaggcctatccagatccgatcca

SEQ ID NO: 301126 - DNA, 7426 bp, Cannabis indica
tagtttgatgaacacccctaaaataaattatatgcattacatgaacatgtagttaaaatattatgccaatttgatgctagaggttattgcgctaaaaaattatccatttagaccgtatagattttcacaaagtttccccaacaaattcatgcaatgttgaagaggtaatttaattactctttatgtagtaaattgtttaattaactaagttatatgtatatatatatacatatgttaataagttgaaatgttaattaattttcaaaacagtacataccaaaatttaggggatcaaatgtgtttaaatatgagacatatctaggaatatcactagcaaattgtccaaaataacttggtttttatgtattgaaatatatgagtgacatcgtcccacgtgtaaattctaactgttatttaacagataaaaaaattgtaagttttaattattaattatcttatttgttatattaacaaacaatctaatatatttatactaatataaatatttaactcttttacagtttggagaaaagaagacatatgatgcaaaaattaaattgttaccattacatcgacagtggatagaataattgttggcagtgattcacgaaggcttggattgatgctgaaacgtataagaattcttcttcccttatttttttttatgttaacttgtaatttttatatctattatttttctatgtttaattagatatattaatttgttaacactttgactaattttaaaatatttgtataacatatttagttagaataaataaacttaagtacattgttagtttatttttttagttgtatgaaattaatttaaataaattaaatttgtgaaataatattaagttttaaaattgaaaaaaaaaatgattttctataaaaatcacataccatagggcatcaattttttctaaataaccaactttatagggccttatggcatcagttattatataataattgacgacatagggtccctatggcgttagttattcaataataaccgatgtcatagggtccttctatgtcgttggttgtttttaaccattacaacgtcgcctgaaacagcgtcagtagtaaatttctctaaaactgacgctggaaggctttaaaaactgcctctaaagctcactcaagtgagttaatttgtgaagtagaagacatcattagtgaggtgaaagatacaattgttgatgagattaactcttgtattctcctttgtatttctccattgttgaagatcgaataaagcttggccgaagagcaattcttcttaaggattagtcaacacaaaaagaagtgatgaatctcgttatatcttgtccctgtattatttaattttattttacatttatattccgattttcgttcattgttgaatcaaccattttaatactttagttcttattttgtttgattcttgacgggtgttaaatttaaaaaaattaatacatactaaattaatatgtatgtaaatttgttatatatattgatgaaacaatttttgtacgaaaataaaatttgtttatttcaatgatactttacaattgtcaaggaaaaataaaattttttactagtcaattccattctattcaaataatgattcattatttcaaccaaacaatataattatttttccattaccattactatacaattatcatttatattcttataaatcattccatccaacctcttataattcattccatcctaaacaaaaaagagaaaaaaaaattaaataatataaagggaggggtggagcaattaataagactggtgtgtgataaatattgatttggagagaatagttaaagaagcaaggaagggaggggaccacgtacgaaggcagagttgaaataattaggaaccagataatcacatggcttaggttacagcttttactattttgttcgtataaacttttactgaaacaaaaccccttccacagtaatgtcgttccacaatactagtacatactgggatgctcctgtaattgcagctttcctcagaggcatcatttttttttttattctttctttcatttatattttcataaaattacaagatatattttatttttaaaaaaaaataaaaaaaataaaataaaataaaaagcttcttaagatgctttatcatcacattattgtcttcattccaattgtgtgaatccatataactttagtgtgttaaatgatttatgcttattaattaataagaaagaagaatgataaattgattagtttgaaaagagggtaggagtggaaaataccaatatgaatatgttagtgacatgtgtgatagagtagaatttattgtagggaaaattcctattttatgatttgtaccctgggaaggaacaacacactcaaacagacagaggtaagaggcccctcacctctctactgcctaatgaaccattctttcatgttatctagtcacgtccattcagaatctctaataatgaaccaggtcaaaattaataattttatcataaatgaccaaccaaccatttacaattaacatgcaataaaacataattttttcacttaaaatatattttagtgtatattttcgaattgagacatgaacaaaggagcctagacacaaaattttccaaaaaaaggttacatgtttttttttcttttccgtccttgtttcaaattttaagatagtttttgtcagttttatttttgtagactgcatgacccatctattctaaaagtattaacgtataacacgtatggatcattgaacttatttgtattgaaagatgtgtatttcataaataaactattttataagttttgttttatagtaaatgattttggacaacactaataattgcactatagacctttattttgtatcttttccaaagtgctctcttacgataaatgggcccgaatctagattttggccagttcctctctcagtgttgtaccttcctacacatttggagggcccattaatcatcactgaaattttgctattattctggtaataaaaaatgtaatttattttattatcaaacgtataatttggtaattttgttttccttttaattaaagagagatcagttggcttgtccagctaaaaacaaataataatctttttgttaagaataatagtgctcattattgaaagaaacataaattccaaagttccaaacagattctgaagtggcatttatacttctcatcaaataattaagctttcgttcctccaacacatctttttattttgttagagaaaattgagacataattcagttccagtacaatgaagggtacattaatttgtttataaagtttgatcgttttatatatattttttttttggtagcaccaatcaaatattaataatcactctaagttcaaaagttttaatccacattccccatgactaacaagtagttgtagaccattattttgtctcagtttcaaattttcaattatttgctatttttcagccgctgggcttctcctttttgcactttcttgtctttaactcaataccattatcagcgtgaatcgtccgggattaaaaggacttttgcactttttgtcctctatttacactttgatcctttcatttttcctttcttccacttaaccccaaaatacatgtgggacccgcgcactgcccttctcttttcatttatttattttatctaattattaccaaaaacaaaaataaaattgctaaaatgtaagaataatgattagtactctttgtgaagcaccagtacttaatactcagtaacaatgcttgaaaaaattcaacaaatactctaaatctttggctaaattagctcatctcaaacccttaaaaatctttagctaaatgtagctgaatgttaaagcttctatatttatattttaaaatattttattttgtacttaattatttttatttcttccatttgtatttgattattatattttaattttttaactttaattaatataatattatattaaaatgatgtgaaagaaaatataaagtagttgatatatgatataaatgtgtgaagtaaaataaaaaaataaaactttgatgaattattttaaaaaattgagtaaataataaggtattgagagtgctctaatataatgatatttcatctaagcttattaaattatcacttcatctacgctttattaagttattatttggcttaaggatatgtatggtctatttttatgtgctatctttttcagccatctatttattccttgaataatgttgagttgttgaaacgatcgtggatgagatcaagacagttatatttcatatgcttttcgacaagtttctagggcctaatgacccgactccaactttctatcaaaaattctgatcagttgtgggaggtgacgcagttcaaactgttcgtgactatttttttagagtctgatactgggtaatcttaatgatatgaatctagttcttattcctaagaaacgcaatcctacggtgataggagatttgaggccaatagctctttgtaatgtgcttagttaggctatcatgaaggtcttagctaaccatttaaaaaatttcttgatcttgttatttttgaggctaaaagtgcattaattttggggaggttaataactgataacgttctaggttcatttgaggtgttgcattatctaaaaggaaacaataagggcgtgatggttttatgtcactgaaactatatatgagtaaggcttatgatcggatagagtggagttttttaaggctattatgtagatgggtttccattagtcgtttagtggggttggttttgggtagtgtgacctcggttcgttataaaattgcacatggtggggaaaggttgggacccattatacaacaggtattcaacaaggtgatcaattatctccatacatttttattatttgtgttgagggcttatctagtttgatcagaaagtctaaaatgtaaagatggttacatgagtgtaaagttgcttaggggggcagagtgtttctcatatgttgttggcagatgacaactatctatattgcaaagcaaatgatagaaagggaaataatgttcagaaattactatatattttttaaagagcctcaggtcagaaggtgaatgttgttatatcttccatatttttttcagcactaatacatctgtttataatcggggttgggtttaggaggtgtaaggcatacaagtggtggatgaacataataaatatattgctttgcctagcactatgaacataaaaaaatggttttgttgggctttttaaaggagaaaattagaaagatggtgcagagttagaatggaaaatagatttcgagggtaggaaaagaagttctcaagtctattgctcaagctcttccaagttatgtcatgaatatttttcttcttcctaatgaaaaggaacaactcatgtataaatattggtggcggtcaggctctccaagtaggagtattcactagatgtcttaggagaagttaggggttcataaggataatgttggacagggttttcatattttacgtaattttaatattgctatgctctattaaataagattggcggttgttagtccatagtaattctcttgttagtcaaattttttaagctcgatattatcctcgtggttctttcttttctgctaaattgggtcataatctaagttttatttggcgttctatcatagaatctcaaagcttgttaaaggaaggatgttgttggagtattgtcaatggtgcttcggttgatgttttaaatcaaccttggttaccgagtgaggagaatccttttgttactttgactcatcctaatttggagaacgctaaggaggctcagcttatggtcctaggttctcgggcttaggatgttgacttgttgtttgatcttttaatgagcaggacaaattgcttattcaaagtgttgttatcaatgatgggttaggagaggactaatggcattggtgtaaagagagtttgggtatgtatagtgtaaagagggcctataagtgtcttcaacatttaaatgggaggtaggatgagcaaactagttctggtttttggcagaatctttgaaatcttaaaatcccaccaagagttcatcatgtgttatggagagctggctcgggtatcttgtccactccacgcaacttcagagaaaatatgtggacatgttccattgatatgtcaagtgtgtcgtggaggagctgagttttattattcatattatggttgaatgtttatttgcttcactttgctatcaatgatttgatgcttcggttttaaggacatcgtatcttgattttcttagctgggtttctaatgttctgattgttttcttgagggctaaagctagtcaagtagcaatgatttgttacgctttgtggtctgctcgtaatggattagtttggcaaggtaagaggtttattgctaatggagttgtttcatttgctattgcttaaatagaaggatgctgaaaaagatgacactaatgtacgggagtctacttctttctctgttgttagtagcgagcatttaattttacctattaaaaacatgattaagatcaatatggatgcttctgttattatagtgggaatggtagctttgggattggttaggcagcgcatgaccttgaacttgattcaaagttgttggctggttgtgtacagcccagggcgaacgtacttgtctccctatagtggcacatggccccctaacatttatatatatgcaatacacaatcttagttatagtatattgtaattgaactttttaataattattatatggtggctcctttgaaaaagtcagactaaaatttgaaaattataatgtgtattttatctagcactaacgaaaatatatacaattattattaattttaagaaaaaaagaaattataagtttcatttttcttttaaagcatttatttatattccataataaatattaatttactctatttgttaactagaccctagattggatgcatttattattaatagatttcaattatagaaaaaggtgagagaaaaaatttgtgcttttttagcacatattgaaaacaatatcaattcacctcattgaaaggctgagaaaccagttgcatatctcatgaaccaatcaacacttattgcaagaaagtttgcaaatttcacatcacaagaaattgttaaaaatagttcaattgaaggaattaggtggcttacatttctatattataagttaactcttattcttacacttccagttttcataactactacaaaatgatctttttcaactataaatatagtgaagactacactttgcaacaagatacaagataaatttttaagtaattgttagctagtgtgtattaaaaaaaaattgctaaaaaatttagcatagattcaattatagatga

SEQ ID NO: 301127 - DNA, 2500 bp, Cannabis indica
attatcatgccagtcaaaatccagtgaactgacaaatcatgggaaataaacttttgaacatataatcatgattatattccactatgctgatgacactatgatcatgaacaaatacataggtcctggacttaatagaatttatacattaaacataatcatgaaataaatcatgtgaaccatgcaacataaataatttgtgatctttattaattaataaatctgattacattgaaatgagttttatttggggcacaaaacctaataagggcgataacccctggaataacaactggacctcaactccagttctacactagaaagaccggcccgagagtgggcgagccagcaattggtgagcttcaccttgacctaagagaagaccttgatttggccagactcagggaagttgtaggtcgtgcaggcctaactaaaaagccacgcgctgctaattgtgatgtattcgctcatcagagatacaaattcctgagatggatggatgaccaggtgtacatccttcgatatcaccagacggaaatagatcgccacaaccgggaggctagcaatataaaaagacggttcaatcagagaacagacagcataggccaggatctcctttgggatccacttcaagaaagactgacgctaagttcttcaggcactaggacagatctttccctgccaaagggaggaaagaccttttctcaaaggttaaatggtgagaacaactagatcttggcaaccagcggtatggggggccactaagaatctctggctcagcagcaccccccattttggagccaccagccggccagccattaacaggagtacccatggccgaccagagtacatcacttcctccccaaggggagcaaggtgcacagagatcgatcttcgactgatgaggactgagagtgggaggaaacacccaaaatggcgattctagaagtgaaacggatcactttaggcatctagatccaccaaactccaataattggtgtgatctaccccgaataaacacacaaccaatactagtcgaccgtagaatcacgggcgtttagaccctacccaatgcaggtctagctagacaagaaaacatcacgggcagccagaccctaccctttgcaggtttgggcagccagaccctacctttggaagtttgatcatgaaatcccattcttactttagtagggatcttgataatccttccaaacacatccagacatatacacaccttatgtacattctcagtttcaccaacaatctcttggtatgaattaccatactaacttatagtaagtctcttgttgacagtgctattcatccgaatctaagactcttgtattcttttaccattattatcactagagtttcactttttcgattcataccttaccatcactatctcgcagtcaatcatacatttatacttaaccatctaccatcacactcatattatattcaccaatacaagctattatttattaaaataatcaactatgttatctaataagataaccaatattcatttgttatttgataacttaaccagttaccctttattatctaatgagataatcatattagttctacaccgggttcatagagtaataactctattactctcaatgttacttaattaagtaacccaacattcctggtcatctaataaaacaacctatatatatattttattctctacattcactagaagaactaacctcatttaagggagataattaatttaacaagtaacaacgacctcattctcttaacaatatatcacatggtctaatatcctaccatgtaatgaatttaaactcagctttcctttccaggaaaatatctttcattttcaaatatcctagtaagcttatcaaccttatttttgttccaacagaaaattcaatactctaatacttctaactgagacccacatctagaaggtcatctaaattcctccttttaatcatgagggttataactcatacctctttaaatgaatggatacctccaagaatctctccaagtgttattatcattaataactaatattccgtcaatctcgttaacatgaatctcaaccacttgagtgtattttcattatccacaagttatgtgctcccctattttttgattgacccttacctttcccaggattcctatagctattccatatacaagattcgtcatatgattagaccttaaaagtatttttcattactgtcatataattactagcgatctagtcaatcttcttagcaacaacactgtcctcgtcatcatctccttataaatcattaactgaattatttcttaattaacatggttcaattcatgctcctcgagatctatcttctattatctgaacatctcttttgtagcatgaaataacataactcacttaatcataatctccaattcacctcaaatcccagatggacgtaattatacttgttgacttcgcttttagccaacgacaatgagtctttttgataagcga

SEQ ID NO: 301128 - DNA, 1494 bp, Cannabis indica
tctaatcccataacactcttcttgattatttttttatatatttttgagggtcccaaaatttaattagtcttgggcccatatattttcagggccgaccctgcttaccccaataatactatccttgtgaaacacataaagttatatcaattatcataaaaatacaattttggtgcacaaatgttgaagaatatcaaaacagccgcaccaaataactttattataaaatacttgattaaagattattatcattaaaaaagatgacaaatggtcattttgggttggtaccctctttattagaaaatgacatacataagaagtacataacctcaatgttgaataataattgagaggcatatctaaacctaatccacaaagtcattacctataaattgtaatgtgactaggtaatgtactaatgtggtgtgtaaaaacaatgcctattactttttcttcttcaataatgcactttcaagaatttaatcaaataataattaaattcaatataattgcggacatttttctatactaatatcatgatcactaccaacacgggactagcaacaataccattagcatacaagacacaactttatgggctcatttaatagatcgtataacgagttacattgtattatataacaagcaacactatatttgaataaaatattgtattgtattaattattacaactataaattttaatacaatgagaattatattatttaatacataaaaaattatatgtattaatttatattatagtatttagaaatggttaggattgggactagggtcgggatttgaggtccaaggacaggtctgcgatttggagccgagatctagggttcaaggccagaatttggggttgaagtctggggtcgacgtctagggttcgagtcaggatctgggttcgtgtcccagtttgagatctgagtccaaggctggaatcctagatctaggactggagttgaggacaaggtctagtcagcatctgggcgaaggtttaggatcgagggtgactccgaggtctaaggttgggtatgggtttggggttatctttgacgttgggtttgggtcaagaccagagtctaagtctaaggtctgggtctaggtcaaggtccgaatgtggagtctagggtcaaggctagatttatgttaaagattgtataattttacacaacatattagtaaagtcaatactaatcatagtacggtattaaataatattgtacaatacaagacatcttaacatactgtaccaaacgagcttaatatatgtatattaatacgagagagtcacgtgagatgggtcacttttcctcttaccattaaaaatttggtacataaaaaaattataactcaaatacttttatacattgtaattatagcaaagcaaacacccttttaacttttggaaaattctaaattactataagccttaaattttgagaattttctaaaaactataaaaatatctaccatacatccttatat

SEQ ID NO: 301129 - DNA, 2220 bp, Cannabis indica
aaagacaccaatagacgagataatgctaattttaaggacccgagacataggctaattataacctaacaacacccataatgaatcggctaaccatattttcttccaatattttttgtctcttagctgcctccaacaggtgaaaaagtggctctcttggagggctgaattgagctatttgaacaagtttattcgatggattgggaaagccaaatgtaacaaatttcgtaaacaagtatatgcggctgcaatggcagttttggtttatcaaatttggcgtactagaaatgaaatagtgtggaattcgggtaatgccaaggaatcctttatcataaacaagattaaaaatgatattaaaagtacaattacttatttttggcttaagaaaattaatgttatagacacaaactagttctccaagttgtaaaaaaaaaaaaagagaaaagtttacttgtgtagtggttattttcatagatctttgattgaaggcactatttgtttgtaaggatatttttggagtaataaaaaggttgctgattcataaaaaaaataatgatacaaaaaataaactgaaatttatctaacttccttatattatgtggataatttttagctgctgctggaattttagcagggtctcgtactcggtcttaccaattatattttacataataccctaatatcaaaattttattacaatatagattatgaaagggaaatatggtagttatttaccttcccaatcaatacatcaactggaagtttagctaaatgatgtccaagataaacaacctatataaacaaccttaaaatcaatttacttttaagaaaaacaatgaaatgcatttgatcacaagaaaagtacacacaaatatactgttaacagataaataaacatatgaaaagaagcactttatgtaaatagaaagtgattataattctttttggagagtttactaagaaactaaatagtattgcgtaaaagtagtaaaataaacttctgcaatcagggaacacataaaattaggactaatgcaaaaacaaagataccaagcacgccaaaccataaaattatcgattctaaattgttaacaaaatatttttaaaaaaaaaaaaaacaagaaatcagattaaaataaccaagacattggaagagaaaactatcaaacaataaaataaaatgatgagcaaaaaaccaatcaacttggcaattatattgttattattgataagaaacagacatgtaggcaaagcagaatttgatgtacctcatacaacaatgaaattgccgaggtcatagcatcatccgtaggaggttccaaagcctaaaacataaaaaataatgaaatagaacctattactattagacataagtgtcaatgtattgtaaaaccctgtaatttaagatggtaacacttacctcagacaaatatattgaggctgaaaattagggattttaaatttataatcacatttacttttgtcaacacattgcccgtataagtgaaaaatgagttggtaaaacttttaatttaaacatacttttaccagtgatgttggtgaaaagcacttgcaaaagttacaacgagaagaaagcgctagtaaaagacccattgccagtacattttagtattgataaatcttttaataataaaaatctataattttcaataaatttattttaaaaattttcaactacaatcaaaccgttgattaactttagaacatgactattattaaaactcaaaaaagtcatgagataaacaataatagatatacaatcttaaacattaaagcttaagagtaagtactctatgtacattgaagaacattacatataagtttgctattacaaattttaatttttaattaattagtatttacaattaaattgttgataatttccatgaaaataaataatgaacctaatttacaagaaatcaattataaactctgagatttttacaaactacttaaataaggacttaagaaataataaatataatcttaaagaagacaagaatttttatgtgcactactacaaaaatggctattcccaacggtttataactgtcttttatattatttcccaacggttcctaaatccgttggctatgtgggtgtcataaaaatgcagaactttaaatgacggtttataactgtggcaaaaaattactttaaatgacggttaagaaatatcggaaaaagtcactttaaatgacg

SEQ ID NO: 301130 - DNA, 2499 bp, Cannabis indica
aacaaatttttcaggatacagaacatcatgcctgaaaatattaaggtgtcctccttaacaccagaaatatctgtgcgaactaaatgagaaggaacagcagacaaattccttttccctttccttgtagaaggcttcgtgaaagtttttttactctgttgcactcccccagaatcagtacccttgtgagtggtgccattaccagtctgtactagctctataaatgctgcaattaaatagcaaaaggaaaagaaaaaaaaaagatttaactgtgaactgatgaacaaattggcattgcatactactctttatatcctaattcttttaaaaatgaaatcatggaacagtgtaaatttgataaaaaaaataataaacgaaaaattgagtttctacacatcaaagacacaatacaaataattgggaaaatgtgcaaatcttttaaaaatttaccctaagtaacaccggattatccccccacccctctcattcgttatctatatctatctatcacctgaactatactcactgcctcactgatggagctcctccacacagcgatgttgcccccgcaacaccgaagaacctctgcaaaccacagccgatgaatatctgctattaataccgaagatgaaaaattggtgggtgtggttgaagagagggatgagagaaaacaagagaatagggggagattatggccagggtactttaggtagtttctgaaacattagaatatgtttccacttttaagagtgaggggatacttttgtattatgtgtctttcaatgcatagaaacttaaaatctttcaaaataaaacactaacataatctctaaactagacacaaacacaagtgcagtaacatacattgaacatcaaggcattcatgccaaggcttgtcgtatctaactctgtcaatacgtggaaacctcaggctgtatggtgctgcaaaaacctacaagacagcaacataataaatgaaaacgaaaagaaaaacctatcaggtcatggaatggcatacaaggcaacatacatatgtaatatattcagtttatccaacaaactgaaacctgatttggttgtaaggacatacctcagaccttatagttcggatgtcactggtaatagaaagtataattgatctgcaatccaagggaaaggagagggtaactgaacaaaaatgtaaaagaacatatatttgaaaattcacaaaatacaatagaatttctctaacttctcagggctgtcaatccagacgtctggtctttctttggaattgtttgtgacatgataaaagtttggtggagctttctttggataatcatatttcctggcagaacataagagaagagttcaactaagtttcacaagaaaggcgaaaaataacaaatttaaaaattaaagtgactttagccagctatgtgattatgatttggagttacattatcagtcccaactaagccttcaccgaaatcaagagatggtccccaaaaatcagtttaaaaaaaaaaaaacttgtgcagcatgcttcccactaaaacgagtaacagtacctgaaataaggcttcaacttgtttacaacagcatctaactcctcatcagagagtccagtacccactctgcagaatgaaataaatctgcaatataatttatattagtaaagaaaggtgttaatcatcagttagcctattctggattcaaaaagatctcatacgactcgtaacatacattcatttggcagttgaagatgcaatgcatagaaaacattaatatgagactcgtaacatatattcatttggcagttgaagatgcaatgcatagaaaacattaaacagccaaacacgaaataacacagatacagcctaaaattcttccatgccttaaaagataataagttttactttttgaaaaaagacagaggtcacctcccaaatgcttcacttgtggcggacagttaaacaaatattggccaaggaaaatttataaatacataaatatttagagcacataggtatattgtaaacatcatttcaaaaatttccaggttctttctatattgtttcttcatttaaaagaaaatattgaatgcataggtgcataataaaataattttatctcatcaaattggttaggaagtgatggcaacctgagtactgctggctgtgcaaatcatgttgcattgcgtgtcaggaaaatgaaataattaacaataccaagctactagaaaatcgtcattctctatgttgggagacattttttgtggaagcaagcacaaaatcgcaacacttttccttaaagtagggttagttggtgtagaaaatagtgatttgaaattgtgtgtagatttcatagaataatacatatttatatacagagttaggagactaaatatctactaaatatctactaaatatctgctaaatatctaattctcttacagctaatatacatctaatatctaacactccccctcaagctggagcatagatgttaatcatgcccagc

SEQ ID NO: 301131 - DNA, 2820 bp, Cannabis indica
cttaagaacttgcaagttttaagttgttaacaaatggaatgtccaaatatgctaacaagtatgatcgcaaatattcgttaatttaaacgcccaaaggcccattatgtgattaaagcaccacaaagtctgggagcttgctttttggaatatgggtagatgatatgcaattttgtaagtcgcagaaattgctgcaattaagacaagaacgaatgaaactgttcttatatttattcctttaaatgtttatcttaattaatttgtgtgtagttcaatttgatcagttatgtaatattaatgggaatctattttctacataaaagggtgatccaaatcaaatagactgaactctgactgaaccactattatttatttttttttattttttctgttcctatttttgtctattttataacctaaactttgagcactcacgagtattctaaatgaatatttgcataactgtaaatagatattcttgctttattcgaatactcacatttttttttcgtattagtccaaattcttctaataacactagagtatttagatcacatactatttataatttaaagttataatggaatcattttgatttgtgggtgctcttattatattatatagataaatataaaactaaaaagtaattattaatacgtttaatatctctctttgaaatataaaatatcctaattttctgccgacgtttgttttcattttgacaataattcacaagtaaactttgataatatatggacttgtttggtaccttcgtattgtataaaaatgtcatttttgttagtatatttttgtgttggtaagaaattggtattgcagcaaaacaaaatctagctacttttgatgtatcgacaaaaagggttagtaaatatgaacgttggtattagaacttttatcggcgcaaaataaaaaacgctagcaaaaattattttttccagtacgtaaatacgctagtaaaagttagacttttactactgtaaatgtgcgctggtaaaattttaacttttttgccagtacagtttgcaagatgcactggtaaaaattacctttatcagcacagtaacaaactgctaacaaaagtgatatttcttatagtgattatattgtattgtatgaaattaaattatatatcatatatttatataatattatattaaatttttattatactaaaataatgtacatttatatatccataaaagtaaataatacatataattttacataaaaatattgtataaaaaataattaatataatactatacaatataatacgatataatgcgtcataccaaacaaaccctatattacacaaaaactttttttttttttttaaaatgtacagcacccaaaaaatgaaataatgattccaaccaagctgtaatatatagagttaataaaaaagccctttaccaaagaaaaaaaaaaaaaaaaaaaaaaaaaaaaaaaaaacgaaactaacgagtggtagagattggactttgacccgtttcgttaaactagagagtaacactaaacaagttggcaaattgagtatgtttttatttatttatttgaaagaaaaaaagttgagttttattactcaggtgggacaaaagagctatgttttataaatgaaggttcgaagaaaaaactgtatatgatcgagaaaattgagaagaagagtcctaagtactcattaattatcagttttgtttttcatctattatttatatgtataacggggccaagttgaaccacggcggtacatttgttctttatgtaccattattattagttatttaattttaattgatataatatatttaattcgtgattagtgataaccagtcaatatacacactacttgaaatgttttatttccactacatctacctatcaaaatatatcattttttgattgatacaatttgatatgatatatatatatatatatgctacttttctatataggaaaatagtccaataagtctcatctcattggacctaatttaagtgggattaaaaaggtgatcaaattataattaattgttggggtttcgctttcgaatgttgagatattttcattttgtatacatttatgctatgcaggccatcatatcactactgctccactcataattattattattattggtaaatattcttctcaatatatacgtctttgattttgtaaaattggtaaaatgatttcttatatttcttcataatttgtaatattaatctgaatttatcgactgatatttttcaatcttctagtttagtgcttaattaagatagagtttttcatctccaaagtactacgtacgaagtaatattagtataagatgatataaatgttattaatatactacaattaattatgatattttttgcaaaatacatttaatgtaagttataatatggcgatcacatattgttttctctgtaatactattagttataatagttttatatatataatgtatgtgatttgaatgtgtatctaacttaatttattcttttttataattatacattgcgaattgattggtattttatatagcactttgtgctaattatgattatcttaagagaaaagtaaaagtttaatgatttttttttcaaagaaatgataaataattaggggaaagaataagaaagaccaagaaaagtatcacctgttggaattgtgtagcacgtaagattctctaattccctgaattcataattatgcgctgcataattaataattaagtgaaaatatataaaagattaattaatttctatataaattatataaaagtgtgcctatataactaaaatt

SEQ ID NO: 301132 - DNA, 1224 bp, Cannabis indica
aaaaaaatgtaaccatgatggttacaataaaaatgtaaccattaaaacctcttccttagatacattttcaatatagtcttcaagttggatacatataaaatagaatgggatgcatcatgaaattgtctccttatatgtatgtgcacatgaagagatataactcttagttaatttagtagaacaaaatacaaggcttgcttgtacttatatatgcatcatgcacatgtgtgagcttatatatattcattgtatgtacttttctttttcttctaggtttatctgtccaattaaattagtaaaagaaattacagaaactaataataattaaattaaatttaagatcctcattgccttgggccagcttcttctaccttttgggccgagtatatagtacaaggaaggcccaataacatgctttatatcatttaaatagtaattgtttagatttttacctcaccatttctatttaaccatttttaatcctaacaatttattaagagaaaatcaagacaagaatcttttgtccaccacatggaaccagaagagggagttgtatgtattcgattcacccatatttggctaacaatttccaataaacagaccacaatggtcacaattcaagctcttcttcaaaaataataataataaaaaattccatataaatggaccacatagaagatattgaaattgatagcatagccaccatatataatatatcatggaccatttcaccaacattcatttaattttgcaagaactttagaggccaatttcttcccaaggaatcaaggatatcttaccataatcttctatctaacattaaattcacttgtgcaatacaagggcccatgtgtctcccactatttctgtctcattatggtttgcataaaacaaataacaataataatagaaaagcccaagaaagcccaaaaagcccaaaaagccttcaaaatcttctcttaggagctttgaaaactacactactaaaagattcacatataggaaaaacactaacaaaaagcccaccacatcttaggctatgaatttgttgagagagtaataggattgttcatacaatccataatctataattccaaatctcgaccaatcttagccaaattattggaatttttacattacatactgaaatttttaactttttatttttttttttacagttggagcgaatttttttttcaaaatactgtataagttttatactgt

SEQ ID NO: 301133 - DNA, 1604 bp, Cannabis indica
aaaaataaagacttgagtgactgagtgtcgtgtcaaagtttgcatggatttgatagacttaagtgggcccaaaggcccacgtgaatggctcacgtggatgttccctgaggtgggccttgggaaaagcccgaaaccaaccaccttaaacagcactgtatgtacggacacccttgaggaccggaacatatagtaccttttgctgtcttatgaggtggcagtaactgttatttgtcaaaaatatccccattttttaaaatatttttacaataaagcccaacatgataccatggctttcttcgagcccagagctcatgcacgttcgtgtgtggtgggtcacatttgtctttttccttttcttttttcttctttaaaggataagatgtatttaacttatacatatttacgtgatgaaacatatatatattttaagaaataaaacaatgacatacaaagctataaaaaaaaatgtgaataatcaataaaacatgcttgccccaaatttatttagaccttgtttggatttggataaatactcaaaccccacatgggttaacgaaatccaaagtcaagacatgttgaatacaatacacgttatagaagaaatataataaataaataaataaatattagagagggaaaagaggagagagagtgaagtatagtacctcagattcaagacagcatttgtcatgaacaacagagtcatgaatttttttcaagttagagtattcttgttccaatttcttgttcttccaacgagcccttctgttttggaaccaaacagcgacttgtctagggtcaagtcctaactccgcagccaaacggtcctttctttccgattctaacttatgttcactcccaaaattcatctcaagaaggttcacttgttcatcgcttaatttcctctttcttgccaaagcgctttcttccttagcgcttttgctcttcttacgacgtcgttttgtttttgtctcacctaaataaataaaatcataaatccatcaattaataagagaaagaaaaaaaacaaaacataatgcaaaactaggaaaggactagctaataataaatttgtgctttatttgatcaaagtacaaaccttgttgaggtaccatttgggggtaaacaccagggtacaactgggtatagagtaccatatgatcttcaacttgattattattagtgttgttcatggcttccttcttttttttttctctctctctatgaaatgagtgagctagcaatttggaatggtttgggaaatggaagagtaccttaggaacctttttataagggaaaaaataatgatattggcctcaataggtgtcctctctccctacttacacaaccccaatttgtttttttgaaaaagagaatgtgattttactatagtgacccttgtgttttgagtaatgtttcgaatatgccatcttttgtcttcttttttagtatttaattatatatatcccccaaaagcatgcatgcatttctttaatttataattaattattttaaattttgggtcttaattaaggtgtcgtttagtaacattttttatgataaaaataaaaataaattttttaaataaaaatgcgttctataac

SEQ ID NO: 301134 - DNA, 4731 bp, Cannabis indica
gtgtataaaaatttaaacataagtgtttttctatcactgtaaaaccagagttcttgagctgacaaagatgagatgaaatggaggagaaaggaaggaaagacagatggaatgaaactgtaaagctcaatccatgactggcctttgatctctttatttatacaggtgatttaatacaaaggagttagttacaatcacagctaaaccagctgaaagaaacagtagaaaataactaacttactaacagtaagatcggttagttataaacagtattaactaactaaccgaccgattaactacccacctacatctccaatatcctccaaaaaaatcatggttacaagttaaaaacatatcaaattgattataaatatgttacctgtgacagtcttgataatagtaggctgctacttggtaacttgttactttactctcaaagaatgtgaattatcattttgtttaattttctggaaattttaatttttattatgaaagccaatttatgaatttggttcagcaaatatcaaatatgtaatagttaacaatttcattattttaattatacaaatttctataattctcaccctggattacctcagttgcaaaaacaactatatttaaaatcataaagagaatataaatatttaaacaaacaaaaaaaaaatatgattatatgttcattacttgcaaaagacatgtatattgtatcataatttagtacaaaattaaatataataaagaacaagaaagaagaagaaacaatataagataatcatcttaatttctacacaagaaattacattaaaaaaagattaatacataaagtgagtaaaactcaacaaaacaaaagaaagatcttcatttggttacagaggaatgtgatattaattaatctatatatacctattttatatctattgcaaagcatttgaaatagaataaataaagtccaaaaagcctgtgcctttaagaatacctttaccagttaatagctcaaaatccaacaaaagtaagaacccaattacagctgcctttccatttataatctcattcttcccagtgaaaccaaaccctcctgaactctcatcaaccaccattcttacctgtatcaaaaatatgtttagtgatcggttttaggtctcgtgttaatcagatgtgatcggtcatatgactcgatgtagtgttttggtacatattttatgtacatgtatcgttactctaaaagcaataaaaataaaacttggacctgagctaagatgaattaggcacgcgcttaaagcccacccaaaaggaccaaataattttgctgttacccaaagtgtaattagtttcagagtcggcccaataattaactactcgttactaaaaggaaatcatgtaaataaatcatcgaaaatatttaaagagtaatgtaactttgtttgttcgccttaactaaatgtgattcgttgaattataatgtcgcgttttggtgcatattttgtgtgaaaaaataccaaaaaataaacatgtcatgttgaagaattaggtgtaataaaaagagagtgaaaatccaagtgaagtgagtgtttttttacctcttcaacattgacatcagaagcagtaacaccaggctgagctttaccactaaacacaatttcagcagagacttcatcaggttttacaatgccaccactgatactaatatatatattttcttcatcagtttttaatggataaatatacaagttcctcaaaactggtgttagaactcttagaaccgggttttttgggtaccattccttcacttctccggttcgaagatcgaatgtgctctcggttgatgggcaaactatacatccatccttttaaaacaacaacaacaacaaaagtacaatatttaaatacatatacaagatagggtcagatttgagctaaggcgaactagtatcaagtgtattggtaacttaattcttctctttacaaagcaaaaaatgtaaaaaaaagtgaaaattttgacataaaaaattagtaaatgttgatacaacgccttttataattgtactctaatacacaataacaaattaagatgtaaactgacataaaaaaatattatcactttgataatcaataatgaaatatatttttcaaagaaataatgacaattaaagaaagagaaatgttaaagggcaccagtagtgcctaccactgcctaccaccctcttatgtgtcaatattgctattggtccaactaagtatcggatcccatataatttaatataatagcttttagggagtatcgctaactaatcgcaacgtaacatgtcgagaaggtgctaggcaccacttgtgcctaatagcaatgctcttaaagaaagtgtattgaagaaccaaataaaagagttgccttaattgtgtactagatcaacacaatatttaccaaattcgacacaaattttaacacactattaaataagctaactacagttaacttaggctctaaattaaacaccaacagatggtactatcactatgtgatgtttagagaatggttagtgatattctattataattattattagaataaatatgattccaaatacttaattatagttagtagtgcctattagtatttaagaccatatacttaattataattagtggtgcctattggtagttgggtaaataattacttgaaaaatgaaaagaaattttaccactgcatcaaaatcaaactacaacatttaacttaggcttataattttgtttagtaaatcacattaaacataacatttatctaattattaagtttaatataaacactacaaattacttaaacataagatttaattatatggtgggattaacttagactttatagttactatcaaaacagatgtaagacccgatacttaattataattagcggtgtctatgaggggcattttggtaaattaattactaacctgagtaagcttggcattaagtaaaccttcactataagcaccctcagcaggagacctattttcaatagcaaacaactgatttttataccacaaaagaagaatggtctctccatcttgaataatcactcttctctctcctttaggcagagcagagagtggaaccacagggatccaattctctcctctcccacctgaggatgaagattcctctgcaactgaaacctcagcagccttacatgtgagttgtcttggtgattttactaaaatacccctcttggagtttttgagtgtgaagacatgggaaatggttttttgaacaaccccaaatgataaagattggatctttggtggggttttgatgttgttgtgtctgttgaaagtgggcgtgtatgaagaagatgagcttgctgcaactatggctgaggaagacattgtttggtatagaaagtagaagaagaagaaagagttttaagtgtaaagtttgggttttgaaagtgtggacatgattccatagctactaagatacagatagagtctttattggcttgtttttacttatgatggacttgcatttgccacgtcacctctttaccttctagccactaattaaaagttttttttttaaaaaaaaataaaaataaatagaaatatgtatataaattagtagtagaatttgaggttaaaattgatagatagttcattttgttatatttaactttttttttgaaaatacgagtgattaaataaaagggaaaattagatttcatggtcattataaaggagttcagtaggaatggcggatggattcacaatacctgttaagttctggacaaacgcccatttagccgcattatgtgccgcaaattacacaaacgaggaataaacgaaaaattataagataaaaagttttcatgtatccatgtaatgtctttgggtcaaaaattattgtgtagtttgtttaattgcacttattaagtttctatataaattttttagctgtaaaattttttatatagttattttgttataatattaatttgtttactaactcattaattgtgtataaaatgtgtaacaattgagattattacactaattatgaattacataagtattttttgttgcttaaaatttttacataaaaatttaaatgtaataaaataaactagaatttttgtcaccaaacctttttatagtttttttaaggatcctttttatagttacataattaaaaaaaggattgttataaatagatatgattttgggtgatttaattttttcctacataaaaaacctccactccaaataagtttattgagacatcatttttatagttttgaaatatttctaattaggatttttttttttttgtgtactaaatcatacgtttggtattcaaaaaatttacattcaattctatttgattttactattaaatttaacgtgacgattatttacatactaaatcaggggcgaaacccatatgaaggcgagacgagacaatcgtctcttaaaaaaattaggaaaaaaatagtatatacaatttagttaattacgagatatatttgtaataaaaaagaatatttatagacataatattagttttagtgtaatgattaaattagattacatatacaatagaggccaatggttcaattccataaagagcattttgtccttcctcactttaaatcgtaagcccaccactatactaaattgtagctctaaattttctatctatgtcacacatccagtcttaataattttttttaaaaaatttaaataattt

SEQ ID NO: 301135 - DNA, 4900 bp, Cannabis indica
ctattgctgctgctagaaccactttcctgaacctactcattttggctctcctaatccatctgattaaattaagaagactaatgctagcagtattccaatacaatcaagctttaatctcctgcaaacattgcttagtaattgaacattcaaaaaaaaagtgatctgttgtttcattctgagagttacagagcaagcatttctgttcctctattactctcatctttagcaacttgcctctagttttgagcttctgctgcacaaccaaccaaagcaggaaactgtatcattggtgtgtttagcctactccaaacttgtttactgtagtgtgtctttgtttgagatggacacagaagattgtatccctgtgagacactgtatttttgctgcaataccatgtgtccattcattacttccttgaattgttctttgagcatgactaagcttctccaataccagctgcactagtttgttgctttatagctccaccaatctacatcatggatatacacactattaatccatcttaaacatagattatcttctttgtttgccactgcccacacatatttccccattgcaatcatgttccaaacaaccacttttttgaagccaataccacttgttgacataggttggaaaatagtgtcccaagagatagccccaagcccctgatacactgatttccctttccacaaatagtttctacagatagcttcaatggctttaacgattttctttggtaaaatcaagatcaggcaccaataagcatggatggctatcaacacataattgataagcaccaccctgcttgcaaataatagatttttagaactccaaatcttaattcttgctatcattttctcagccaacattgcacattccttcgctaaaatcttttttgcatagattggcaccctcaaataggtaaaaggaaggttctgaatagtgaaaccagatgcatctaaaattctttttaaccgatccttaggcatgttgctcctatatactacagacttaaaggggttgggtttctatctaaaagttatagaaaatagtttgagcccatgtagcatgtaatacacacttctaaaatcccctttacagaatagtaggacatcatcaacaaaagccaagtggttgagtttgatttctgcacatctgtcatgaaaatggaagtcccttttatccccaatcttctccattattcttgattggtattccatacctaacacaaataatagaggagacatagggtccccctgcctaagaccccttttaaactcaaagtatccatgcatagatccattaaacattagtgaaaatctaggtgttctaacacaattcatcactagtttaatgaaagcaatgggaaaatttaatccatacatcatttcttgtagaaaatcccattctatagtatcataagctttttgcaaatcaagcttgatgatgcaactaggcttattggatttccttctatagtgcctaataatatcttaacatatcataatattgtgccatatgaatctacctttgataaaaaactccttggtttttggaaactaaatcaggtagaatagttttgattctagaacgcaaaagcttagttgcaactttttgaatgacattacaacaagcaattggcctaaaatctttaactatatcaggacactttattttaggcactaaagtcaatacagtggagtttatctccttgagaatcttacctgttgccaaaaaggatgtaatagctctgaacaggtcctttccaactgtatcccaattatcctgaaaaaaagaagcttgaaaagccatcagggcctggggctttgtttccagggatatcaaatagaggctgtttcacatcattcttggagaatttcttgattagcatatcagcttgttgaggggtcagtacaggacctctttcaactatattgggagacactcttttcctgccttccatttgagatctcagcaagtctttataataggcaacaaataccgcaaatacctgatttggctcattaaccctagtgccatccttttgttcaattgaaaaaatttggttttgccttatcctttgttttatgcttgcatgaaacaaagaagtgttactatctctgtatccaggttgtcttggccttttgttgcaggaaggagaggtagtccttctgcaccttaaccaattttgccctggcatccagttcaacatcaatcagagtgtcatttagggggtcatgttgcaaaacctcctgaatttcctcaagctcaactttggcttgtgttgcagtagcgtgtaaatctcagaatccttccttgttaatctccttaagaactagtttaagtgccttgagcttgcttaccacttgatacatcattaagccattgatctactttgaccaaatttccttaactttactttcatattcaggatggcttctctacatcccatgagaatgatcaaacaatgcttcatttagaaaaatggcttcgcatttgggaaatgatcaagccaagcctgattagccatcaccctgtcaatttttgaacaaattctatctttctttcccttgttgcttgtttgtccaggtgaaaaagttccagtagcctttacatcctccaaacgacattaagttacatagtcaatgaagtttgtatcagcatgatatttgatcttgtgtccaactctctcttctttggcaagaatgtcattaaagtcccccatcagtaaccaattatccttagtagccaagtcacataaatctttccataggaccttccttccacatctatcattgaaagcataaactatagtaagcaagctactatagttattatccattgtagttattcttaatgcgtaatctgacttgtgccctttataatatccataatgtatctcaaaggattccacacaattactattctccctccttggtgccaagctatattagagggaaagcaccaaccatcaaaaacatcaaggtacaaggttcccagtttttaaaccttgacccttgtctgaaggagcccaataaaaccaacattttgtgactaaataaattgctttatcagcctctgtttttattgattgttggctcctcagacattccaacacaaaaacttatccattaccaagagagggcactcccccctctcttactttatccctgttacttcctatttgaactatctcctcctatggctcagttacattaccagagagtatgctgatgctgaatgagttgcctatttttgtttctgcaggttgcttttgctccttgactttcttttgcttagttacaatttgaaagccttcttcatctacctagactctttcatgttcttcctttttgtctgtcttaataacccattcttacttgggcttcaattttttcttacattcaacagttagatttcccataccagcacagtgagtgcatgttataggcttccattcatatttgacacccacatgggtactcataccatgtacatcctcaaattctagcatattaggaaggtcttggttcatcataacctcaattaaaactctagggtaattaagtggatccctctcttttgtaacaacatccaccacgtcagggttacctaattgtctcacaatcttgaacaatgattttgtccccaatacttgaggtctaaatcttcaagttgtattcaaataggtatttacttcacatcctctttcttgaaattagtattcgggtcccagggcttcatgattacagatcttatattgaagatgtagccccagttcaagactgactccttgtcctcaatggagcaaaatctgatgatgaaaatgccataggcaagaaatcgtaccttatccacctagtccttccaaattcatttcgcaaaactttcaaggatatgtaatggggggtttaaaccgagcacataacatactaaagaaggtttccaataattcacctcctcttcgatgtcctccatatcaatcttgactctactactttatcctgaactcttaaaagagttctccaaattacgtacaacagcagcagatctaagaataggaggagtcgagttcatacctttagcaattgtactgttacattgctcattatcccgaatgaagttcatgaagtcctgtcgagcatcttcactcctttgaatttcctgtagtgaagctcttggtgacagtggagattgaaaaaagatcctttgagcgtgaatcgattccacactctttctcccctcctgttctctgatgtcatcttcctcatcttcaaactgctccaacgactctactccaatcatagcatctatcttcttggtttgaataacatctgaggcagaattttgtcctttcttcctcgatttcttggttgcagatttagattttctattcatttttgaccttgttttagccatggctctaacaagaagctgtaagagcaaaaatgaggaaaaatctttttatttgcttattgtttacagtacatataatattaataatctacagttaatgataatttattgtggtatgatatttcagttaattcagattagtatgttatatttttatttatttttaatttaaaaaaataaagaaaaaaaaaagaaaaaagccaagtaagaatcaagaaaaaagaatatactatagctatactacaattatattagctgttgacctcgcttttagccaacgacagtaagtcaattaataagcgattagaaatataataaaaatagagcaaaaatcaataagcaataaagaacactaaattttaaagaggttcgaccctttaatttggtaatagcctactcctcttagattgtattgacttgagaacaaagaacacaatgtttcctctctcctctcataataaaatctctgagtgtttcctct

SEQ ID NO: 301136 - DNA, 1768 bp, Cannabis indica
gttaaaccagaagaaatggaagcattagctatggcttggagtctcaaatttctggtgtctctcaaactcaatgttgatttgattgagactgattcattaatggttgttaatggatttaaagctcaaactaaaggtctatcagccttttatactgtacttaatgatgttacttttctgttatccaacttcccacgagcagagatctcttatgttttataggtctactaataacgaagcccacttgttggctaagtttgctcttacggtggattcagattatatttggtttagaggaattttcgcctcctcttttgactgttatgtaatttggttttcagattaatataatagtcttttcaaaaaaaaaaaaaataataaggataactttggaaatattagaaaagtgaaaataaaaatacagaacaaacgaaaacatcacttttgcttaaaaatgaagttcactattaaagaaaataaaatatagaaataaaatattacgtcgaaatttaattattaagaaaattccatgatgatgcttgcctctctttctcatctcacttataataagtcttcatcgtggaacaaacagattaagtagttagttccaatgactccgtccaagtctactccctccttctctctctctccctttctctctctctctcacatctgtcgtttcctttacgtcacagttagacagagaaacttaaacctctctataagacagaacaatgatctcgaaatcatcttccaactcaacccttccctctctctcgtctctccacctgttgaccgttccgaactctattcacaggcacgttgccggattaaagaaaatcccattgcccagaaaagaacagggaaaatcagattacatcattttctattcattttgagagattaccatgattgaagctgattgcatggcggcttctttcagaaacctcgtgcctcttctttccttggtgttactagtggcagtcgtttcagaaaactatgttcatggcaggtttgtggtggagacagagaatatcaaagtcttgtctccagtgaatatgcgttctaaacacgatggagcaattggaaactttggtgttccagactatggtggctatattgttggttctgttgtttatccccctaaagggtcttttgggtgtgacccctttgagggtgataagcccttcaagtctcgttctccacgcccctctgttgttcttcttgatcgtggaggtaattgcatatatataatataatatgtatatgtgcattttatgattaatattttaaaattcattgcttttgctgacatgtgttggctttgtcaataatgttaggattaggaaaatgatacaatcaaaacattattttctgtggtcttgcttatttgaaaagattttgatttaattacgatcagaacagttaattagttgtttttttttttcattccaaaattagaaacttttcttccttttattgatttgttgattaagatatggatgggtgctctgtttctgtcatgcttttgtatttaatggagtgttaaatcatgttcaaatattggaaatgaggatggtctacttctttccgttattggtttttgactttatcctcgtaattaatgttcgttaaaattaatccgaactcaatatattttgtattttgccctttgtagtctgatacactctgtggtcaacaccaatcaagtcttccatgtgtttcaaatgactgaaaatctaaaataacttaagagttagaagttatctta

SEQ ID NO: 301137 - DNA, 5266 bp, Cannabis indica
aattccgttattttaagttacctaaactctgctataattgtggctatcttggtcatgacaagaaatcttgttttagatcgacagcctttgcttttcctccatctggtgcggcggttccagcgtatgggccttggatgaaggctgaaatggcagtatatagttgtttcaataccaggaatcagctggaatatttcagagaaggggtaggccggaacccttcaccggcaaaagttcctccggtagatgcatcgagatccaaaagcaagtggaaagagacctgtccaagataatcacagagagcagaacctgcaaagtccagcttgcagcaaacctgtgaggaaagctatacaggattaacaacaaaagataccaggtgccattttttggtagaaatttgaaaattgttgagaagaatgtgtctagtccgctggataaaaaacttggggggttgaaccctttaccacgggaatcaaggaagtttgaaagaggaagattagccagatctgtttctcctagagcaatgcgtagacaccaacaaggtaataatagtacgatctcagaaattgatattattaataatttttcttctaggcctcctcccaatgaggctgataatgggattctcacaactatgatggccaacattgggcccacttatgaccaaatggtggaaaagccccacgttgaattatgtcaatctaggcaaccccataaacaccctgagcccactcactttccttggcccatctacgcagaggaaattgggctagctgaggagcttatggggcctgccccaattgataagtatgagcccactcctacccttttccatgatcccatagatgtgtctgagcttgtacatcattgtccacaacccagaaaacgaaaagccagcctaacattgataccttatgtgcaacatacagccgagaattctggggacttttccattgatgtccctgagctccctgccttttccccctcacccgagtcttcttttaaaatgggagcaggtgcctcgacttcatctttgaagaatgataaacgtagaaggaagggttcccgttctaagttatcagtctctaagcaggataagaattctgttctggtggtgagtgaagacaaagatgtccaaaaaaatctacttgactctctaaatttggttgaagttcaagtcaatagctgtcaaaattttcctatgggcgaggaggcggcccttatcaagccccctacagccccatgaagtgtctttcatggaattgtcggggccttgccagagacccgacatcccaagctcttgcggcttgggtgaagaagtacaaggtggactgtatctttttgatggaaactaaaactaatagaaataagatggaggctgtggctcgttatttgggtttttcgaaaattgcttgtgcagatgcctctggtttgtcaggaggttcttgtttaatgtggaattgtaacatggatttggtggttaattactttgttgatgggttctttgaggctacgatttgggattttcaatctcaacttcactggaaattgttcgcagtatatggtacgccttatgcaagtgtcaaggaggttttttggagatccttggaagaggaatgttctcaatgttccctgccatggattattcttggagatttgaattgtatttatagtcaagaagagaagtcagggggtcggttagtttcttatgctgatactcaatttttgaagaacttcatgcttaatactggctgtgttgatcttccaatttatagggaataaagttcacttggctaaaacaaacggtttaatggtggtcgttatcagggaaaggcttgatcgagcagtgtgttctccagaatggcttttggattatgagtttgctggtattcgtaatatgccaatctctatttcagatcacgctcccattgttctcgatactcatttatttgctccgagaggttatataccttttcggttttttgaatcttggtcctgggagccttcatgtaaaaatgagatatctagagtatggaatttttctggtagcaatgctactgctgccttcattcataatatcaacaaagtcaagaatgctcttcaggtgtggaagaagaatggccatttggtcaaagagtgtgatattaacaagttggagaggagattggagtggactcaaaatcagccaattactgatgctttgaaaagagaagaagctagtattcattctcaaatcctggttgcttgggctaaacttgaaagtatgtggagacaacgatcaagagaaacttggctctccttgggggatagaaatacaaggtattttcatgctgcaactgttatcagaaaaaggcgaaatagtatttgggcaattaaagacaaagaagggagaatttggaaagagaagaggatcatagggggcatcattaataattatttccatgagctgtatacttcctctcagccgtgcattgaggaggaattatttattaatctgtttgccaataggattgatgataatgcaaatgacatcattgctagagtgcctacagatgtggaaattaaggaggtggttttctgccttcatcctctcaaggccccaggtccggatgggttttcgggttgtttcttccgcaaatactgggaagtggttggtccaaatttgtgtgctacagtcagagagtttttcttgtcgggagaaatggatcctaatcttaacaagacttttatttgccttattccgaaagtggattttcctctgggtgtagaccaatttcgtccaattagcctttgcaatttctcctacaaagtcatagccaagattctatctaataggctaagacctttcatgtgtgatctaatttctccccttcagtcagcgtttatcccagggcgttggatcgctgagtcttctattctcactcaggaaatcattcacaagattcgtcataagaaaggtaaaggggggcttatggccttaaagcttgatatatgcacaaagcttacgacaaaatggaatggaaattcttagaaaaagttcttgtggctaatggattctctgagaaatgtcgaaagcttttgatggcttgtgtcactagtgtttcctatgcggttcttcttaatggatgtccgcttaagaaattgattccgcaacgaggacttcgtcaaggagatcctctttccccctttttatttttactttgccaagaagttctttcaaagctcatctccaaagccgaagctcagaatgaggttcatggcatcaaaattgcgcactcagcgaccccgatttctcacttgatgttcgcagatgataccattctgtttgctcgtgcaaattcaaatgaagctaacaagttgatggcttgcctctccacctatgaatcttggtctgggcaatcttgcagcaaatccaagtctggagttctcttttctaagaacatgtctattgaaaggaagagcgatattctcggtattctcaacattaatcaagttaatggtgatgagaggcatcttggtaacccatttgtgttcaaaagaaggaaaaaggaagattatcagaggcttagagaaagtatgctgaaaaaattggaaggttggaagatgaaactcatttcttatgctggccgattaaccttgataaaatcagtaacttcggctatgccaatctatgcaatgtccactgctaaaattcctttagctaattgtcgagatctagatgctttgatgaggaagttttggtggacaggaaaggtggataaggaccgttatcttgctctaaaggcttgggataagatatgtcaaccaaaggattctggaggcttgggcttaagaagatgtgaagatatcaacaaagcattattaactaagttagcgtggagtttggcaaccaaagaaaagaagccttgggtctcctgtatgctgaaaaagtattgcaattatgagaacttttgggcagttaaaggcaagagtaatgattcttatctttggaagtgcatcctggatactcgaccaacaatcctcaagggatccatttctgttgctgcttctggtgatactataaatatatggcaacagccgtggattccctggatggaagctcctgaatttttggaccttatgagtagcttgaggaataatggatttacaatcaaaactgtagcagatatttcatcaggtaatgaatggaatgaagaactggttttgcaagtgtttggaaatgggttgggacaccgtattctctctataccaaggatcccctttccctttcaagatcaggtttattggaaagattctccaaatggtcaattttctgttaaagcagcctataaagtggatcaatcttggaggtttgatccgattgaagatgtctggaagtggatatgggatgctggtatacatcccaagatttcagttttgctttggaggttcttaaatgatgctctccctacaaagagcaggttggtttttttgccagataaagggtgtgatctgtgtgaaggagttaccgaagattctatgcatttgttcagtaagtgtagcttctcaaagtccatttggttcggtggaagtaaatcaattaggataggggagttccatggtgattctatccaaagtgtgttagaaaatttggtgccttctttcacaaagtcccattcagatgcaagcagagctgatcttctcaactatgtgggatgcgttctatcggttatatggcatcaacgaaatgccttctacatcaacaatgttccagtcaatcccctagtggcgttagcaagggtagaatctgattttatggaattacagacgttgcctcgcctcagcaagagtactcataatgcagatattcagatctctggaggttcggcaggtgcaggggtcaccttcccttctagcagtttggtaaggcatgtttcttcacggatgcttcgtgggtggaaggtgaagcgggcattgcagcagtatctgttgacactgcaaacggctgctggtttgttagacaccagaagcaacaggttaattcagcccttgaaggtgaatttagagctattttcctagctctttcatgggcaattgatcaaggctggagtgaggttcttattctctcagattgcaaggtggcagttcatgccctttcttcctcaggtctatgtcctgattggcagttatctaatgtgttctattctataattaacatgtctaaactcttaactgtttgtaatttctgttatatttgtcgtagtttttaattcggttgcggatggtttag

SEQ ID NO: 301138 - DNA, 4542 bp, Cannabis indica
aaaaaaataaataaataataaattaataaatattcaaaagtcttgatattcaaccacaactttttgatctacctgctttatatattaattaactactaaaagcaaatcaaaacgttcaaaggtgattgactcctaccattctgcgtagtgtgaaccttgttccaacatgttatatacttcaaccaccaataaaataataacaacataccttagcaaatatatttaaatattataattaataaaaagaaaagaagtatattattattaattaatctaagtatgaaatacttttacatgcagagtaagaaacggccaaagttttttttggatttcagcaatggcgccgttaacctccgttatcttgggtagcattcttgtttatctgactcacgctgaaaaacacggcgttcaagtggtaagcaagcaaagcagtacttaattagatttctttttccctattagtcattaataaccgtgacccactgatagagcacagtccaattatacttgttgtggactgactttgacgaagacaagatgaccgacctacagaccacgtcaaaattaataccataaatatatttatgggatgtgttttgtgtctatcttaatgggccagtccaataaaagtggcctcaccactcactcactcactcactgtcgcacgtcacgaccagagttattgggcccccaccaataataccactgttttgggtgtgagggtcccagtttataaaattacccgtggcaatgttgttcctttccttaacgtcttttaactacttttttttttttatttttttattttcttttcttttccttatttggatactgtttgactggtcggttactatgaattcgcttctgattccctgtatgttggtgcataatatttaatcagattggtaatttaaagaaggggctgaatccactgtccatcacggatcttgtcttagtgcctcctcacatggctattgctatcaaaactggcatagttactggtgtcatagcactagctgtaagtaatttctttctctctctctctctgttttcaataatagtacactttttgacataatttgttatttgttgaccactagactagacaattgaacaaaatcattaattgggggtaaagtgttatagatcccgtgagtattattacttgtaatatatataattattgatttataattaatatattatacaggaagggatagcagtaagaagaagcttttccatgttcaagcattaccatatcgatggaaacaaagaaatgattgctattggaatgatgaatattgttggttcttgtacttcttgctatctcaccacaggtaataataataataataattatattttcgtcatttgaaattaaatttgcatataattaatttaatttaatttaatttttcagggccattttcaagatcagctgtaaactacaacgcaggatgcaaaacggcagtgtctaacatagtgatggcattagcggtaatgatgacactgttgttcctaacaccattgttccattacactccgcttgtggtgctatcggccattataatctcagccatgctcggcttaatcgattacgacgccgccattcatctctggaaggtcgacaaatttgatttcatcgtttgcatgagtgcttatattggtgtcgttttcagcagcgtcgaagttggacttgtcatagcggttagtacttaacttaattaacaattgtaaatcctatcctatgtattcaatattaataaaagctaattaatgtagttaatgtgatcaggttgcaatatctttgttgagagtactattgttcgtggcaaggcctaagacttttgttctagggaacattccagattctaggatatacagaaacgtcgaacaatacaccaacacctgcaatgtgcctggagttcttatacttgagattgatgctcctatttattttgccaattccaactacttaagagaaaggtatatatatatttattcatattatttatagtaattaaattacaatatacttaatctgacaaattatatgtattattaaaggatcacaagatggattgatgaagaggaagacagaattaaatcttcaggagaaaccagcttacaatatgtcattttgaatttgactggtatatatatttatatgaacgcatttccaataaaatgcattatttaacttattcatcagtacagtactgattatattttatttttgggtaattaattacagctgtaggtaacattgacacgagtggaataagtatgattgatgaggtcaagaagaccattgaaagaagaggacttaaggtattcaattactataactataattgtgtacatatataattgtactagctagcttcttaattttatgtttagtaattaatttgtgtggattaattgtgttaattatagcttgtattggccaaccctggaagtgaggttatgaagaaactaaacaagtcagagcttattagcaagattggacaagaatggatttatctaactgttggggaggctgttggagcctgcaactatatgcttcatacctctaaaccagaaggtacactcaaagacgaatcagctgactccacgtggaacgtctgaccagtctctcttctacatacacacatatatataaattaagctcaaggaggaagtttaaagcaaatatgcatcaaagttgcgattgtttgaattcaccaagtttattatttttatatatatgcgattaattaattaagaaggccaattcttaatttattgatcagagtgaaaaaaaaaaagttgactcatttggatcaaaatgataaagaaatgagtctagaatcattagttaaagttaattagaggaacctttttttttcccaaactttatatataagtagcttttgtataacgtatattgcacaattaatgccaaaggcctattttataacaaaggctcgtcattattattgaaaggataatgtaatgtgctgtttaagagaatatttaaaaacgacatgtagttaatttcatacctggctctagagtgtacatgtgaaaatgacacgtacaatttttttggtatattaactaaacgacattttaaagaggttttttttttttctgatattcaacacacaattatctggccgagggacaaatagaatccgaaatggttctctcttatttggagtagacaaagctatccaagatacaaatttatttctttattggcatgttagaataggcttcatatgagagatgggcttttcagatttggatgtatttctgagatgaattgcttattttgtaacctgaaattagaaacacatcaacacttattttttaattgtaggtacagtaaacaacttcaaatggccatttgcaattagtgtgggattagctctcaatagggggacctaatgaaagttttgaaatggataaaaggattcaaaaagtctaaatacaagaggggagtttatactgttgtactgaatccattggtttacaatattgggaggcccggaatcaagttctttggaatgcctatgtgtataatgcaaattttttcgtaaataaaatcaaaagagagatttgtattaggttttctcacttttaaagagaggaaacaagtatagatcagatagagtttggttgcacaatttgagtataactagttagtttagtgtaccttttgttgaaattgtgataagttgtaatttattggttgtttgcaataatattcttagttaccaaaacacttttacttgaagaaataaaaaatcacctaagtatatacttatatactaggagtaggataataacttttttgcctcctattattatttttagagtcttgtccaaaagcatacctccatctaagaccaagaagccttatcatctctctaggatccagagaggactaagctcaacatatgttcagaagacacctggaggacactcgaagagttgaacacaaacaccaaccacctagaggaagtaagacgtctaccatgaagatagattcaaatcgctccagcaacaattatatctctttgttagcgtttatgctttgaaaagcctataaagatattttttaattattaattaagagttgaacatttgatatatgcatggatattaagttgttaatattattattgataatttatattaaatatcaaaaaattctttattcatatatgaggatgtggcttatagctgtacagagaactaaaaccacttagctatgaataaaaagccaacaacatattaaagtttgggaatctttaatcaacggttgctagcatgattcactgatacccgttcttcggtgcaagtaattttggtttagattacggatgtagtatgacatcaaagttaaggtattgtatataatagatattatataaagatgataaccgatatgaataatattatctttattaacatgttgtttatcataaagacctaattcatatcataacgatgatcaatagtaagttcagcctaaatcttgagttatcatga

SEQ ID NO: 301139 - DNA, 3744 bp, Cannabis indica
agtaaatcctgtaaacccaatttcgaccatataaaaaaatcataacaaaacataaatgataaatagtgaagataaatgaaaccaagttcatcagacaaccaaatggaaaaaaacacacacacacacacaaaaaaaattcacaaatataatcaaaacaacacacaatacataataaaactctaaaaacaaaatataagtatgaaaaccaatttcaaacctggtgaaactaattttgacctataaaaagtatatcaaaacttgtaaactcatacaaaatcataacaaagcctataaaactatttttgacaatataaaaaaaataataagataaatttaaaataaaaaatagacaaaacactataaaaatagagtatccacattacagtataacacaaaaccatttacataaactgaacaaattaaaaattaatacacaaacacaaaaaagtatcatggcataactgataattgaaaccaatttcaacaaacactgttaacataactagtagaaaaagaagtattgaaactagttttcgtaaggaaactaaataactaaagttgattgaatttatgttttaatcgtgttgaatttggtgctatgttatttaaatttctatataaacaaaaatagtgacatgccaaaataaaatttaaataatagtaataagcgtgaacataacccttataagcttaaccaataccttacacttctcgaggacattctttttgttactagcatataaataattttttccttttcacatggtagaatttgatattcaaggcatgagcttgaactcaacttctagtttctcctatagtcaactccttcttaacagatgtataactaaaaataaatggaataaaaaaataagtcaattagagatataaagtgttatcccaaagtgttcacacttgacgtggtacctacgcgtggtataatccagccaactcttaacatgacaaggaactctgggcagaagtgtgccttgcaggtcccatatggggttgacatccatgagccacagattgacttccatgaagtatctggccgggccatcaacatgccgaccaaagaaaagaggagtaatcccacaagaaagataagtcttgagaagagcctggccgggtagttaatatgtcggccagaagaaacgatgccaagaatatcgagcaagattacacgagccttgatttcttttcaacaaacttccataaatatctcgaactgaatcctataaactctgatccaactaatctactcgagaatatagaagcttcaacatatcataactatactcaagagtataaggatatttactctttgatcactctatttacagagttaattataacaaccttctccttataaatagtgaataaattcacaacgggaaggggcctaaaatcatattcttgtatctaagagcacttttctaaaagatattctttgtaaacactttgagagttgtagctagaattcactctgtctaccttagtgatctgcacgacattatctcacaatcaatacagataaaagggaagtaagtcattacccatatataagggacaaacctctataaatcctagtgttttgtctttttatttattattctactccttactagtgattaattagtgtttatttgacttcgagttagttggctattttcctgtcaacattttttgtgctttcattgaaagcttcaactttttttacgaagatttcatctcttttcacctggtaatcaccatggtcctaataaggagaagcatgtccactgaaccccaagatccgatggctgtggatcccaatgtatgtgtctcgaaaattggtgataattcggccaaccctacctgaccacatcgggcaaaaccatctacagggttctgtccaaaaggccaagtcaataccgggaaagatccaacaaagtactacggggtttcttttaataaggactatccccaggtatacgctaaagaaactgggtgtggggttggctaacctagtgtcaacgaaccccatgttgacttgggaaataattttgagctggccaggctaagaggggtcatagggcaagtccaggatcatacaaacatcctccagcatgaataagaagaaacacgcactgctgtgagcgatgctttcacatagtagagatgagaattccaagaatggatggattaataagctacgatcctacaagaccaccagacaaagctgaaccgtcataatagggaggctaatgaacttattagacagttcaatgaaagggctagatctcgggttgaagaactgcctctcataagggacccctattcgtgggaagttttcttatgtataggggaaaatcaataccatagggatcatcggaaaacctcacacccaatgggccctactatttcccaaataaggccacctcccatctggccgaatgatgaacaaatcttgcccgaaagggcatatggatggactgacaagttccaagaccttcatagagatgatagaatgagggaagaaatccctgctcgattttgtaataatctaacttatctaagttcttccaaactttctctaagtattttgccattttgatttcattttcttagtattttccaagcacttgattcataattaatcaggaggttgatacagtgaatttccttagcttttaaaacttcgacaattcttaatcctgctaatagtgattcgtactctgtctcgttgtttgatgttaagaattgaaatcgcagagcataatggaacctaaattttttaggagaaaccattattatacctgccccaagttattgtcatttgaggatccatatacaaatagcttccagattttttagtttgggagttctttgtttgtcttgtcaaagtttactccttctaccaaaaaattagctaaggcttgaatgttgatggctgctcgtggatgatatgttatgtcaaattgtcatagctcaattgaccatttaatcagccttcctgatgaaagtcatgagctcgtgccccgttgttacatccactaactagtcgatcttgggaagtgggaaacagtcatttagacatgccttatttgggtcggaaaagtcaatacaagttctatgggtaccattttattttgggataataaatgggtttcagattcatatcggataaaacacctttctgatgaagttattgataaataatttggcaacctcttcctttaaagcattttgccacttgggatctaagggacgtcacctttgtcttcttgacagatagagagggtctatgttgaggtgatgtcaaataatgtttgggtcaatcctgaccatgtctgaatggtttcagaaaaattgatcttggtttgtatttagaaagtcaattaattgctattttagttcttcccgtagtccttttttaatttgtacactttaggtagggttgtttaggtctaaaattatttccttaagctcttccactggctcgagttgcatctgttaatcttgaactcttggatccaaatcttctgcctttcgattgctatcttcttcagttatgacaaaaaaagtttgatgagttgccattcttcctttcaacacgatacaataacattgtctcgctattaactggtctcctctcactgtccccactctagactaagtcgagaacttcaaggaaaaatgttttatcgatctgattgccccattccagttatggttgggctaccctgttggaaattattttac

SEQ ID NO: 301140 - DNA, 3101 bp, Cannabis indica
gagagaaacatacctcataccacctacctatctcaagggaattaccttaagaaggtacttgacaaacttggcgtgaaaaataccaaccagtaactattccccttgctcatcattcaaattgtctcagaactagtcacgagggcagattttccatcccttaggttttggtactttcgctccaaaccttttatttggcacaaccttgccttgtggagcagagggcatccaaggctagaggcattggtggccttcaacgtctgtaagggctgattggtcgtgttcacatttttcttaggaggtcttcgggaacttttggtttgagactcaccaccttcaccttccccttgtcctttgcggcaaataaggttccaacattggtggggttcgctctgttttctctatcggtaagttcctccaaggaatcctccttagcgtctttgtccaggttgccaagtttagcccagagatgggccatcattttttccatcttttgagagaaatcttcctgacgtgctcacttttattgagtttcaagtagctcattggacactcaaaacatgtctaggtcatgttcacagtagtatccacctttttagtagctgtctttgatttctccatcatcttcttcctctttgtttctagcatcaagatctttaacctcaaattttccaccatgtagggctggctcaaccactctaccgctagcttcgaatgcatcctcatccaccacgtggctcagttgggcgtgcgctagagggactgggttaacattgcccatgatgacattaggatctactctaggagttttttcttccacggtttggcgtgtcattgttgtaaacatatagtagctttaagcttcctctagctctaaatgaaagtaccaaaatatttgtcaagattttcaaaaactaaaaaagttagagcttcaagaaattaaataaagattaagtaaaagagagggaggatttttacgtggtttaggcgttaattattcctagtccatgactcagtgtattggccttttaggcttggaaatgtattacaaatgagttttacaataaggaaccctaaacctttctataaggttgtttctataggttcctattttaattgttatccttgtttctggaagatagacacgtgggataatttgaaggtaattaccacttaaagttgagcctaagccttcccgctcttagaaggctagtatagacctagaacatgcccaagcccaacaaagacccagaactttgcctcagagacataatgatattctaaggcccgaaagcctccctagccttccaggacatggaaggaatgaaaacctcctaatgaagataagggcacatgtaaaggtaagccacacgagatgccctaggacacctaccacaaggtgacacatagaagcctaccacagacaaggagttggatgtctatcacatgatgagtatcagatgtccaccacaaaattagaggcagatatctcccctaaaatgacttacccacttctctgacacatgatcagatattgtcgcttgtgcttatgttagatcatggtagtgtgcgcaccacaactgcatacacccctgttgcctgacagctcccctgacaccttttttaccaggtttgacctccatgcagcacccgtcttgcacaaaatgatctgctcatcagtacagaaccgtcgcccacgagttgggtatccttagtggacctcatagtcatgtatttgtgtattttactctattagtaggctcacttttataataaaacccgaataggtcacatgtatacctagacccaaacactagcctatataaaccttactaccccttcatgcaaaagggatggaaatttagccaaagctctgcttatttttattctaagctttcttttactctaagagaaacctagagaaaccatcgtatagtaatggttagggttccttattgtaaaaattatttgtaatacatttcaaagcctaaaagaccaatacacttactcgtagactagggataattaacgcccgaatcacgtaaaactcctccatctcttttacttaatctttatttaaattcttgaagctctcacttatttagtttctgaaaaatctcggtaaacactattagttttaaatgtggccacatatattttcctattattcaatccatgagttgatttttgcctcaattcagatggtggtgtggagatcatggttgtggtaatggtattggtggtggtgtggtgacggaaccaaagagaaggagtataaggaatttgggttaggtaaaaattaaaaggaaagaaatcaaatcaaatccaaaaaatttattttttatttattttttaatatttacaacatttaaataattaaaactacaatcctatataatttagaacacaatcacaatagataataataaggtatgcgtacctaattgatccataacaattaccaatttttttggaaaattagaaagtatattgcaataaaccaaatcaattacaactggcaacaccttttaaataggcctgttaatctatacaaactcgccttactttgacataagataatcaaaccaaattatatcttctctactaacatatttaggccaaatcaataatattttacttttaaaattttcaatgattctttttacaagtatattctatcttgttagcttttgagaccacaaaacttcatttcgggttcaccatagatggtaaactaaagacgccaagattgttgagtaacaagtccttctaaatttactcatcttggacaaagttattcacctataaagtgtaataagagtgctagaatgagggtgccatttcacccactccatagcagcccttaaaaaatacatactcacagtgcaattaaaaaaaaggtggtttatgtttctgaatcacataataaacatgtagattcatgcacaatattgaattcaatcaatctatctcacattttcaacctattttgaacagccatccaagaaataacaacgtgttttggactattaaatctattccatacctcattgctccatctgactctttcattctccaggtgaatcaaacgatatccatcctga

SEQ ID NO: 301141 - DNA, 5786 bp, Cannabis indica
tttttttaaaaaaaatatgtgatacatccatttttataatttttattagctaatttcttagatttggccgttttcttaatttttttaaaaagtggacatttactaacttagttaccaaatttaagaccattttgcatctcaacccaaataaaaatgctacgctttgactgtaaaagaaacgaaacatagcagaaagaacataattatataactgttatattttaagaatttttaacaaaatgtatattttaggagacaaaatcaagtactaccgaaagttcatgaaaaaaaatactaattatacattattaaatgtataatcatgtaaaataaacatatacccatccttcttttgttttggcggagattgaggctacaatgatatgtttaaaagattaaataagaacctcatcttttaacaaaatgtactctagcttccaagaataaaggtaacattggtatcagcttaaaataaacaacaaaactttcattacgaaaaacttaagctctaacaaacaaggcttgggaaaaaatacaaacacgcttccaacattaaatcaataaagcttagtttatatacaaataaaagactactttcatgtgtgttttctagcgtaatttagtgcagctgcaacctcagccaattagtatcctcagtgaaagatcttaaggttgccatccgataccacaacagtgaaattagtacatattaacattctgggggagaaagagaacaaaaattaaaaaacttaccattttctaacttgactacatcaaaacttatgcatggaaattttaaatcacttgcctttcattatgttagggcttggtcaacacttcctctaatgaatgatggcacatctcaacctcttttactttgtcaaaaggtttctgctcatgaaagaaaaaaaggtggaaatcaatttatctcctgcaaatgtacaaattggcccagcagccaaaacctctataaagtctccctcgatttcttgatactagtaaacaaaagggtatagctaagcaatcaaacagactcaacagccacataattactagtaacatgaagtttctcagttagcatttcatgattcctaataagtggaaagataaaattggacacgaatacgaaaactttcactgggctgctgcccacctccagggaatttttagtatagagtgcttggtagagagtatcattgtttttaccgggaataataccagtgtgaacgaccatgtttaagggaagatttgaaggaaaatatttgtggaagcttggtagtaaaaaatccaataaatgtcaagatctgataaggccaagtttacagcatcaaagttccttggctctgtagtctgggcatgatgatcaagttatcggcaggcatcccaagtcaaaaatcacagaagtttctggtacatgatttcatttgagggattgttggaacatgcagtgggagaaattgtagggattgattaggaggtggtgacaggaaccttcgagtcatcacccctgctttctccttacatggccattttgaccatgatttctagaaccttctaaaaaaatcttagaattcctctaacatcctaactaatatgcaaacaattcaaataaatatatataacagaaaaattgtgggaatattatacaattaccactcctgctaatctgaaacttcctcttctagtgctggaatttggcggaaacgtgcaaaatgtcgagaatatgacagttctcttttatctggcataactgatcttttccgctttgctgaaaaaccattcgtagaaagcgaatcgaacaaatttcccatgtccatgtctttctggacaccacgattttcatataggaaactgacaagcatgataacaaaggaaagcataaatactgtaagcatagatatcgcagtgctctactttgaaatgtaacttgtaaccaaatgggagtggcacaataaaattaaagttataaaaaaaggaaaaagggaaattataagtgaagattgagctataaacaacttcaggtgttcttttcttttctttttttttttttttttttttgctgaataacaactccaggtgtttgataaataaaatagagcattgctatgagggaccatggtggccaacaccacttgatgtgttttggtagaattaaatatccactctcacatatttcattttaaataaaaatgtgtggtccgatacaaaattgcaccaatcgttgtatctcagcatcaggtggtgttggccatagtaccaattagcaattctcaataagataattgggagcaacaacatcaataaacaccatatatgcttactaatgaaggaaaatctatgcaccacagttttttatgacattggaaattaaaaaaataataataacaactacaaaaaataaatcaataaaagctgtggaaatttgaagaaactaaggaaaacataccgctcgcgtaaaattttaaatgcttcttttgtggcataaggcaaccctgtctttggatcacgatatctacaagatcaacgaaatattttaagttgcagagtgatagagggtgatataccaatgttgaaacacatgagcacttacttagcaggtaacccagtaactgcacagacaactttctcaggatctgcaaagaaattggacaaaagtaaaatcagaaccaaatgcttgactaagatgcttaaggattgttgtatgtacttacatggaacaggtgttgttgatatctgcgactgaaatgacaaccctttactaaattccagataagaacaacctacagtaaatgcaaaggtagagaaagaaaacaacttaaggccatttcccattccacgaaaattagaacttcagtgtaggcaacatcatgaaaacaaaacacaataaccaaaacaaaaaaaaactaccatcttttgaatagtatcttatttgtggaccactgtagacagctttatgtataattgctcttttcttaacttcttcctcccttgctaaaactttctccaaattcctcaagttcatgatttctacaaatttgcaggagttgcacacagagttcagaatagaaagtcttaaactcagtcttaaaggttgaggtagaaaaaccacatatcactttcagactttaataattaaattaataacaaacctgtttgggcagcctccaagagcatttcttcttgggtcatcctcttctcttcaccttcctttttcctctttattggctgtgttcaaaggagaatattatttgaatagagctgtatcacttcacacctccaaagttaaaatgtttacaagcatattatacaaatagaaacataatcacttaaatatcaaaacaatgaaaaatccttattactaaactcggtatccaatacacaattttccagattcagacaataagcaacagttatcgcaataagcttgtaaaatttgctgaccctcatggtagcttgcaaggctgcacgtatggcatctctctccgcttgtctattgataactgctgttctcgtagacttcctcacaattctttctccttcaacatcctcaggggcatcctgaggttgttcagtgggctgttcattttttttatcagtctcttcctcctcatcatccttatgatgatcttccaaatcggagagcactttcttcttcttttgctttctcttcaccaaagtcttccctggatatatcagccgcttcttttgtcgcaccctaataaaggatattcaacctttagaataataataaaaaaccctaagataaaaatctcaaacttcctacaggtttcaaagcttaacctttcatctacttcattgttgtccgcttcttctggctccggctcctaccaacaattgaagcaaattaaaggaagaaaataattaaatgcgaatcatacaaaagaaatgcaaagtaactcacatcttcatcgaagtcactatcgaattcatcagcaacttctccctcttcctcatagttaacatcatcctcttcctaccaaacgcacaaactttcacttgttactttaatttataaaactaatacaataataaatgttttaagagctacaaacatctttaagagcctcctggttccaaaacaactcgtcaacttcaacttcatcatctaacaatttggtcatcctggtaaaaagaaaaaaaaaacttcagagctaatcgaagttttacttgaataggaagttaaaagaaaatctgtttgctacctcttccccctggtaggccgagatgtacggtcgaggaaaacaggagtatcttccttggagtcatccatggttgaccaacagaatgaagagcagagaactcggtgcctttaccaataatataggaatgcagaaccagatttatatctagaagaacaacaattaccctgcacacaacattttcccatcaaataaccatttaaactgcattacaataaacataactaagatcaccactttaagcacacacagcacttagaacaaaagaagtgattaaaatataacaactttgcccaaagccgaagatcacttcacctttataggtcattattattatttaaacaaataacattcaagaattttatcaaacaccttaagcacacacaacacttaaactgaatctctcaaggttcattttcatgttatggtttaggattatacctcttgtactagagttcaagttacgggccaccaattgagcctccactcgttaacaaaaacgtttaggggcttgacgctcagatcaatttgggaaaaattgtttatttgtgatcaattttcctacgaattactacaaatacctggcgagcacgttgaatgcacacactccaaataatatattgagcagaaaacaatagtgtaaaaaaaaaaggggaaggttcgatggagaacgggaagttttgtgatttgttgaactgaaaaacaaattgcatattgaaattgtggagagaaataacaaaaaatacacagagaaataagtctgtacctggtagagagcagagaacccttttgctatgttctgtagcaatggcaatgaaagtgttttcagttaagactgggaaatagaagatgaactacaaaacactcgaaataggggaagaacaaagaggaaggtatttgagatttccgtatcgaaaataaaggaattttgtttttgttttttttttttgttttttaatgtgtaaataagggaaatttagatgtgtgtcatgttttatgtgtaacttgtatcctcgtatcattttagcttatcttaatttttattttttttagcttttaaaattaaaaattctttattaactgtttagataaaaaatgaaaagatattttttaatttagaagttttttaaaattaaaataatttattcctaatttactcacaaaaaatatatccaaatatttttaaaagtattttttattataaaaaagttgtcatataatagttatttaaaaggtaaaaataaattaaaatttatacttatcttatacttttaattataagtaaaaataaaaatttaattacacgatactatttgtattattatatttagagaaatttgcggccaaacctccttatgtttcatttgtttaacacttaacccccttttctttatttttggtgggaaaacccccttaagtcccgttccgtttgcaatttactgttttgtgcattgaccccgttaacccctaaatccaactcgacttatctaccgacgtggctgctttaatacacaggtggtaattaaaaccatttttgtgttttgaaaataatacataataaaataa

SEQ ID NO: 301142 - DNA, 2804 bp, Cannabis indica
aagagtgtgagggtaggacaaaaagaacctatgtgcctaaagtgtacgagagtataacaacgaccaccatattagtacattaattacagagacaacaatgcacaaacatcactcagcatataaaaatgcaatacaaataagggagtggaaactgacctgggttttgcaatgactacatcctttggggatacaatatagtacagtggttcatcacctgcagcccactgcccaccagcatagctgctacctacagtcacatgaaattttttagagctattcagatgaatattactttaaatccatacgccataacatccacaaaaaacattttaacctgagaaaggagcatgagcaagagaataatcctttgccttgtaatgctcaaagccaagaacaggtagtgcatctgtagacagctcatcattaatccatgatacaatacgtacttcaggtctctgtgcatttccctacttgaaatatatcacatgttaacaagggcaaaaattaatttctaagtacaaagatcacaatcacgttatgactaaaaaatttatgattggaaaacaaccaatgatgacaatataataactgtattataaaataaccactggataaaagttaaagctgctacaccaagactattttaattcaataaaccaaaaactatcaagcaattgacaaaatatctgtcataatatagaaaatcctaaatttgaactaaaaaaatggtgcattgatatgtgattgaatgacttcgtcaaaaacaacaagttagacaaaacaatttcccaagaacacgccaagaatgaaagcatgcaacttctagttttacaatatgcaagaagagaaaaatatgcctctagaatcctacacaactccaataaaatttaattatattagctatttgaaaacacttggcaccatatgtttcttcattcacaacatgaactccttcaatgaatgttcacactttagcaggagttccttaaaattgagctaccatttaaacacaaataagttgtaaagttgtcacccagaaagaaaaaacaaaacaaagaattcactaatggatctcttgttacctgccgtgatgggatagcgctgctaaattccttctccctatcttcctcgccaggaatgtaggccagtacaacgagagaatcaccaaagggtgcaattccagagatgtaataattggtattgaaagatgccacaatatcaacttgattaatgctactagacatcgaaaatgtcccattggctgctcttggctgatttgtctttatggatgcaactttcacagatgttccccagccaatcaccaaatgtgtatcatcctaaacagaatgaatggatgatataaacccttacatatgtgacacaaacattattcgaatccaattaatgggttaaattttgcatttgaaacttatcccatgttccatttgacttacctgccaaactaagtggggtagtaaaacctcaggtcgtgggcttcctcttggtctttcaataaatgtaattcgctgatcattagcagcatcatatactttcaccccagcatcattagcccaagcaatgagacttgctctccatttcactgcatgaattggaccttcaccagagtgcaaaacctaatagacaaacccctcagtttgagagcactaagatgcactggaagcgatatttgaatgcaagtcaatagtcaagcacaaacctggtctcgaaagcccagccattttttataattaaaatataaatgaccagctaaaccaccagctacaaatcgtttagatgcctttttggcgtaatctgggtctaaagcaatagccttcattgggcgatggtactcaaacttcatcttttcatcacaaaaaagactattgattacaacagatccatcatctgaacagcttcctatatattcaccttctatgtcaaagctgagatcgtttactgcagcagtatgagcagtaaattccttaacctgtaaatcaggcagtcaaagaacaatatatttcttcattaaaggcagcaactaaatgcaattgtgtatcatccttgagaacagaataaggaaaaagactagcatctatattcacatgcattctatatgttcacatttttttatgttgacagaccatgtagtacaattgtttgactttgttctaagtgaaaaaaaggagatcagatgcttgaagagcttagaaattcacaaaaagactcaggtcaggtgttgtgtttttcaagccttatgaatagctactgtgtaaggagagtgtctagactttccaagcctagaattgtgattgatctataaggaaaaacatctgcatcttaaattctatgcttaaaccctagacaatataacaaaaaacatggacatggtatcaaaagtaagaagcactaaatgtgaacaacaagaatgacttgtcacacataggaaatgcaatagtgctcaaccaaagtatacaagaagcactagggagcaagcttggaacaaaaccaagtgacgttgaatatatcaactaacacatgtcaacaagataagtggaaggattgactccaccatgtcaaaatactcactttattcccacaaaaccatacatcgaatccacatgcaagatgagaaaagttccttttcgatccctttttatttatcaaaagaaaaggccttctttctttttggtcataagtatattaaagatgagatgacgatgacgtaaatcatcttggcaactacagaatcaaattgcactaatagtttcattttttttttgaaagaaagaggccattgtcataga

SEQ ID NO: 301143 - DNA, 1663 bp, Cannabis indica
gaaatgaaaaattaatgagataattatctgattggggaggttttatgaaaaattgggcgagattttattgagtgtcactgatgtgtttaaaccgtagagcatacttttaaattaatgagataatgatgtgtttaaatcattgggaattctgtacaactatttaaaattgtcaagaataccaaattatagccaacaatcttaaatagtggcatatttttaattgcgacgtcttttaagaaattacaaatttttaaccctcaagaattgtgttttttgtagtagtggacattaaagatcttacaaactgataaggatggataatatttgcatatgcagttcaaagattatttaattgaacatggaattgaatcacaaactactgtcccatccactccacaacaaaatgttgttgtggagcattggaatcgcacgctattagaaatgtttatgtctatgcttagttgttcaactctactagtttatgtctatgcttagttgttcaactctattatggaatggtcatatacctagcttaagacattacagaatttgagggtgtcctgctcatgtcttaagaaagaaagaaccaaagctagaatgacatattgaagtttgcatgtttatttgaaattaaaaagagacgacgggtggattgttttatagtaattaagacaagaaaatttttatttctacaaactcaactttgttggaagatgactatataaaaaaatttaaaccacgtaccaaagtagtattagaggaaatgccttcaaaattaactccaaaagttgttccttcttcttttactcgtgtataagaaaatcccactacctcagttgaaccaatgcttgagacaataggagactatcacttaagtccctattcagaaagccatagtacctcctagtacggggagggtttcatagaacccacctcgctatctcttggatggtgaaatcaacatgattgttggtgacactagtgatgatgactaattaaactttaaataggaaaactcaagtcgtgattggaaaatatggtcggctgtcatgaaccaaaaaatggattccatgaggtaaaataaaatctgggatgttgtagttgcaccagatgactttagggccatcaaatgtagataaatctacaaaaagaaaaaatgagttgatgtgcaagtggaaacttaaaaggctagacttgtagtaaagggctatacccaaagagaaggtacgagctataagaatacttttagtacagttgccatgctcaaatctatcaggatacttctttccacacttttcgctcacaattatgagattaggcaaatagacttaaagatagctttccttaatggaactcttgacaaaactatctatatggagcaaccagaagggttcaaggttctagggtacaaagggaaactctataaacttaataggtccatttataaactttagcaagtttctcattcttgaaacaaaagttttgatgagatcatcaaaaacctatggcttcaaaaaaaataatgataaaccttgtgtttaccaaatcaagaaaaatcacgtggtagctttcgtggtcctttatgtggatgacatctgtaacaccctaactagcataggcgtattacgtgatttttaaacgtactgtgcagctcgttgctaat

SEQ ID NO: 301144 - DNA, 3037 bp, Cannabis indica
cccgaggatgtggtaagctatctatcttttgtttaaaaaaaaaataaaagaaaaaaggaaccctcaagcttgctttggttagagaagaattacaagcacaagtaggaaaagatcctagaacaaaatcttgacatagataatagattagagaaatgtacatctataaactacttaacatcaaccagcaaattgcctctcaaaagttgagacttcccaaatgtgatctttatgtcgaccttgactcctttagagatttatttttatcaaacaatggtgaatgaacgagatctataccatgcagcagatatgttacattacttagagagtgtaaaccataatctatgagcaaaggaatatgatacaaccacttgggtggaacctaacaatacactccccccttaaaggcgatgtcgacgacggcccactctgggcctaatccacaggttgccccttccatgacatctgggtgcatgactttgataccacttgatacaatcacttgggtagatttcactctcaaaagctagcttaagatcatagggtgcccatgtagttatataccaccaatattgtagaatatatatatatagctataggtacacatttactctacacactcaagatgtgcacaatggtgtgacatgcatcttaaaacacgtaaaagtaataggccctgccttaaaattttgacaggtttaagatggatgccacattaatttgtgtatttcgagtttgtaaaataggtgtgtgcccactaataagcgattgttgttttctccactcatcttgcatataactccactaatagggtcttgttttctaaaagagatgcatgaacactagcaaagtaaacacatccactaggaggcatagggcttttccttatctttacccaaggagggatcccccatcctatccatcattagcttacttaatttgaagatttggattctacaaattaaatcaacttattctagaaagaaagtagatactctatcattcaaacctctgatttagtgtatatttcaattactttccagtcagtcctccgtaaagcacaaatcgttggtacatacatctattctttttgttgatagtctgcaagcatgggagcaaatatttaggaaaaaaattgatgtagcagtctttccagaacagtaaattcttgccactcataaccttaaataagcttgaccaactgctggaatttttatatatagaagcaatgtccttccaagggtttctcaaagatactctttcccaccagtatccaacccattctcttccattttatatttgcttttaacaatattatgccacaatgattgcctctcgtttgggaaccgctaaagctatcacacaagaaacacgttgttcctttcctttaagtttccaacccggattgctccttggagctttgattttctattatctatatgaattccttttatttatgaatgttaccttttctaaggtgttaggctataacaattgatgtatatatatcatatccttgccactcatcaatgtaaatctacataattttgatggggattaaatgacaaatgaatcattggtattaataagaaccgttggcattaattattatactttaaatttaaaaagcttttttctttttcatttatagatttaattacacaaaacacagcatttaccctgttactaaaacctaatcgtggggttaagacttggtagctgctaagtgtaataataaacataaacataaaggcctagaaatcaatgaatatgaacttttacagcatgtacgaacaccataacttagtaattgctttgatgctgagaggtattttactatacacggctgctgttttatatttctccaaattgttctctgcagaaagcaaccaagcgaaagaagatacatgctttcaaatcaaagatgcggtttgagcagcttgaagttacacaaaataagcgccaaaatgcttggcagcaattccagacaacaaaaggcaagacaaagaaggtatgctttgagattcttatttaaatgtagatgcacttgcaatgttgaaccaatcactcttgactgctataagagtacaagagtggtgtcaattgttttaactcttgtttattttgttatttgtacattttatttgtgggccgacccaagagcaatcaaaaatccattgcacattatacttatgctgagtccagatggatttgccaattatgatctaatgtaaatttaacactgaacaagaaatattaagattcttagaattggtgcatctgcgtattttgatgattattattattattattgtgattgtgcattttcaggttggtttcttctctggacgcaagcgagagagcatctttaagtctcctgatgatccgttcggtaaggttggtgtgactggaagtgggaagggtttaacagactttcagaagagagaaaagcatttgcaccttaagggcggaagcggagagacagatgagcagtagtaggggcttaatttaacatagcattatgtcattttctgtatttaacatacattaaataattaataatttactcttgctaatgcaaaatgctcgcataggtctgcgattttttgttgatgaaatatttgacctgctttcatgttggcctcttgctttattgttacttcttttgacctatttattgataggatgggatgagagcagggtttggtcgtaccatcactgttctttaatgcaaaaaaaaatgtaaaaattgtatgggtagtattcaaagttttaagtttgtaagcggtaaaaacttaatatttatttttaacgacataaatatttaatatttgtaaaattgtaattttcttttagtttttttaatacagaatttgttttgaatttttttaaaagaaattttaaaagtaatttatactacatgtttatatctagatctaatgatttagaatttaggttttatatgtgtcatgtttaagacaataatagagttcgtactcacgaaattaaagaaaaattataattttataaatattgagta

SEQ ID NO: 301145 - DNA, 1723 bp, Cannabis indica
ggacctccattgacaaattcatatgttggagatgagtctccaaatggtcctcaagatcatttgggtggtgatgaagatagtgaagattggattgacatgtcatggcttcacaagggaatttgggttggatttgtaattggatttgttggagtttgtggtaatttattactcaacacttcttggagactcaactatttcgattacatgaaaaatattggagattggatttatgtgactatttctgtcaacataaatttactgaagagaaggttcattaacaattagaaggtaatgaagtactatagcttttcatgtatatatacatatatatattagttgcacatgcatgtcttcatatttcttaattaactttgtttccttgttttgtttcttattagaatattaatacaataataattaaggtggagagttcgttgctttcaagcttgaagattttgcaattggaaacagtaataaaggagactccaaaatcatcatcatcttttatttatttgtgtttgtaatattacaaaaaggattctctgtttgataatttgcttgtgagtgaataattttgatttttaattgttgtacttttatcctctctactttatgaaattacatatacaataatttccaaaacttataaaatatatatgttttcaatatttagttgcattgattaatataatatgcttgacaaaattaattatctctttttactctaaaaaatgtattaaattatgtcatgcaatttcaaattgttctatcagtgttatctctttctgatcgtcttggcttctaaggtatgtactatttttcctctaatattaacttttgttgagtatttaattcatgcataacaaaaatgtaattctaattcagaacttttagctttcttcaaattttgttagattttgtaaactttgttatattaaattaatgcatttcttattttactaatttatttagtttacaagtaaatcttatataattaattaagcacaacaatattattactaataggtgtgaaacacaggaaattcttttcataagtatcacaagtgaaatatcaacttcgaagggggtgcgactagctaccttgcgaaagcctcgatataacaagcaacctcatctcgaaactaagccattgcacaagaaccttctcgagggacatcttgcatagtgtggtgtgctgcaccatggcacactcacaatggagccattttgtaacatgagcatgctttggtgcttgatcattagtcaagtcttgcaccaagcacctcattggggtggggagacttttgttaattagctttctttcttttgtatttccattcaaatatgtatagagagctataatcatatatgttcctgaaaattccttgaaaccccattaagctctttagggggtgacctggtaacttatgaaccagcatgataggggcccagctgtgtactcccttgccctatcaaggccatataataataaaatgatgtttaccaaaggaataaattgtatgattaatatttgttatctatgagtagatattagatttagggccgaaaaatggccagatctaagttttggaaaaaaatttggtttttttgtcagacccgatggtggtccgataaggtctgatggtggtccggtggtagcccgatgatatggtccgatggtggtccaatagtatttgatggtctacctgatgctacttttttt

SEQ ID NO: 301146 - DNA, 1551 bp, Cannabis indica
aaagctcctttgtggggtttgggattcatattgtggcctaactaaaaccacacactaattatcactccccaaaaatggtcaagaatgtttttgcacattttgtatgtgttacctatgcaattattctcttctttacatgtagataaattatgattttactttctttttcttttgtaagttctgtgaaaaaatagctagagaaattttcgcaacaaaaaaaatcaaaaaattaaactctaaaaattatagttcaaggaacaaaaattttatttattctaaaatattcccaacaataactatataaagaaaaaaaaaatagttacattctgctaattttttttaataatttattgatataacactaacataacgttaatctaacttagttcaacaatctaaataaaaaaatagcaatctaatgacaaattatagaaatgtatatatatacatatatatatatatatgtatgtatttttagaagtaacatttgtattttcaatgtcaataagctagattttgaatagtttaaacttaaaattgttaagtagaatcttgcaactatacatgtaagtttaactcatgaccacaataagcaaaatatttttaaaattgaaccgaatgtaactgaatgtgaatatttacaacaaagtttgagagaaatttttataaaaaaaaaactctacaaaagtcaagttaaagaaaaaaaaatcctatttgttcaactatttttcttagggtaaataattttataagtacttaaagttttgagattgtaagcgggataaagccaataatttttcttagcaacataactacctaatgttagtaaaagtgtaattttcttaaaatttcgttagtacagactccattaatatcttaaacaggacacatataaagctctaattttaaatcatgggtctaaacgaaaacatgtagtatgagttacgttaaatttttttttaataaattaaaaacagagtctacattgataaaactaagcaaaaattacagttttcaaacattagatacttaagccgctaaatttattttttaagtttatgaaggttacaaatacaaaactttatgtatttataccgcaattattcttttttcttagagtttggtacgttcattctcaactctcactacccattagtaatttgttatttacattcaaaccacataagggaactataacaacataaataagttataaatttcaaggacatgtgaagaaaaacttgaacattaaaataaaattaaaaaacttacagcattttcacaaactattactagccacccataacaaatgtaaccaagttttataagttgagagatatatatccttgattgggacagctacatctaaaatatcagaacatagaagaaaatatatcagaacatgtacatcaatatcaaagatatttcttacataccaagcaaaaagtatataaactattaagtcaaaagatattttttctatacaccaaaaaaaagatatttatatatatatatataaaccaataaacatttatttaaatatatatatat

SEQ ID NO: 301147 - DNA, 956 bp, Cannabis indica
cccacagtagacaatccctatatgtttatatataaaaattgttcatattaaaataatacatggtattgttatttggtaattaacagtagaaataaaattagattgtaacagttttaaataacaactgttatgttagtcaaatgctacaatattggttcagatataattagtcaaaatactgtggcattctatttagttggttttaagtgtgtcaccattgcctatttaaaggctttagtcattcttgtaacgtaagaaacaattcatattgaattgagagagcgtgagatagaggtgggagagagatacagaaagagaaaagcagagagaagagagttggggaaaactggaccaggtccagtgttcttggagctgaaactcgagcagagttttagtggattctttccataattattttctaggatgcactcaacaactcaaacttataatttatcagtttaatggagaagataactatcgggaataacaagaagtaggtccttagtttggttgaacctatataaagattttgtgtctcaattctttacatttttgcatttttttatctggtttatttttttgattttgattgcttgattgttaatcttgttgtaattggttttaattggtttgaatgttctttggcttgggttctgtgctgttaaattacaacagtagtattagagcttggaattttgagaaggagaactcattcttgactcgaacatggcttcatcttctggaagatttgatctggaaaggtttgatgaattaggagacttcaatctatgaaaggtgaagatgatgattgatatatgagaaacttgattctggactagaagaaggtgttacgaaatcacagaaggaaagtaatgcagtgaaggagtacgaaattgatactgtgatgaaactgttggaagttattttaccaggaacttagatctactcacaagtat

SEQ ID NO: 301148 - DNA, 4149 bp, Cannabis indica
atcgagaaatcatccaaagacaagtcaagcttatgttgaggatttttttgcacttggaatagcttcttttcaagtgcatcataagtccaatgatatctgactcaatgtggttcgttctatagtggtaagtagcattcttgcttaggtcaattgcactctgactgtcgcaatgaatcacatacctttcttctttcaaacccaattcttggagaaaattctttagccataacatttcttttccaaattcttctagagcaatatactctctttctgtggtagataaagcaaatacacttttgcaactttgacttccatgatcaaactccccctagaaaagtgaacatatatcaagatgtatactttttaccgtcaagatcattggccatatgtgcatctgcataaccttccaagatttgttctcctttctcgaagctcaaaaatatattttatgtccctctgagatatttgaaaatctattttatagtttcccaaagtagtttgcctgaatttacaagaaaataacttatgactcccactgcataagtaatattcgatctcatacaaaccattgtgtacatcaggcttccaatcggtgaagagtaaggaataaccaacaatttcctcttttcttcttcaaaggaaggacctgactcttgatgagtttgaaatggccaccaagttgtgaagaaactagctttgcacctttcatgttgaacctctcaagtattcactgaacatagttctcctgtgaaaagcataattttttagaaggcctatcaagaattattttcattcctaggatttgtttggctgcccccaagtctttcatatcgaagacccctgatagttctttcttcagctaacttatcatcttaccatcttgagaaactattaacatgtcattcacatatattaataagacaaaaaattcctcattaggaaatttccttatgaagacatatgaatctgccgctaatctcttatagctccaataccatcatgaatgaatcaaacttctttaccattgtcgtggagcctgtctacacactctacaaaaaagatgttctttctctttcacctcaaaaccttcaaattgttgcatgtaaatttgttcttctaaatctccatgaataaatttagtctttacatccatctgttaaaagtcaagatctagactcactactagtccaaagattattctgattaatgatattttcactactgtcaaaagtatttcatcaaaatcaatccctcttattttaccaaaacccttggcaactaatcagtctttgtactttaccaagtttccatgtccatcatcatttaatctaaacacaatttattccttagggccttcttgccttttggaagtttcaccaacttataggtgttgttcatcgtaagggaattcatctcgtccttcatggaacctatccacttgtatttgtatttatgagccactacattttggtaattctctggctgccccttatcagttagaagaatgtactccaactatagatatcttttgtatttaattagtcttctagttaaccaactgtgagatccctcattttctggttgctggtactcattgctccccctgattgatgtcttcttgtgttggtacatcttcttcagcatcactatcatcactatgggacatctcaacaacttcttgtaattcatagtttgaccattattgttttggaggaaataacttagtgtcaaccttttctggttgactcttttcttctctcgcaccttcaattatttaatcttcataaaagaccatatctttgcttcttatgaccttcttgttaactagatcccaaagcctatacctaaatcattatgaagatacatggaactgctttatcgtcaagtttgaacctttgttcatttggtacatgcatgaatgccttgcatctaaacaccttcaagtgtgagtatgacacatatttctttgtccatactctttctagaatataaaactttaatggaattaatagagatctattaaaaagataacattcagcctgtattgctgctccccaaaatggtcttggtactttgaatgatctcatcaagcatctgatcctttctataatggtatgattcattcattctgctacaccattatattgaggagttataggtaccgtcttttcatattgaatcccatgtttagagtaataatttctaaactcatgagaagtgtatttactttcattgtttgttctaagacactttaatagctttccaatttctctttctaccatatcatgaaattgttgaaaaatccaagcccttggtctttcatctttagcatatagacacaaacctttcttgatgcatcatctataaatgttaaaaaatactttgctcatttcaaggatttaactttaatgggaccacagacgttagagtaaactcgatccagtacctcatttttcttagtagaggacctcttaaataagaccctatgttgcttcaagcaatgctcacaaggatcatatagagtacctttctccaataaaaggaacttctttgcgagtagttacaaaccctttcacttatatggtcaagtcgttgtgccataaattttgtgaagtaccgtctgctacatttatactgttgttccaagctttcccatacaacaaacaatatagcttttctcttgcaacaatcattgacactttacaaattttccaattcttgttttcaaagtagctttcgtacccatgctcatctaaggcatgtacagagataagattaagatgaaaatacaaaacatacctctcattcttcaatgttaaatgatagtttacattcatttgaataattttggggcatgcaaaattacccatcttcacattttcaaagtcaccagcattgtatgtggtaacacatctgttaattgaaagtgatgtgaaaagaagctcctgaatctaccacctactcagtgatatcatctccaaacattcattaacaatcactctcatcatatcttcttctatagtggcattcgtagctgtgttgctgtcagtgtcaccattatttttcttctttgctggcctcttgaattttttacttcaaaatcctatgaattttcttaatatgatccaacttgtcacattgaatacaaccctcaattctagttctggaatttgatctgcctatggaattaattatcatttcctttcctaccttctttgtttgacttctccccatattttttaaaataagggcttgagattacacacctccctcattcttttacttttcaaataaaccaaagccactataatgattttatactccaacttgtccttccaattagtaagagtggtgataaggtgatcataaaatggaggaagtgtttctattatcaacacaatttttttcctcatccctaaacttccctttgaaccttatcatttgagaatatcatgccattgaaattactcaaatgatggagcatatccacattctcttgctcccacatctagtacagttccttccacaagtagaacttgttagaaagattcttggacatgtataaattctctaaaaagtctcttagatttctttagcaatcttgcactctttcgaatctatatttcgcaagatgatatctgatagatttagacgaattgtactacatgcgatctcatctatctcctcccaatcttaaccttcatcgtactaggcttttctgttggctggataatgccttgtagaccttttgctgaataaggagatccttcatcctactttataagagggaaaaattaccgttgtcactaaacttctcaatatccaattttttgcccgtcatgtttcttgagtctcacaaaactttgtactggctaggtgattcctaggaaagaccatgtatatatatatatatatatatatcataatcctatcaacaaagcataggtttggacaggcttctagacggaatcactcttataagtgagttcctaagaaagacatagagagtcacaagtggactacttaaattccagtttcccatacatttctacttacgttgtgcgtataaccaacgctacttcagaagtagagcttccaaccttgataatctgacacaagttgttgggaataatggaaaatatttcaatt

SEQ ID NO: 301149 - DNA, 2063 bp, Cannabis indica
aaaattcttaagatcaatatgacaaaaatacataatggaccactcccatgcataaatatgtgtaaatatatataaatttcttatatataaagtagatccttgcaggaataaaacagaaaattaagaagggggtgaccccattgtccattctatcaaacttaattaaaatgggatttatttattttattaatattgtttttatgagtacttgcgtgatcttctctctcttgtaaaaatttataattttaaccacttggtgaagaatataagaagtgtgcccaaatgggtgacgtacaaaatttacaatttaggtagcttaacaacgtatatgacagaaatgaagtacgtgctcatataatctgcttagatactatttagattagtatgtatctatcatatcggaagatctaatcaggtgaatatattttggcccggccacataaatataagctatagctagatatatatggtcctacatatcattatttaatatggttatatatgttccaacgaacactcttcgattaataataaatatatatatttatatgcatatattttggtttttccccatgagtaaacaagtagacgtacacttattttagagtactcttggtcccaatatgaacttccctatgtacatggactatatcctagcgcaaggtatagcctaccccacttaactatatatttatatagtttaataagagagaaaacaactaattataaagattaattagattggtaatgatgatattcatctcagaaatattaacgaacaccttaagatgctaagcactcttgtgattggtgcaactaaatatcgagtcctacttattttactttaataaatattaaaaaaattattaactaattataagaccacatattatcgtggtgctcagtactatgcgtgtctcataacaacgctcttattaatgtatgtcactatcaaatgatttaataaataatatggaaaactgtttattaactattaggtgctctattcatataataccatggacagatcaatataattatgatgcttatgctaatcgtatcatttcaacttcacgagatttgatcttggatcatggttgctataggcaggtcctttaacaccatatttatgattaagtagcattaatatgaaatcaacttaatacataattacatatgaaaactttaagtagtacttgacataatagtacctttactatttctccatttgtcatcatcatcatcttgtttctttttggtaatgactaattgtattactcaagaatcaataattacaatgtacaaaatagttgagtcaacttttcaaaacaaattatatcgccttttgagtaaacctattataaatctcaatctttattctattaacaactaattgaacaatatacattttaattagtttccaaaaataatatgtttcctgatttccaaattctatacactacatttacaatagcaatataaatctctctataaaacctgccttttgagtcaactgacttagagtttgataatcgctaatgaatcaccaataaggatttagaaataataaataataataaaaaaaaaacaatacagaattataggagtttgactcccttatatatgggtaatgacttactccccttatataggagtttgatcactacggaagacagtgaattctagttacagctctcaaagtgtttaaagataatatctttaaaccaagtgctatatgtgagtacattttaggtctaggttccttccctttgtgaatgccttcacttttatttacgaaggaaaagttgttacatttggcaccgtaaaaggagtaaataaagagtaaatatccctatattctagggtacaattatgatctgttaaatattctttattctcggatagatttgttggacactacaacaaaaaatagtcactacaacattcaacaccattagcggcggacccctccgccactattggtgtcctttctagccgctaaagggcattagcggcggacttcgaccgctattggtccgccgctaatgcttggccgctattaa

SEQ ID NO: 301150 - DNA, 1393 bp, Cannabis indica
gtcataagtacagggactaaaaaagctaattattctttgtaatattataaagttagtgataactttggttaagggacgtgctactctacgtactaacaaatttatgttcccacgttgttatgtacacttttgtaacgttaaaaagatatgtttaattatgacatatatctttttttttttttttttctttttgaaaatgaattatgacatattctaaagtaaattgattttcttttcatggaaattctaaactaaattgtaaggaaataaaatgatgcaatgtttcatattttattctctgtcaatttgtaaaccattatgatatttgacaaaatttagaaagcacgaccatccaaaattggtggtatattattagctttataattttttttttttttttaatagaaggagactttatgttaaacagccaaaccaggcttatctgctaacattttagcaacaacacaacaaggcaaagaaccagtccacaggtctgaagaatgagtcatgcgactccaaattgctaaggcatttgccacagcattacactctctgttaatgaaaaaaaattgcagaaaaataaaattttgcttcagcaaaataacctcccgaaccaccataccccagtttgaatgaggaggagaattcgtcttcaaagcagcaacaactcccaagcaatcgattgcaacacacaccctctgcaaagaccaacggcacgcaagattaaccccaaccgaatagcagcaacctccgccaaatagacagaaaaatagcccggcagaaacttagtttcagcgacaatcaaatttctatcgtggtctcttatcacaacacttaaaccacatcccattttatcatgaataatggaagcatcagtgttaagagtcacaaaaccaggaagaggaggttgccacacctttctaacctggattggaatgtccttccgaggcctaaaagcctctcctagatgaacttccaaaacctcctgagcccacatcacccaaacatggtcttcttgagctttgttttgaaatagtagtttgttcctgcgttaccaaataagccaagagactccaataaagtacatcatttcatctttagataattttccccataagaaaaacaacaaatttggagctgtatgtaaccccttatttagcagcctatcgaaaccaaaatgcttccaaatctgttgaaccttcgtacacaactaaagggcatgacaaaggttctcttcttccaccttgcaccaatcacaagtagtatcaaatgacatacctcgttttgtaagctccactttcgtagtcatccattgattaaacacacgccaaatgaaattcttcatttttggaatgagcttagacccccaaataaacttccaccaagctttcaa

SEQ ID NO: 301151 - DNA, 2695 bp, Cannabis indica
attaagggctcgtttggaatgtcgtattaggttgtattgtattgtattgtattatattgaattgtattttatgcaatatttttatgtaaaactatatgtggtattaacttttatggacacctaaatatataatattttagtataacttaaagtttaatatagtattatataaaaatataatgtacaaaccaattcaatataatacaatacaatacaatacgatctaataccattccaaacgagccctaatagtattcagcattatcgtctttgtgatagctattttaatttggatcttatctccacttttagattagggatctttcccatatcccttgagtttcacccaatcttggggataatgtggtgatgattctttcccattttttttaattttgcacaatttggaggatcactttgccagttataggaggctcttactacattctcttttgatcaaattttaagagttttcatcctattaaaaatgatactgccacaacaagttatctatctaaaatactaatcataattcttaagaagggctatgatatgtttcaaaccctattcatgaaataagaaagaataagggtgaagacatctttactactataccacacaacacgtgataaatgtcatctataaccttaatcgatacattgagttcacctacacaacacatcttcttacaccaagttatttgtgttgtgcccacaaatatcctatttaactaattgatagattctccattttttccaatacaaaaaaaaaaagtgcaactaatttcttgaatcaaatatgttaacattcaatttgttaggtatttggaatacaattattgaaatgtgaacaccaacttaaatggaaaagtatgtaacaattaattaatctctaaattatatcaatttaaagaacttgaatggaccacaacactaattgaagcaaaattcaattactttacactactacatatacatatacatatacatatattgggaatgaattttgtcattttattataaaacaaaaaacacaaccaactaaattttaatgtagtacacaaaaagttttatttgatgtatataattaaagtacaatgtacttatcaagattgaatgtattttcattttcaaccgttaaatcaactaaattttaatccaaatggttatggtgaccacgggacatgaccgaacaaaatctaattcataatatatatagaaatttatggtataaatatttaactttaatttctgattttagataaacacttaaattttatttttaacgttaataatatttacagttaaatttttaaaacttcaataaatacggctattaagtgtcaaattaatagccataaaacagtctctaattagtacaggtcattaaaattttattttttatttaaaaattaatttaatataccaattaaaaaataaaagataataactttacatttaatagtgaagtacttacgaaagttacaaaaatataagttagttaataatattgctgtaaaaaatacttagttatttatctccaaccgatagttaaacttaagtatttacactatatattactatacatatatgttatagtgtttttataatgcacccttttaaaaaggtgacccactctctacctatttcggtataaagaaatagtctattatgtagaaagcagcgtataaaataaaatatttacgaatgcaacagaatgtttgaactttattttgaacgtgttaattttttcaaaattttttaaaattgtatagaatgtcaataaaaatacatcacatacatccctttatagaatttacttatattatatatataattgtttgaccattagcttcacatgtaattaacaatctaaatatctctacacctaaaattcctccacacccaaaatatatcacataatatcataaaactttctccatttccaaaccccaaacaaccaaaatgaccaaatcaccaaaaatggagattatggaagatggaggaggaggaggaggttcctaccaaccactaccacacaccggagaagacgattctcgcttaaaccaactcggttacaaacaagaactccgccgcggcctttcgtaattaatttcattaattttctcactctgacattttcacaaacactttccgatctgaaaaagataaacttattttgtgtttttttcgacagggcgatatcgaatttttcggtaacattctcaatcgtatcggttttgactggtcttaacacgacttacagtatgggactcacctatggagggccattaacaatggtgtatggttggccaatagtgggagttatgactttgattgttggttcttccatggcggagatttgctctgcttatccaacttccggtggtctttacttttggagtgctaaactcgccggagaacggtggggaccttttgcttcttggctcactggttggttagtttttctttctttatttatttaattgttttgataataattatgaaattaaattaagtgaaaaataaatgataaataattaaataacttattattttttaatggagaattaattagtttggtatttggatttttagtggaatgatgagtagttaattggtgtaaaagccaaagggaaatttgattttctatgcttagaaaatcaaaaaatttgatttttaaaccaaaatttaaa

SEQ ID NO: 301152 - DNA, 2120 bp, Cannabis indica
cttgcatggctctatgttgtttgataaggttcacacaaaatgaaaaagaaaaaaagaagaagaagaaaaaaagaatgcatagagagctttcatcaacctatcaaaataataataacaggcaagttcatgcactttcgttgtttcatgatgcatgtttataatttatttattatattctgttgaataattagcatatatgatggtaacatttcgttttttggggaaacaaagttacttcggccatttcccatttgtatttgtaattattagagcttttgcttggcccacagttgcaccactagaactagctacttcattagatgcaattatatcatatcgagaaattaatattaatttgtggaaatggtccactactccttctctacttttgtatgtaattcagggtatgatgtgtactgagattcaatttaataagtttcttttccattgaagtataacacgtactcattattagtatagtcttgttttgcttatatacatacaatattaatcagatcataagtacactaactgtggtcccatattccggtttttgtttagttttttgtttcttcttttctttttgggaaaatggcatcctaagaagaactagatgaaccagcaagcagaacatcacatgcatttatatatatagtttttttttacatctaatatatggactgtattttcattgaaaaaggtaagaaaaaaaacaaaccattagttttggcaacatttgtaagaaacatttagaaaagcattattaactcagttattaaagtattattatataatagagatatgacttgtataccacttaaagtccaacctaccttttagcactacttaacatacatacatatattttaaaaagaaaaattagtgtactagttaatgtttttaaaataacccaagcatcattgcaatgctactgtgatatatgttgtaatcatttaggaaacatgacaataaagtattaattccacatgttttgtttaattaacaatttaaaatattatgactacttttatatcattttaaaatatatagcatgatcaactttatcttttgggtcattatttataagttgtatagaagcaaaacattttttttccttttcttgaaacttttgggaatttttacaaactacaagaagtgataagtgtgtgccatggtgcaaagtgtcccaataaagacattattcctcaaaactgatgcaaaaatttcgaattgaaagtttttgtcacttctaattcgacactactttacaccagtttaaaactgacattttctcttttgcattgatttaagtaactaatattaaaagaaaaaatgcccaataaattattaaagcctacttgccattgaaaccctaatcaatattttttagggtttcaatcattaaagtagtaagaaaaaaaatttatggggttaagtgctccgagtcaaagttgtcgaccccgggaaggctccctagtcctacgcccaggttgactacaagagctccaaaataggtatttagatctcgtcaagttgtttccaaatcatcatcctttagtgttctaaaccaacaagtcaggttgactcgaagttcaaagcttgagaactgaaaaatgtgaaatcagaatcccagaagccaacccgaacaccaagggtttcacccagagcccaagctgacatcctaggctagtgtttcagtttttaggttcatcatagtgcagattgcccaaaccttgcacttagacaagaataagacctatcacaaacatgctagagccatcagaataagaataggaacacttcctatttgaggcacctgggcacccggtgtccaagttgacctgttgatggacccagtgcctaggttgacatgttgtcaaccaggggtgctttcgaccacatttttgaagatgtctcccctgaattttcttcttcttcttcatcatccaaaatgaggaaaaaagtgctataaagaaagaaacaaatcaacttggaggccaaataggtgacccaacacccaggttgacactgggcatggtcattagcgcccaagttgacattgggcatggtcattagtgttgggttttgtgccctaaattaaacctatttcaatataatca

SEQ ID NO: 301153 - DNA, 2516 bp, Cannabis indica
agagaaataataagtgaaacttttgggatgattgattaggtatgtatgttaaactttcttgatgattaagagatcatagtgtttattaaataattttgttatgaatagaagaataatgtagttgaatttataaaagaataagctgggcacactttgattagtaattttttttatgcaatgcctccaaatcaagaggtgaaaagtatcaaacaaaactcttaggctaagtttgaaatttgaattttggtgaagaaaaaaagagtaaggaaaatataaagaaaaaagaaagtgagaacaaaaaaaaaatacatcaatttttcaagtttgatatggaaaattttgttgaattgagtgtttttttatacaattttttttttttcataccaaatatgagaaattatttttgtttaatttttttcctttatttttctttactcactaaacttcaactttcaagcataaccttagcaattatattcactttttgtacattaattggagttttttttgttacaacatcaaacaatgttacttgcttatgttaaaaatgatcaacacaatgtaaaaaataaagaaattttatggtgtactctaaaatttttatattaagatagttttaatcttaattttttttatagcatgcattgtatatcgtaatcatttaaattatgttgtaaattttcaaaatattcatactagctaattgaatgcaactatattaccatattctttctttcttctttccagccaaaaatatttcaagtaaattatgaataaaattgtgtactttcaagtattaaaaatttaaacaaattaaagacatgatgttaatttgacaatgtagcattacaataatctactctactcttatatatatcactataccataagaataatcttcatgttgttgttgttgttgtagtattattagtagtagtggtagtagaccttagtaagtgtaaaggatcaaacacattatgattaacatcaaaggctgtaatataagcataaacaatcacagcaaacccttttagccccaatttgagagtttgtttcccaagaaagcttcctatattctcagcaagcttctcacatattgactcttcatgaagcccacaaaacctcttaagcactttcaaaacgaacgcctttcgcgaccaatcaggcgacccaagaatccacgaaggaacactcaccacataactgaatacgggtgaaacgacgtcgtccacattaaaaactacattttcattattattactattattattagatagtaaggacaattgaagtatgttcctttttctcactcggatttcaagccgtgacgtggcatttgcatcttgacacttgtaagtgtacatatcaactttgtaacgacactttcttgtagttctcgccattgatgattttaggtaggtatcaagatttacgtgcattatttttccagccctacatttacgtacaaaaataatactttatcataggtatataatcatattcatataaacgttgcatatattatatgggtgtttctatactataatgcacactcttgagagtacacatactttttatttgtttcgatattttgaagaatttttaagactaattttttttttcatagtagcatatttaaaaacttctgtaaaattctaaaaaattcggaacaatttataatataaaaagtcgtgtttaaacaatttattttacatgcttataaaataaaagagtcacgcgtacaacagattgtttgaaccctatttcggcgtgttaaatttatgcaaaggtcctaaaattttacaagatatctgaaatatttacaacgtacacgattatgaaaaaaaattagtctaaaagattcttctgagtataattagtgtaaagagataaatgcaaaaaaaattttttgtaaactagtaaacatacctgtaagaaacttattatgagaataagcttattagttgaatattgatcaagaaagattgagaagtatgaatattttgatatatgacattgaattagagagattgagaactatatgaatattttgatgagattatatgctcttatatataacttaataagtattctatttggattaggaaacctagagataatattataggattttcttattaattttagaagtttcctattattattaggattaggatttcgtagtaattattaccctagattttattaggtttgaccctattactaatttaacctttttttcttaattaaaagattattttttacagtcacaaccggttttatatgatcaagttatctaaaaaagttacccattttgtgaaaggaaaaaaaaagtttacccttaatgcgtgatggtcgatgccattaccgtacatggacaaaatctttgttccgtggcccaatattaattaggtgaaaattaacaatattaatttgggaaacttgtacatatctttatatatggcattttttggtttaacagaatatatttttaaaaataaaagaatattctgtta

SEQ ID NO: 301154 - DNA, 2194 bp, Cannabis indica
  modified_base (222)..(222): a, c, t, g, unknown or other
atgccataaaaaagtaaacttttataatttcccattaatttttactttttttttcatatttattcaatgtttatggtttcaccaaattttcattgtctcacttttttttttagtaattttaaaaataatctctggtcacattttaatttggctaaccattaaaaaaatactttgtggcaaactcttcaatgtgtaacatttgtaattgtggaaaacatatanggtttttttttcatattttaagaaacgaataattatatagacactattttttgtaaaataattacatttttacgttcaaataatgtttttttatgtatatttttacggttttctaaaaaattaacaagaaaataacattaaatcaacaagaaaactatataaaagtaacatgaaaataacaacaaaaaatgacatatagataacaaataatcaataacaaattaacaagattacaacataaaaaaaaaccgtattttctataaataaaataaaaaaatcgtaaaaaatattaatgagagtaaaaataaaagagaacaatataaaaaaaggtataaaatgtaatttctttaaaaaataacttatacctttaattcccatatttatcaaaattccccaaataaaaaaaaaacgcaaaaacatgattatatattaggtccaattaaaatgccctaatatatatctccaatttctagggcctagataagtatgtttgcactattagaataagttaatcacatgctcaatctttatatagaataagttaatcatatgctcaatctttatatagctattaataaagagaaatattatattaatatgatccatggctgtataggagtactcagtggtctcatttgacacgtcggaagctagatgatgacgattaagttacaaaaaggcctgatccatctagccatatcactgccaaagaatactgaagtcatcttcataaatcaatttatccacaacagatttttttaaaaaaattcacattcacagctagctagctagccattttggaaagagtaaagtcaaagatctcaaattagtaagaatgtagtattggaaggggacacacgcaagacaagagtaattttctgttttcaaccccaacgcctctatctttaattttttaatgtcccaattaaatattcactaatatatctatcccaagaagtttttttttttcccactatttctatgaaatttgggttttgggttttggacaaaatttggccccaaattctaaatcattgaaaaaaattgtaattgtggtagtagctagtaactaataagtagcttatggggtgtgaggggaaaaaatggttgaaataagaggaattagcattaaatcgctcaagaccaacatgctcggcgagaaagcaatgggtcttagcgaataacgacgcaaagtcatcgtaaatggtacggtgtcacatggttttgtaggcactatgcaacaaaaagtggtctcaccccacgtgtgctgagccctcacactctccttatcaatatttattttattttttaaatattttaaaaagacaactaaatttgcatgaattgaactgcctaatattacatatatatacacatagctaattaagacaaccaataaaaaaggcaatgataaaaaaattaattgtgttttgggttgatgtttttcacatactttattgactttgatgttgaagtagtaggaggatctttgacttgtgaaattatttcttttggctgtaaattagatcgaatcattttcatatcgaacattgaatcttacattatatgattcaaaaagaacactttcgttgattaaactaaaatgaattaagtcacgcatgtaacgttccttattgtcctcttaaatactagtgaggaggccaatgcaaggcattggcatgggtgtcattataaaaataattttatgctaaaaaataaacacaatatcacaaagttacctaacaaaaaagtgagattgtttattttttatttcttttctttatagatagtttaatgattatagttataacataacattttggaataagatttgtgataaagatttttcatttttatattttaaaatttatttttttttttttgcattttcacggaattctacatagaaatttttataacagctcgtagagcaacctaaatcgtaaccaaaaatcgaatagcaatccacata

SEQ ID NO: 301155 - DNA, 3030 bp, Cannabis indica
aataataataatagccaagaagaggaaaaacaagaagaagctacaacgattcaaccgcactctcctcaggcatgctttggtcgaaagaaaaaacgcccaaacaaaccaaacccatagatgatcaatgcatgaatgtaagttatatttatatatataattgttttaattaatgaatatatactactattattgtgagaaattaagtttcagctccattaattccagagaattaatttcaaaacccaataacatctactcctttaatttctctgtatctccccatgttaatttggtctttttctatttttttaactaaatcttatgtttgaaattaaaatatatatatatttatttaattattataatttatacatcatgaccaatattggatttttacattgttcaggtataattgagatggatggatggtatatgatatatatggatctgcttcctcttaaataatttcttcctatactataataaatagacctgtattattattattattattattattttttttttgtgataacattattactttctgtactgtttgaagatctactgtacattttatatatatgttatgtaaaatagactaaataatgatgtacttttgaaagttattataggatgtatctatggaatcaaatcattaatatatattattgcaaacttttgatgagaacactaaattattcaattaaggttttctagtctttctagttgtggaagtgattgaacaataatctatggtattaattcaatcaattaacttgatcccttttctttttgtgtataaagttggtgggacttaattaatttgaaaacatcatatatagtaaattaattgatcaatatttaaagcatgcaatgatgttgaaatcacatgactatatctctcaaattttggagtgagaatgttctcgtaataattaattcctttggacataaaggacaattaattaatatgtatactatttgacaaatattaaaaggtatcagtagtgcatgataccattttatgtattaatattgttattggtacaattaaatatcgtctaatatataatataatgtaataattttttaaagaatattactgaccaattataaaatgacatgttagacactattaatatctaataacaatactctatatttttaattaatttaccatgatgtgattcgtttagaaaacagcaagtaacgtttgactatatatatttgtcatgataaggacctccacattgaaaaaatgctgaaaattttgaagtcctaccaattaatttaagcactttttttgtaattgttttttttctcttttggaaaacaccaataaatttaagtcaaattataagttcggtaaagaaattgcattgtaggagtctaggagacatgagtttcttctagtacatgatgtaacatattcatgatcacattgctttttggtcctacactcagcaccttatataagcagtgccttaagattggttagtgatatttcgttattttcttaagttatatgagacccgatatttaattacactaataacaatatgactctgaggaaaataataaacagtagtagtattttttaacatttctcacatacatatataaaaaagaataaaggaataagagaaaattaataagaaaaatatagaatgaaattaaactactaaaatttgtgctcaaaatttgaaaataaaaatggagaattaccctatatattattttttttaattttttttcaaatttacagtttcggtttctaaagtaattacagggctagttgtaataggagtttctttacgattttttagttgcaatagaggtttctatataaaatttcgtaaaaatataaaaaaaatatatatatatttaaaagtataaaaataaaaaaagtccaataaaaattgggagaaatcaattctcatatacagttaaataaaaatgaaaggactgaagtattatatataaatatttaataattacaaagacaatgttgtaattttacaaaatactaattttcttttctttcaaacttacataccatatatatagaattagaaaataaataagttttctatttttttctttgtaatgttctatctctttcatatttctacttctattattttcatttttttttaaaaaaaaaaaaacataggttaattaccaaactaggctttgggatggaatggatcaaatgtttgaccaccccctataatccaaagtattaggtaaccacttctttgactgtgtaaaatttggccgtagctggctcaaaccatatgtttgatgtgtcttttgcataagatggcttagttactaagatacatatatttacattttcctcttcttacatttcttgatttaattagataattcaactataaaacatgtcttcatcattgagatctaataatgtcacattatttattataggctttcggatttttgtcccttatatatatatgatatattattgtattttctttcagccaattaaaagtagtcttagaataattttagtgttataaaataatctttctattaaattttgtcatacatttacaaagtgttgatatggcttttaccacgccaaaacttcgaaaaaaaaaagtttttaatattaattttactttttttttcaatctttaattaactttaagattaataattttctaaaagatatatttataatttttattttatattacacatgtgatgttaacgtgataatgatataaaacatcaatatttagtttatcatgtgtgacaaaatttaataaaagacacactttataatatttggaaacagagacaaaaagggtcatgtgccctaatcccccacatgaccccgctcaacttctggtttttttttttttattgttagtacatttatatgtataatataaaatatatgtatgtgtatataacatgcggaataaataaacatatacactatatgaatataaggatcgaaataacctccacgccattgattctttgtagcattaa

SEQ ID NO: 301156 - DNA, 6080 bp, Cannabis indica
atattttcatgaaacacaacattacatgaaacaaagaactgattgttatttatatcgtaaagtttgtagcctttaatttcttggggatatcccatgaaaacacaggtgcgagctcttggtgagaatttagtcctatgtcctaacaaggtggaagcaaaaacaaggcacccaaaagaacgaagatggtgatattcaggctaattttttgaataatttcataaggtgttttgttctttaataagggagtgggaatcctatttatcaaataagtagcagccaggatgcattcggtccaaaattttattggtatcttggcttgaaaatacaaagctcgagcaacattaagtaagtgctgatgctttctctcagcaacaacattttgctcaggtgtctcgacacaagtgaaatcgtgcatgatgccatgtttatagaaaagttcttccaacacaaattctggagtattatcagatctaaaagtttcaaaaatgctattaaactgagtttgcacatatgacaagaattgagggataataaaagtgacattagatttgtgttgcattaagtataccaatatgaatctagaatgatgatcaaccaaagtgagaaaatatttgtgattcgtgtgtgaaacaatatgatatgttccccaaacatcacaatgaatgatatcaaaagttttatcagcaaatttgctattactttgaaagggtcgcttcttttgtttagagataggacaaatataacagggtttatttttgtataaaatagaagtgttacaatctaaaatatcctagagtaaatccaatcgcttgtgagacaaatggccaagttgagaatgccaagttttagctaaaatttagaagatttgagtggattttagtgcagtatcaaggatgtaaagattattgacagtactacctattcaaatcgtcatcctgctgacattgtcctgcatagtgaagctattagaaataaaatgcacagtgataggtgcactattagtaataaagtagctgacagatacaatgttgtacttgaaagtaggagcatataggacattggtcagaacaatatcattatctaaactaacttttccactttgattgaccattaaataatcattgttaggatgtatgagtttagttgaaggtaccctacatatacattgaaaaaagattgacattagagcatatgtgtcttgttgctccggtgtcataatccaagaattatgtaaaggaagtttggaattatgcaacaagatgatacatgtgttacctgttgaggtactaggatcgatagcattcataccagtttgttgcaaagcaagtaaattcaacaattgttggtattgagtagttgatagttggggaagaagagcatgattttctgtagggactgtattgctttcatcgccattcggaaaccagatttgcaccagcatctttagatttactctgcttattgaactcaagaggatagccataaattttgtaacattattcgattatgtgtctaagaatattgcaatgaacaaaatggcctgttccttcttgtagaatgagacttgggaacttgattgtcatttttttggtttgtccttttgtcacctaaaaaaggaaaagccatagcagggttaggattgttaaaattagaaacagtaccttttttatgttcttcttgagtaataaggtgaaacacccaatgtacttctagtaaatgatccatgagtagaatgcttcctcgaacttgagaataagaatctgagagtcccattaaaaaagacataatgtattccatgtggtagtaatcttggagtttcttaactcctccacatgtacatccattacatgtacacgagggcctgtaattggttagttcctcccatatagttttgagtttagtaaaatacatgcttatggtttgattttctttctaaaagttcataagatcttttcttatattttatatatgagaaccattttttggtaaaatcaaactcttaaatcattgcaaatagccgaagcacattcaacataaaagaatacttgataaaatttcctttgaaacagagtttgagatcctagaaataacaatgttattatttcaataccagacattataaagattttgatcaatagagggtttaggaattgaaccgtctaggaaaccaatcttattttttacaaagatcgcgagctgcattgttctgctccaagggacgtaattggcttatcctgtgagaggctgtgacaccaatgcattttctggattatctccatggtaaagaaagtacgaactcacatgatctttcagtgggttctttattgatgcgatttaaaggccttgattgatttgagcagagggattaccaagatcggcaatggtggctgggactctagtttgatcatcatatgtagccattgcaggaactcaatggacagaacaaagagagaagttcagtcagagaaggtgatcgagaaagacaaagctccgtggagaagaaaacacagctgactggaagggcaggatcagacaggaaagcttatctatcctgctctgataccatattgagaaacaaagaaagtattttattaaagaatgaatgaaaaaatgaatgaataatataatggagaagagagcctcaactcaatctgttacaactaaaaaaagaaaagaagtttaattgtcggctaactaactttctaagagaaaagaaacaactagattagcctaggaaataaactagagaaatacaataacaaataagtaagtatttctcaataatagttactaattatattagaggtacatgagactcttataattataattgacctattaagttatagtcatctattaattataccttgttagtccaatagccccttaagattagaagggtggattatatattttgttttataagggtttgtaatggtatggtaaggattgagtgggttgttctacatttgtttctctgttgcttttacctttaattttgtgtctgagttgatattttccacaaattaggaatggctcaaatggatgaaatttctatgagaggtaggtatgtgtaattgtagattaagtgcgctaaataaaatatttgaacttggataatattatgagtattgattaatgattgctcataatatcttttaacagtacctacttgtaaacacaataaatattgattttatgttgagtgagttgagtggtatcctttcgaaaattatcataaacatgtagttttatgtggtgtcgttaaattcaatttagattgtgtttgataacactaaatagtaaataagtattgaaagaaagaatgaacatcagagtctctacatgtaccaaccacaactatacatacaatacatccatacatgtgttaatgtatatataccaacattgataaacttataaccaaaaacaagtacagtacacattaattaattacatgaagcaaactaattaatcccaaaacaaaagagcttaaatcaagctgaagggcaataacccattttcttagaagaagagtttggaagtggtggaatactctgttcatgtctgaagaaattatcaggatcaaccatggttttaacaagtaccaacttatcaaaattatccttgaaatacttattaccaaaaccaccagactcaataaagttggtctcatccttcttgttcatcccaagatcaagatctctatagttcacataagcctgtcttggaaactttgacacgtacggagccatgtagctataaacattcctaatccaatcaaaatgcttaactgaatctgtctcttcatcttgccacaacgaaagccactgaatcataaaaacggtgccgtttcgatgaggaaatggcgtttcagattccgaaaccttactcatctttccaccgtaaggagtccaaatcgttaatggagactcctcctctgtcatcctcttccacaaaccttccagcccagtttcaggaattgggtctttcacaaagtcagatttggctttgaaatagttcttgaaagttgactttccttggagaagaacttccggtggcgttccactcgggaaactggcgatgtagagaacagactcgatccaactcatctccgtacagtcttttctggtcagacccaattcaggaaagctctgttccatgacactgatcagtttatctgcgccgccgagaaacatgccttggtaagcggtggctatagtttttttactcttatcgccggcggaggcgggggccgtttgtataatggctctaatgaagagattctcatcaagcttgtccacaacttgttgccacctataaagtaacttagttcctccttgttccaatgtcttagcaactgtaaaaaccgaaactttttccggcaccggaacaagcttaatcttccaccaaagaatgattccaaagctggctccaccgccacctctaatagcccaaaacaaattctctcccattgtttctctatcgagaatttttccatgaacatcgacgattttagcatcgaccacattatcaactcccaagccgtattttctcatcagtgtcccgtaggcgccgccggttatatggccgccgatgcctaagcttgtgcagagcccagccgggaagccgtgaactttactcttctgggaaattctgtagtaaacttcgccaatagtggcaccggcttgaatccaagccgtgttatcttggatgtctacatttacggctcggagatttgaaaggtcgacgacgatgaaaggggtttcgttctctgaaacgtaggagagaccctcgtagtcgtggcctccgcttcttattctaagatggagaccgagttgtttggagcagaggacggtggcttggacgtgggaatcgtgcaagggtgtgaatatgaactctggttttggtgctgaagggactaagtaacgaaggttttgagctgaggattggagtattgaggtgaaggatgagtcttttggggtgaagaagactgtggagagtggaagaactgaaaggtctgagtttagtgagacgcattgtttgaagttatccagagttgtagatgaagctcccaatgaagattgggactgaagaagaagaagaatgatgagtagtattcccatggatgatttcatccaaaacgccatgtttaattgttctagtagtttttttctctctctctctctgctcaagaagaggtgctgatgatcaagaattgaagtgttgctttccccttttataagagcagcatcataacgtggaagaatgatgggaatgagttataccattgtagatccctggacgaaccggatcctctgtaattatttttttttgtgttatattctgtccaaccaattaaattatgccatatcaattagtgagttaaccatctttacactccgttaagtgcatttatatcttctccctcacccatttactactaatagatatttttgtatttgctaattaggatttttgtgccatgaactttcacatgtatttaaaattattaagattgttagatttaaggacttctttctaatactagtgaaaaagtctaacatggataaaagtttagggactatgatttagtacatgtcaaagttcgaggggcatgatttggtagatattagagtctgggaagcatggtttggtatataaacaatcactaaaatagtaaaattcaatgaaattagacaaaagtccttaaatccaacaatctcaataattcaggggcatttttaacgactttaaaatttcaatgggcataatttgacacatgtcaaaattcagtggacaaaaatcttaattaacctttttttaatgctaaaatagaaaaatgatttactaaaaaaaaactttttagtgggttgtatagtatacaagatattaataaaagcaattaataccgaataagaaagggtcattaaagatattagaatgagaaatcctaaggggccgtttggtacgcaggattggattggattagacaggctaatttgtccaatccagtgtttgggcatgttaaaagtctggataactaatccagttcagctcatttgtctgggattatttat

SEQ ID NO: 301157 - DNA, 1467 bp, Cannabis indica
tgtcaagaagttaattaataataatgtcagtagaaaattgaaaaatgtttattaccttttggttgagaaatggtgactagagcacccaaagaatctgagctattaaacctcttcatgacttggtaaaagtaacccagatgagattattgcttacacattcaccaaaatgctaattataatactatatagctttaaaaatggatttaaagatggagaggagaggaagaggaggaaggaagggttctctttactttgtcacttttcaccactctctgttcctttatatcaaacctaaaaaaaattaaagttttagtgcaaaagggtgtaccctacaaaccggcctaaaagacaaggcaaattatattatagcttattaccaaattaaattatatttaagctgtagtttaatcatcataatcatcatcatcatcatgtaatcaaaataataataataaatatacaatagcaactattaaatatctcaaatagttagatgtgtgtcgtattggacctctagctttagacttagaaacagtgaaaatgattaataatttacatatactgtgtgtggtaatagagtatatataaatatataaatatatgtatagatgtctatatatgtaaagacacacccatgaaattaattgactcctctcttgtcacaaattgtcacagaaagtgacttaagagattaaaacttaacaccaaacatataggaaggaagctcttgtgtgttataaaacactccactagtctcttttctaaaacgtcataattacgtctcaccatatctataaactaccatatatatattataaataatagtattgctattaagcatatatgtaaataaaagtattgctattagttaataattttttatattatttattaaattaaattatataaaactcaatataatttatgcccataacaatatctcactttttatgctatcacataacatttctcgatagataataaaaaattgacaatacacaattgttcattgacatagtatttttcggtacctgtcacaaattttcccgtatacacgtcgctttgccccgattataagtgaagttctacagtactattttatatatatacacatatttttgtatgtattagcgtagcataggctgtaaaaaaaaataatataataatcaaagaaacaaccaaagggttacttgcaagtagcaacttatgtaaagaaaaaaagatagatgttttgtctcacaagtcaagtcatatatatataactcaattaatactcataaccaaaggctagggttagtatcatgtgagttaaggatcactagtgctggaattaagctactcatgagtagaagtactatttatacttagtttaatactttgtatagtttttgatattagataaaagctatatatatgcaacactaatgcgtattacccatgaatagttactaaataaatttaactata

SEQ ID NO: 301158 - DNA, 2356 bp, Cannabis indica
ttcacaattaaaacaaataatattgcaccacatgtttctaactacacttgatttatttctttttatagaaacaaaactcaacaaattaagatgatggacacattacccaccaagggaatggcctcttattaattattttactataataatattgctaattaagctacttattacataattacattaatattataggagggaagagaccatcatataacacgagctagactgattaattaaggcatattaggcataatgagaacattaaacaaaaccaaaatgagtatgtccaaatatatcactcaatttactgctcactttttagagttcgatcacattagattttatccaaattaataatgaaaaaaagttatgccatttgttagaaatatgcaactttttaaccccaagatacacaattaaaatttaaaaacacaaaggtcaaaagcttgttaatagtgcgtccacaattaatttggtaaaataaaaaaacaaacttattcattatttgtttgagatttgaaaacaattttatgtttttgaaaacttaagaagtgggggtccacataaaaatacttgattgatttagtgtttttaaaaactaaatctgaatatgattttgaattttaagcttaaaaataaaaacaataattttatgttttctatgtttttaaattattgaatctaaaaactctttaaatactgtcttactttttttattttgagattcccaactaatcacaaatttaactttttaaaacacaaaaatataaaattacactacaaccaatcacatatttagaaacaatttgtcacatacaaaattcaaatttttgtttccaaaatactcttttaaaagacaatttttaaatcttaaaccaatcaagccctattcaagacctaaaaaagtcttctcccgaagaccaccacctgttcaaaacttttctttaacctattctatgaaccacaatagatcatcacaagaaaatcaaaacctagttgaacgtactctaagtttttacaaagaaaaatctcttctcacaaagctaagatatgaaatgaagttagaagagataagagaagagattgttctctaggtttcatttatgcacttataaaaatcctaaagatagctatgacacgtttttacaactgtataaaatttttttctaaaataaaataatcttggatttgaatgttgattgatctgcagcaatagattcacagtttgatgtgataaattaatttggatcttctttactagttttccctttaagttcatctccaccaaattaaccataaaatctatcatataaaaccacacgatttgttgtataaacaaccaaacccgaaacaattaacaaaaaatgaattaatgtaatttaattatacttttatatcttttatttccataaaaagaatattctctttatgaaaataaaccaaataaactaagatctctcacctataatcaaatcaatataatatgcaatattaaatatctaaattaaattaaaaaaacaatattttctcaactaaattgctaaaacaaaattcacaaataatagcacttaaatactattccattatcactactctaattaatacaactaaaagataaattaaaaatatatattaagaaggtgaacagagtactttgatagagtggttaatttaatattgtgtaatgataagttatcatcaacatacattaatgttcactaagtgtgctttttaataatttcatatttgtttggcaagtgcaagtattgatgagatggagtggttgattttgcctatatatgtgtatctcaacaattttttttacctcgtatgaatcatggtatcttattatgaaaattttattataaggctaccatttttgtcaatactaatataggtatttaaatttttagcactttgagaatttttttttttaaaaataacaatgtatattagttataattgatatttcactaattttaatattttagaaataatttatagtgtcataaacaggtataacattcggttgcatggatgcttattttttttccctttcatacgcatccaataaactattttaaattatattatttggaatttttcgcaaaaaaaaaatttatagtggcatgtttattataattataattatgagatggagcaacagacatcatggagagaagagaagtttaggttttggtagttttctaagggccttgtcgtggttattcgatgaagaagagagagagagagagagagagggtgagcccgagagatcggggttggagctgcgtgcgattgacaaagaaagagagggagagttgagagagagaaagagaaagattggggtttt

SEQ ID NO: 301159 - DNA, 2975 bp, Cannabis indica
attttttcgtgtcgtgccgtgttgtgcctaaacacatatttttttcatgtcgtttcgtgctcgtgcctctcgggcatcgatttcatgccatgtcaaaaatatcggcccatatttacagcactaagctcaagcaggtcatgcaaagacaagtagggattcatacttcagtctcgtatcgtgtcgtgccaaagctcattattttttttttttgttgtgtcgtgtcgtactcgtacctctcgagctacgatttcatgctttgttaaaaagaccgacccatatttatagcactaagctcaagcgggtcatgcaaagacacgtagggattcatactttatagcctatactcttcaatcaatcaatcaattagacacaacataaaggaatagaaaaaagcaaagcaaacacagaggtcaagtgagaggtgtacaaattatgtgacaatttcaacttggattccaaacattcgccataaaaaaattaatcggagggtggtttttgaggtaaagatccgaaacatatgattgttattattattttaacagtgagaaagagaggggattgggttggctgggccacacacacgtgtacgtagtggtccattccagcgtagaagaaatttgttggtatagttgggtcaacatctcaatcatggaggcattattgtggtagactgagtcatagcctcaccattttcataattaatatataattattaattggataaatatatcctcacggccacctttcagcctttaccactcaaaatttataaaattatattattcttcttcttaaaagataagaaagatgctaacaatgcataaaacaaagatttcgcactccgtcctcactctgagtactcgtgggaactctctttgggtcggaaaggaggctttttccacttgcattgccacccataattcttgtaatcttgttctttcttcaaagtacaataaacccattcattgattctcaattttctccctcccctatatgaatgtatctgttgggatatggaaattctatttttatattgtttcggccctaaaagaattgaactaaagcaaaaaaagaaaaaaaaatcagcttacaaaaacaaatacagccaagctgagctttaaaagattcatattttttatattatgaactctagaagaagccacattcctgtctgtcgaacatatgaaaaagtaggaccccaaaaacagttggtggcaaaacaattctcttccctatggataactagttttgatatgtgaaacttcacaggcaacaaacattccttaagaaaatttatcagcccattttgtcacagttttaaaccagaaaggtcctaagtgggttcctccttcacttcaatgacaacacaattggtcatccatagcttcacttctttgttcaaaagataagaccgaagccaaaaaaaaaaaggctatgctgattttaattttatttttcttatagaagtaacatccatcactttcttgtagatataagtggatccataaaaaaatttggtatattagattagtcgctaaaaaagcttgcaagtgcacatgtaaatcggcttattacaaagctacggacaactggtgtctacgtcttgccccctaaaaaagcttcttggtcccaataatgtggtagataactataagcacagccgtgatgcaaagcatcaccactatatcacaccaattcaaattatactagtttaatcacaccacatatttcttttttattaatgttattatttttgttaacagaccattataaaaatgacaaaatcatgacaacctttaaattataaatcccctcaaccatttataaatggtttaagttagggtaaaatagttttacaatataatatagggaggcagaatccacacattagaacagcattgttaaagctaagaatcaaattactctttggaaaaaagaaaaaaaaaaattaattgcctaattcaaagttctttttaacttcagattgcttacaaacacaaagatttcctaattcgaaatgaaagttaatgaggtctctttccaactccgtatataataatattacatcctaaactactactttcattcaatgttagtaactctatgaactggaacattgtggatccagaaagaaaagttattacctctgaaaacaatatgcacaggcaagttttatccaatccttccacaatacccaccttttttttcagtaaaggtttgattttgcactgttttgatcactctgaatctgaagtcagaaaagagatcttctgaaaatgcaagcattgtgtagccggaatcttctgatttggaacatgaaaagatgagatgaagatccaagttggggtccaactaatagaagtaggaacagcacaatggaccaaaatgctatgctcacagataaactattctcctgaaaaagcttcagcttcccaattatgatcaacttcaaaataatagttaatgctctcaaattgcaaaaatacccgtggagggttgttggctattcacttccactactatacctatctgaaaccaacaaaacaatgattaattttgaatgttgtatgacgaaatttattgccaatggagtgataggagagaaagatcattaccagcagaatgcctttttccttccatggcttctttcttctcctggcaacttaagcaaaggaaagggccgtcccagggacgcaactttcctgcattacatgagccggcatgtattgaaatgccctctcctggtttcacttctacttgacaaacagcacatgtgaacaacctaaacatgttgcagagtggatatttcgtgtctaacctgtgtaatcaacacaagcctttatcgtgtcaaaatactaaaagctgagtaacttcatacatactctgttcataggtcaacccccaaaaagttaaacaggaagaacgaaaacagaacaagaataaagaaagaaaggtgacactaaaagaaaaggaaa

SEQ ID NO: 301160 - DNA, 2079 bp, Cannabis indica
tcatcaccttcagtctgaatgttgtgtcaggattgagaagcaatatctaagttttattggggttagcttctatcttagagatagaaaaatacctgggtcttccctcttttgttggatgaaagaagaaacaagattttcaagatgttattgatcgagtgtgaaaaaggctccaagggtggaaaggaatgctcctctctactggaggaaaataggtgttgatcaagtcgtttgcgctggccattcctaataactccatgggtatgttttgtcttccgtctactctgtgtgatgaattacatgctatggtagctcatttttggcgggggatctatggagtgtaagcataacatccattagaaaagttgggataagctttgtattcccaagaaaaaaggtgggttgggatttcgtgaccttgtggctcatatccagacccttgtggccatgcaaagttggtgtattcttacttcatctaattttcttatggcccaagttatcaaatccaaatattttaagcatgagaatttcacagagctggaacttggtaagggtcgtatgtttggaaaggtttttttttttgggttgtgaggtgcttagactagggactaggtggcgtgttggtaatgtcacttctattaatccatttacgaattcttggctccctagactaactacttttaagcctaccacgagtaagtctggtcctctttttgattggtccgtggctaattttatcatttcaaaaagtagtgagaggaatgtggttttgttaaacaagtgctttgggaggtggacagtaaccttattctttctctcccgttgagctatcgtaacatcaaagatgagttggtctggcattttgagaatgatggttgttactctgtcaggtcgggatacaaagaaaatatggaagctagttatgaagactcttcttcccacaagaatggctcatggtggacaaccatatggaatcttcaacttccaccaaaattgaagatttttatatggcgtgtgtttcatggtatcatacctgtgacatttgatttgcttcaaaggaagattccagttgatcctcgttaatttcaatgtagatatgagcgagagacaattcgccattcactttttgaatgctcgttgtcaagagtttgttgggatgttaccccttgggtagctaaagtggcagattggagtaaggatcaccatgagaaggtgattgtaataatcatgtgcttcaatccctcttcggatcgtgaggcttgctttatgatgatgtggttgatttggcatgtgcgcaatagagggaagtttggggatcgagttgatcaacccttggttgtgaaggaaaaggtgagtgtcattctctttgagttccaagaggctgtcaatggtgtgggtgttactttgtttggaaagttcactcactttcaatatatggatcaaaacgataagcttattggtggtaatagttgtgtggccagaaagtagggggctcatcactctcgagatgctatgtcccacacatggaagccttatgattgggactgttttaagctcaacatagatgctattataagtttggacagttgcgctattgggttgggggtagtgagtcgagacaaagtgggttgtgtggtttgggtcttcacaaaggtgatggcaggaagtttctcaccttattcaactaaattatatgcttgctttgatgctctcaaatggtgttacgctaatagactaaagattgattgcatggagagggattctcttaatgaaatccatgcaataaacaagggaagtagttgtaatgaagatggtgttattgttagtgatatttaatattttcttgagttctgtaatattggttcttgtcatttattttttgtgagggaaatattatggcccatacattagctaaactatattttagagaggactttgatcatctctgtaagagtaatattatatggactatattactcacttgatagtgagacaatttaattaatataattttgatgatacttttttagaagaaaaaaaaaaacattattcgtaccaatataaaagtaatatatatatata

SEQ ID NO: 301161 - DNA, 2272 bp, Cannabis indica
ttagatttagaatgtgtgcatgtacatgaattgatgccttctcatgtttatggtgcataacaaacagaacctggagacagagttgaagctgatgagcccattgctcaaattgaaactgataaggtaatttatcttatccaacttctatggtttaaacttgcaattgctgtgtttgaagcactttgaagggttgttgcagactttgattgtttgttactctactttgtgtatcattaggtgacgattgatgttgttagtcctgtagctggagttataactaaggtaatagttttggaaatatatttaagttcttgagatcttgttgacctactagctattctactcttcttgtactaatttctatgtattggttgtagcttttggccaacgaaggtgatactgtagaaccaggcatcaaggttgctgccatatcgaaatcaggtgaaggtgcaccaatagcttcttcgtcggaaaaggctgttagtcagacgccaccaccttccaaagaggcccccaagacagagaccacccctatcaaggaggcaaagaaagaatcatctcccccaccacctaaatctaagggacttccgccaccaccaaaacccacagaacctcagctgcctccaaaggacagggaaagacgggttagttatattaggaatatgtaaaataatacgttaaattggttggagtttctacaatttctttctttcgttatttatttattttttatgtctaggttcccatgacaagactcaggaagcgagttgcaacgcgcttgaaggattcccagaatacatttgctttgttgaccacatttaacgaggttgatatgtaagtttgattcatctatactatctagcgaaagttaagctttgttagtaacatttgctatgatttcaaagttctgcaatctgttgaagtgttttcttctacgaaataagaacttccttgttctattaatacttgcaggactaacttgatgggtcttcgttcagaatataaggatgctttctttgaaaaacatggagtgaaattgggcctgatgtctggctttgtgaaagtatgtgcttcgagtccttgtctttgtaaaagtgccatgaaacagttgacagtttcataatctttttgtagttcttcgggcatttatcaatcttccttttctgtcttttaggctgccataagtgcgcttcaatatcagccagttgtgaatgctgtcattgatggggatgacattatatatagagattacgttgatattagcattgcagtgggcacaccaaaggtatggccatcaaagaataactttttgatataaataaatatatttttgtttaaaaaaaaggtatgtctaaccaaaagtttatcatttttgtccttcaagggtcttgtagtcccggttctccgcaatgctgaaagaatgaactttgccgaaatagaaaaggaaattaacactcttgctaagaaggcaactgccggttctatatcaattgatgagatggctggtggcacatttacaatttctaatggtggtgtttatggaagtcttttgagtacacccattatcaaccctccacaggtattgctttagtttatactcacatttactgtgctcgatacctttgacatacgaatgcctcgttaataatttttattttgaactattgtggcagtccgctatattgggaatgcactcaattgtgagccgccctatggtcgttggaggcaatgttgttccaaggccaatgatgtatattgcactaacatatgatcatcggctaattgatggaagagaggccgtcttcttcttgcgccgcatcaaagatgtcgttgaagaccctcgcagacttctcctcgatgtatgaagaagaaatatttggtaaattacattttacaagatacgtgcagtgctctctgcataaactagaaataatgagtttcaaatttttgtttgagatatattttatttgctccttccatgtcaaaggatgttgtcaaatccaacggctgaaattgtttgcaagagttgatatgaattatttgtttattttagttgccaccatatgctaattgaaagtggttactttgcccaatgtggttaatcttagcatattagcgagattggttctgttttgcttctcaatgtggaattttttttttcccattttcatcaaatgtcacatagttgattattccttacatggtacaaattcccaagaatttttctatttaagctctacattctttattttacattataataaatattatt

SEQ ID NO: 301162 - DNA, 2819 bp, Cannabis indica
ttcttgattaataataagataaaaaaaataaagaaattattatcctcaaaaattaataagactaactttcgagattagcgaacgtgaattcaagggattagggggactagcttccgaaggtagtcacgagtgacccactcgacatgcatgccaaggcagccaatcggcatgcactcaacatgcacccattcgacatgcatgcgcagacactcaacatgcatgctctaacagccactcggcatgcacaccatcaggccactcgacatgcttgctccagcagcccctcgacatgcatgctgcaacaaccactatacatgcacaccatcaaaccactcggcatgcatgctccaacaaccactcgacatgcacaccattaggccactcagcatgcacatcatcaggccactcgacatgcatgttcgagcatgctactcggcaaaaacaccatgcaaccaacacatggtgaatctttacaagtgttggaggagaagttgtttgaagaagaatcaaaaggacaaggcaagtatgcaaatgagtacatatcaaggtacaactaccccacatgcaacacctgagcgcggggagagaagagtagtggatgcgtctcacctgcaagctctgatgtccaaagaagaggtacactacatccactattcatgccccatgaccacctgacacccgacaatagtacaggttacgaggccacttcctccagctgcaacctgtagcctgaaatgtccttctcctaacatttgatgacccccaaagaatcaacttatattttggagccattagagctctctataaatatccttatctttcattgaagagggatacataaaagcaatacaatatttttcttctccattaaagctctaaaacttgttcttaattttttgagttttactttcatttttctttaagtctttgattttctagctaaagttttgttgacgagttctaaccgtcaacaattttgcgccgtcagtgggaaaaaattcatagttatgtctttccttcagcattaaccaaccaccatgcatagacgttcgccacatctccatgaaaatggagtttactcaaatggtaacaaggtgtccaccatcataagagaacatccacctctcgtcgtcggagaagacaaaagggagaataatcaaagcatgaaccaccaagccaatgctcaaaaaaggcccccaacacaacatgatttgatgatggcattgatagctaactttatcaatggaagcattcaaccactaagaaggtcaactccgtgcaacccccaccaccatttgtgccacaagaccccgacacttcaagatgtggacccaaaaaggagaaatgagtgtagtcgatgagctcaatctcatgaacttgccactattaagataagataaacgacctctgttggaagaaccaaaggctaaaaactatggtagctgacatgcaaaaggcattgaagcatactcaaaggaaaaacccaagcctcgcactttcaatacaaaatccacacacatgagcatggggtcatacactgatagcaccctgaaaggtgagggtggaatgggcccatcacaagtcaaggaccctatgggtcattcgagacaacttgagcctacccaccgtaataagatcgcactgggagaagtatcacataaccttatgaagagacttcacccaaatggtctcgtgcaaatgagcaccttacctatggcccccttccaaaagcaaagcaaacgcaaatccttttccttcaaccttggtgggaagtcacatgttgatgagacaagaggagtacctctcgcagccttatgcaaatcacaaaaaggacccaagttccactcgctaactcttgagaaaggatgagcaaaacaatgaaggagctggaagtggagatgcaagacatatgtcgaaaatagctatcgcctcgaagggaaacttcgatgatgatgagtttgatgaagaatcccctttctcaagggagattcaaattgaaccacttcaacttaatttcgaggagtcgcgtatgacaccatatgatggtacaactaatttggagtaccatcttggagcttttaatgaactaatgaagacgaaaaaagtgtcatgcaagacaatgtcttagtgcttcatggtcacactgaaaggagttgcatataagtggttcaaaaggctaagattgggaacaatcacaacctagaagcaattttcaaaagaatgtctccaacaacatcaggctgcatgtgattatgtcatgcctgccacaagtattactaatgtgaagcaagggaaacaagaaagcttgtgaagctacatccatcgcttcaactctaaagttaccaaagttgggaagtgtccaactcaagatcgtcgtagttgttggagtatgcaatggaaatggactatgggggaacatgctgaaaagagaattagatggcatagatgacttccacaagagagcagataagtacatccatgtggaggaggtaaccgagtcttgagaacaaatacaagtgagtgttcttaaggaatctcgttagactttgtaagggtctgctagacgatacccctaaatacttataagctgatacattctagtgaagcctctgtgatagttagtagtcccgtgatccgtaagaggaaataccaggtaagctgtgcaatcccacatcgcttaaggaaggtcaggtgtgatgattctgagcctgtgtaggtatgagagtacacagttgaagagagcttaaatggattgattagtactacctatatcagcaaggtgcatcttgtttttcggtagtttatcacgaaagaactcc

SEQ ID NO: 301163 - DNA, 4639 bp, Cannabis indica
tttgagtgtatttcttgtactggtaaccatatctcgggtctcgtctactcggaccccctccaatccttgacttctttcttgtgtgtacgaccctccttacttccattctaagaagaagttttagacagatatcatgttgattggggatagatttggtggcccttgtttgattttgggtgatacaaattttgttctcagtgcatcagaatgtgaaggatctactggtagggaccagttcatcccctttatttctagtcttgtggagtcgaggggccttattaacatgcccattcatgatgacaagaagacttcggacaatcaccgctctagtatgaatcatgtgaagtatgctcttgataaaggtttagtcaatggggcttggctcaacttattcccgagagctattatcttctcttatcaaacgagcaactctgatcgtagacctccgtgtcttttctatggcagcttggaagccaagtataaaagatgttttaagtttgaagaaggctggatgagggatcttagaagtaagttggtggttgcccatgcctggaactcggttgctcacccttgggcccctgcccgtgtttttaaaaagattggagctacccaggttgctcttcttcactggcatagatcccaatttggtaaggtggattcagtcatcaaagacttggaggaaaaactaaacaatctgcagagcttacctgcaggtgctcgtgactggaattttgaatgtgatgtcaagagatccctatatgaagctttagaaagaaaagccttgtactggaaacaaagggccagaatttcttgaattaaggagggggataaatgctcaaaattcttcttcctctcggcctcttttagaggaaggagaaattccattgagagtatcctgaacaaagataacttgtggatcactaatcgtgacttaattggtagggaattcattggctttttccaaggtatattctcagggactgataatggcttggcactcaactgtaatcatttatttcatgaaagaatttcttctgtggaccagaggctctccttatatgccctactcacgaggaaatccgaagtactctcttcgccaggggcaaccataaagcccttggtcctgatggtatgttagtcattttcttcaagcactattgggagttcgtggggcgaagatttttgtgatgcagttgcggactttttcacgactggaaaaatgcataagggtgttaatgctacgaatattgtgctaatccctaaagtccaaaatcccaaaagaaccaaccaatttagacccatatccttatgcaatgtgacgtacaaggtcatttcaaagaatattgcaaaaagaattaaacttatcttaccttctctcatttttcctactcaagccgcctttgttccgggaaggaacattcaagataacaatgtgattgtgcaagagatcatccactcgttcaataggaaaaaaggcaaggaaggtttctttgctattaaaattgaccttatgaaagcctatgacaggctaagatggagatttatagaccatatgctttcttgttatggaattcttctgaaattccgcaattgggtctctcaatgaatcactaccacatccctcaacatctgtctcaatggagggcaagttggcacgatttcgccctcctgtggactgcgacaaggtgactcgctgtctctttacctatttatttgggcggctgaagttttatcgagactattagaggatgccctgaataagggctctatcaaagggataaggcttagtagcggtggtcctatcctttcccatatcttctttgctgatgacttaattcttgttggcaaggctaacttaactgaagctcgtggcttctggcactgtcttgagagtttctgttcttggtcaggccaatacgtaaacaaactcaaaacctcaatcttctttagtaaaaatacttccaatggtttgaaaagggggattaaggaagcattggggattggctcaccagaagacaaccattaagtatttggggctccctttgttctgctctagacaaaaggatgcagatttcaacttcattttggataatctcacttataagttgcagggttggaaggctaagactttgtctaaggcggcgaaggcttctcttattgaattagtgggactgtctcttcctttgtatgctatgcaaacgaccaaattctctaatcgcatggtcaataagattgatgggatggtgcgggatttccggtggggttttagaaaggtaaccatgggcttcacctaaaagtttgggataagctctgtcttcccaaatctcttgggggtcttggtttttggaaaactagagaaatgaaccaggattttctggctaaatggggggtggagcattctaaacagcgaattttggaagctaaatacctaaaaggaaaggatttccttaactgtacctataaagattcagattctttgttttggaagaatgttgtaatagccaaatcaattatgagaaaaggtgcttgcaaagtggtggctgattgtagacacactagtatatggggggatccttggatacctcatatcaaagatttcatgccaagacctaaggggccccttgtttctgagatctccaaatttgttgatcttttttatattagtggtggttgggacatccacaagctgaataacctctttgatcaagagacggtctctgtaatcttaaaaggtggtcccccctctggccagggctttcataagtggatttggaatcttgaaagctatggttgtttctcgtgcaaatctgcttacatctcccaggctttggataaggccccccaatgtgaacgtcacaaaattctttggtggtgtgtcctttctagtactcttcctgttcggtctatgatcagaaaaagattccacattgaggatgcgagtttccctttgtgtggtttggcagaggaatctttggaacaccttttcttgtcctgtgaggtggtttttcatgtttggaggtcttctccttggggcatttacttgtttgtgatttcggtattcgcatgtgagactaagtcaaattcatttgggaccttaaacataagggcattcctattgatgaggttttcctttatgcttcgatcgttattgacacaatttggtgactgcgcaatgaaaaggtacataataatgctactattgatgtgaagaagtgtattgattccatttgtacttcttttgcagatctacatgcatctattttccctacccctgcttcttacctaaaggaggactggtctcctccccccaggattggataaagctgaactgcgatgttacagtggggtttgaaagcatgtgtgctgcagttgtggccagaaaccatctaggtcaggggatttggattcaaacgtctcggttagatttctcagatgtgttatgtggcgaagcagtggcttgttgtctggctcttttggctgctagggacattggctccaacttcgttattgtggagagcgactcgaggatagttattaatgtttttatcgagaaagagtcacactgggaaattgaaaactatgtctcattttgtaatagttattctcctttatttagtagttttattttctctaatattagcagaacttataattttgtcgcccataatgtggcaaagtgggctttttctcaaaacaagtttggtttgattctgttatctaccattcctaggaacattttatgtcatgatcgggaggtctaattgttatccagttatatatcaatcacacttttcttaccaaaaaaaaaaaaaagaagaattaattaatttcaaaatatatttttatatattatgtccaaacatatatttaaaaaaaataaatgatagtgataaatacattcttaagttgtagttaaggaaagtatagttataataaagtgtacaaattattaaaagaacacatatatatatcattaattattttttttaatatcatcaatcacttttaaaaaaaaactttgtcataaaattaaaattaaaatatatatattctatatataaatgtgattatatatagacataatatttatttttaaatatatataataaaattaaatttatttatataacatatctacacaattttttatttttaaatatatataataatatcataaattcaataaagaatattatgttaaataattgagatattctattaaagttaacataaaaaatcaaaaaataccctaaatcaaaaatttcgttacatagctacattttatataaaataaatataaaacatgttaggaaaaactagggcctcaatataataacaaaccaaatataatataaagggaaatcatataattacaaaaagaaaaaactaaataatattacaactcttgatgattaaacaacaaataaaacacaatatatataatgtatttatatatataaatatttaatgggcattacccatgaatgggtaatattagaaaaaattgagtttttatgattaattttatttatttaattagaaaattttttcatttttacattatatgggctagaattgttccatcagttgaaaaaaataattaaaaaaatcgaacaaaaaaagtgatgaaaaaaattga

SEQ ID NO: 301164 - DNA, 1426 bp, Cannabis indica
tctctctctctctctctcagccagaagtcctagctagcctcatacatgaacgacgacccacagcgctcggaccagccaccacgaatgcatacacacacccgctcggacaagcccactacaaacgcaactcacactaccctcaaaccctcaatctatgtctcttgcacactctctctctctctctctctctcagtctcaatttttaggcgatggtggtggctctctcaccaccactcataggtaaccttttcgatctcctctctttcaagctttctctctttgtcaaactttctcaaagaagtatttttttatttaatttttaaggttacatcaatggtactagtggtctctcttgactctgatggtgtcaaatttgaaatttagattgtttatatgttcatagtttattttgttgtattttttggtatattttgtttagatataagttcgtcatgcatgagcaaattgtggtgagatcttgcctcgtgtagctcagatttgatatttttttaagtgacagtgataatctttctagaaaagggatgttataatcgattcttaattgatggctaaggcgtctaaatttatggcgcccacatatttgtcgattttaagagccgacgaaataacatgcagacgatttacacctgacgagaaacctaatttttgtagtagtattaggctcaagatattattatgtattattttgaaaaatacagagtctgaattatcaatttttaaaataaaatatttgatgagtaacttttacaaattatagagtcttaaataatatttatcctcttttttaaaaaaatatttatcctatttatatatatacatattattgttagtatgttacaattaattatggaaattgcactttatactctttttttgttaattcattatgcttaatgaaaaaaattttcctcacctccctgagtacagtacccttatgtgagggtataatcggtaatcgacttataaaaagggatacatttcaattgaattgaaaataagactatttttggttaactgatgaaaaaaaacgagtatatttcaacttactcccaattaattttgatcacacaaaaaagaaaaaaaaaagtaagaaaattttgtaaaattaatatttgttagtaacatacatatgttgtaacgccccgatattttcccttattttaccaaaaatactattttcatgcataatttgaaaagatgaaaaaaaataatttaaataaaacagtggattttaaaaatcaaaatgcaacagagaaggatccttcatttgtaaaacaagatacagtaagtaaataattttaaataatgcatttccactgtgttagatttatcaactgtttaaaataaaactaaggcaccaccggcgttctagatcgtttgtccgcccgtagccgctcacagtata

SEQ ID NO: 301165 - DNA, 1797 bp, Cannabis indica
gacttgacaaccttttcagaaggatgtccaatctattgtgccaaatatcaaaaagagacatattattcatagtgtgtacatatgtaacagctgtgtttgggaatgaagttcttgttgtagcagtaagaatttggggctgcatagactgtgaaagagtggggctgctggaaccagatttggaaggagatgaattcagcaaggtcagttgtgatgaatcaaatgaatacaggccattctggtatctcccagtcagcagtatattgtgagagacttgatctttgacaaaacaaacatcggggtgaaactcaaaatatacattgttatccctagtaaatttagacacacttaataaattctttgttagtgtaggaacatgtaataaattgctcaatataagaggagaagtaatagaagcattagagaggaaggagtgaccaatgtgcttgatagacaaacatgtaccatcgccaacaaacaactattcagacccctcataattggagcttgaagccaagttttgagcatcgggagtacaatgattggtagccccagaatcggggtaccaattgctatcattctgaggtgaagtatgcatcaggttggcttgaggggaaggagaagcatggtttgttggggcaccagtaaagcttttatcgaatcgataaaatcaatccacaaccgtatggcctattttgtgacaaagttgacattgcaggcggccataagcagtagcaactctgcctcctctggtagtactgctgcggttgatttgaaaagaattgtactgaggctgttggtggtgatatccccttggaacaaatccatttgaatagtagtatggagctcctcgagagatgcctcttggactggaaaaatttggtgcaaacgtgccaaactgcaaaggatatctgggggaaaaccaggaggatagctggttttgaatcgattttggtaagccagattggcttcaggctactggtcaatctcagagacagcaatattggcacttaattcgggttcttgatcagtcttttcgattcttgattccgaagcaagcagcaatgcttcaatttccccaacagtatacccttcgatccgtgtattggtggagatgacaaacgtgtcatacgcacttggaagccctttgaatatagctgcaatgtgatcacgatcacttagaacttcaccaactgaggcaagcaaatcgacatgctgtttaactttcagcaagtattcattcagagattgactgcctttcttgaggttttgtaactttgttctaaactcaagaattttggaagagacttgaagagtaaagtgcttttcaagagtggaccaaattcggcgagccgtgtgacaaccaaccattcgagtgagcaagctctcagacattgatgacaagatccacgagaccagcaactggtcttgaacatcccaatcaagaaactctggattatacgtctgagatgctcgatcctcatcagataagaattttagaggtggaggacaatcctgaatgaatttgagcaagcaatttccacgaatagctgcaagaacctgctgtttccagatcaagaaattgtgatcgttaagtttaacggaaatattgtgtgagaaatataccggagagaactcatctgatgcacgattgcgatttccttgagaagcagggttggaatttgcagtatttcccagattcggtggattcgattgattttgagctccaacagtcgccatgtttgcattcagggggggaattcgtgctctgataccatattacgattggtgattcgttta

SEQ ID NO: 301166 - DNA, 1998 bp, Cannabis indica
agattgggcaggctccaaggtagatagacgattcacttcaggatattatgtatttgttgggggcaatttgatcttttggaagaataaaaaacaaaatgttgtgtctagatccagtgatgaatcaaaatatagagctataacacagtttgtgtgtgaggtaatatggatttatcagctattgattgaattcgggtttaagacttctattccaacaaaattgtggtgtgataatcaagttgcttttcatattgcctcaaatctcgtgttccacgagcaaactaatcacattgagattgattatcattttgttcgtgagaaaattcaataaggtatgattttataggatatgtgaagaccggagaacaattaggagatatttttacaaaagctttgaatggggtgcaagttgattatctttgtaataagttgggcatgattaaaatctatgctccagcttgagggagagtgttagaatattaactgtatattagccgtaaaaattaaggtaacttgtatttaataattttctatttgtatttagtaatttctcatttagtctcataactttgtatataaatatatactattcaataaaatataatatagaattctatttaccattctctacagatcaaatatagaaaaaatacgaagtgagatgtgtaaaaagccataagtatcccaaaagcagaaaatgtgacacaaaacgtaaaaacatcaaatacaacattacaaaataatattccactcgctccatgaagtcttattgttggtgcatacctccattatccttcagggatttttgggcttcaaacatctatttatgtgcactttctcacctttgctgaaaatttgtatacaaggcttaaggtcttgtatgataaaaatagtagcttttgaagatgattttgttaaataactttgtattatattaatgtgaatattattgtgcagacatgagcttcactattctcgtcttgctaactgggaaggcattaaaaaggttggcaccatctaattttaatattttattcatgtatggtgtgacaaagatattggagaagagaactcttaaacactgctgattttaaatatttaaatatttaaatattttaatattttatattgatattgttcactaaaagtacacaaagaggtataagttcttgtcagaaagtatcccaacaaagaacaaactaggagcaaacagcaataaactcaaaaaacataatagtgaatcttcattttatttctaaaagacaaggatcgactaaatcaatcatgattgcctcttaatttcttgaatgtcatcaactgagagaggctgattttcaacattcctcttcgagttcgatagtatacatcaaacaatcttagcctgtaaatcattttcttatacaaagctctaggcaatcctttagatagaatgtttgttgttagggatgtcaatctgggcattttttgcgggccgggttggagccccgtcctactataaccgggttgtgatctgggtttccgctccgccctgcctaaactttcggatcagggccgaccttccctggttcagataatttaaaaaaatccctaatcctgattccctaattctaatcgaatcttagctttcaaacttagcagtcctagcacgtctagaaactctcgactggaactcctttgcgcgaccaaaaactcttgactggaactcctttacgaggccatgtgatatacacctagagaaagtaaagcggatgatgagaacatctggtgtaatagagttgtcatttcttcttcttctggttcagattcttcttcggtcttcacatattctgtggatatcagaccttaatgaattttttcacgaacaaaatgacaatcaatctcaatgtgcttaattcgctcgtggaacacgggatttgaggccatatgaagagcggcttgattatcacaccacaattttgctggaatagaagtcttaaacccgaattcagtcaaaagcggata

SEQ ID NO: 301167 - DNA, 2002 bp, Cannabis indica
tgaagctgagaaacttgtacccaaatatggcgtctaccatttgatttatctgtggaagaaaaaaataagccttgtttaggtcagtaaagtcaatgcacattctctacgtgtcattggctttagggacaaagatagggtttgtgacctagacatggtacaatgcttcccgaaggaagtcattggtggtcaacttattaacctccactttcactgcctccgcccttaccagatccaagggtattattttttggtaaactagcattgcatcttctcatatgttcaaggcatggtaaatagtgttacggtcaattctagtcatgtcagaatggctccatgccagcacatcctagttctttttgactgtgttcacaatgttctcttttatggacggaggtaggtttcttcctactttgatggtttttatggggtcttcatcactgatgcttacttcctctacctcttcctttggctctaaatttctttccatcccaaccctgggatctaactcgtctttgaaattctcctagatggccttagtttccatctgatcctccattccaggtgtaatgggtgcctcttcccggaccatgaacacaacttgagttaagatgttgtaatagttcctcccactattctgatcacctttaattgtgccaatacatccattattgcaggggaatttcatgcataaatgcctgatggaagttactgctcaaagtctactagggttggctatcctagtattgcgttctacgcttttgggcaatctaacactacaaaagtagagtgcttaaaatcacttacagtgttttcttctttgacggtgataggtaattggattttcccccataggcattagggcgtctccgttgaacccttgcaattgaatgaggcaaggagtgaagtcagcttctttaagccctattgcatggagtgaaaatttgaacaggatgtttactgagcttttattgtcaaccaggactatggaaactcgtttattggaaatctgcacgtcgattacttagggacagttgtgggggaaacacacatttttgacatcatccttggtgaaggtgatggacagattcatcatcctaggacattgtgctggagattgcaccaacacgcacaattccccttcttccacttctctcaagtatcttttctgtgagtttcatgtgcttcgtgcaagatgcagtgcacccgagatcgtggccatatgtccgtccactgaaggtggatcgagtcctagaggatatggagttctaagtcttggagcgagtaacattaccccaacttgcactagtagaacatggagtgcatgcggttgtgatccaggagcttgaggacatcctacaccctacaagggatttatggcattatgttgtcttggaatgatcatatgcttgtggaccaccccctgttcgagataaatgattagaatctggatccattgtcctaggtttcccgttcttcaaggtttcgatcccatctttcagataatcacactcgtgtagcccttttctctatgataatcacattccttgtgttggtcacgcctattcattcctctgtgcgacatctgtaaaggctttgtatagtggaccatattgcaagttactctgtagacatttcttcgcatgtctatcaaactagtatagtcaatgtatttagggtcatactccttcctcggcttcttcaaagaatcattacagttgttgcttttacaatctcttttgttccgagtattgctcatatttaattccagaggcgatcggaaatgtaattaagatagagcaaaaatgagtaaaatattaaagaacacaggattttaaagaggtttggcccctttagtttggtaatagcctactccccttagattgtattgacttgagaacaaagagcatagtgtttcctctctcaaagctctcacaatgaaatctatgagtattttctcttagatctctctctaaagcaattctttcgatcccttttacagtga

SEQ ID NO: 301168 - DNA, 2409 bp, Cannabis indica
tttaatttaattattataaatttgaaatcatgtagttatagtttccaatgttatactctttcttttattagcttatagacattattgttactctatttaggtttatccttgttagtgatattataactatatttatagttgcttttttaatttttatgatttgcttttttcattatcctaaaattgttttattaatgagactatttatttgtcaaagaaaaaagatcaataattacaattctagtttattttatattaatttacatgtaaaatatgtttaaatatttaatgaacttaattagattgttttagtctcaatttttatggttattattttcaaattaatttaagaaaaaaaaaaagacaatagatttatttgagattgagatgttggggggtattttattgtcatcgattcattgaacatggctaaatgggtttttacccacaaccactataggtgtattgatattattactatttttatgaatatttgttgtaacgatccagaggtctaactatttctatgaatgaaggtatttttttttttaaaaaaaagattcattgaatgaatatattgtttttatcagaataaaaaaaaagaatatattgtcggcaattttttatttcgaattttcctttaattaattgtcagaaacataattaaaaatcagagatatataggacaaaatgttataaattttctttgacaaacaccctattatattattgcacgtgcctatatattttttgttttcatattttctactttatttatattatatggttctaatacttccaatagagaatagatttttttcgaattagtactttcaatttcaatagaagtataatatattaatagttgtttctacaatgtcctttttaaaagtaatgtagtaatgtactatctaattattttggtatatagatatactaatgtaatatctatttatttcggcatttagaaaaatttttgagtttaattttttaatttatatttatgtacgttatagttatttaaaaaattttatgaacttttaataaattcgatataatttacaatatagaaagttcaaatattttatttcacaagcatataaaataaaatagtaacgtgtacaatacactgtttaaattctattttcgaagtgtcaaatttttttgaatttcttacaattttacaagatgtcttaaataattataacgtacatgatcataaaaaaaattaattaaaaatttatttcaaataccaaaatagatagggatatatttgcccatcttttttctattataaaatttttctatattaataactaatataatatcgtaatatgcatgaagtttcattttaaaattaattgataataagaagaagtaatttatgtatcttacatacttattaattttttacatattagtaatgtgattttttttaattaggtgatatatgatatgtaatgtaaaactttgaagtgaaaaagaaataataatatattttgagaaaaattcacaatttttatatgatgattgattgagttggttatttataagaatccatgggggcattttgtagagtgcactacatgacaaaaaaccatatagtaataacatttgtcagtttttcaaatacacatttaaacttttgttctatgaaaaaataaaaaactaagtgacatttgaataaccggagaatgtcttcttaattatttaatttccacaaacaaaaaatcaaagttttcatgtactacatcaatgtacacgtcaccaacacatgtattgttttgttacatttttataatattaaaataatataattacgtgttgtatggtattaattttattgatattttttttacttagatcaagggttcgaaattcactctatctcctcttaaaagggataaagaaagacttgatccttactagaggcagtaatatctgtgtgatgagcgcttttgaagtgattaccgatgatccaattaaggtagactaagatataagacccttataactgacacgtagtccccaaaattgtcaaaatgaccgaaaaagtgaggaaaggatctccgccacatgatccccttatacatattccttatcctttacttggtttccgattgaagtcctcccacgcaaggaatctatggactatccattagggcaaacactatcacttgttactttcaaataagtgctccttctaaaacaggatcaaagtgttaccatgagattcgaactcagagtgaggaacttatgcatagagtcccaaccactatactactcagtggcaatgacaaaatcaagagccaatgccatgccctcaatttttttttttttaaaaattatacgtaaaaattaatgaaaaaaattaaaaataaataattttttatattatttacacgagtt

SEQ ID NO: 301169 - DNA, 4508 bp, Cannabis indica
actgtcatattcttattctttcttctattgttcacataaaacaaaacttcatcattttgatttttcttccatttttatacatatatttattactttgccttatacatgttttgttttggctttggttcttattcttctgcagaatgttggactctacttgattaaagacttggttttttttttctgtttctctatcttctggatgtgtttctctcaaatgggtgttaaagatttctgggtgattctccttgttactgggtttttttgcttcagagctttggctcagagctctgatcagaacctcaaatgtgacccaaatgatttgaaagctttacaagatttcatggcgggtttgcaaactaagattgatgggtgggacgccaacaactcttctaattccaattgctgtaaatgggcaggtgtcaaatgtaattcttcatcttctctgggatttaaggatgattctgatacgggtagagtggtaaagctagagcttatgagcatgagactaacgggtaaactttctccatctttgggctctttggatcagctcagaactctcaacctttctcacaactttctcaaaagtccaattccattttcactcttcaatttgtcaaatttggagtttatggacttaagctttaatgacttatatgatcctgttcctgatattttccatttaccttcaatccaactccttgacttgtctcaaaactatttgaatggttcttttccttctggtatctgtaatggttcatcttcactccggatattgaagatggcagccaactacttcactggtgctcttccagcaggacttggagactgtctttccttggagcatgtttgtgttgggatgaatagactcaccaatgtatctgaaggtatctttcggctcccaaagctttctgatttgattcttcaagataacaagttttctgggcctttaagcaaaggaattggtaacctctctaaccttgttagattggacatatgctcaagtgggttttcaggaaggattccagatgttttccataacttaaagaaacttcagttctttctagctcattctaatagattcactggtgttatacccccttccttgtcaaattcccctagtcttactttgttgaatgtgagaaacaataccttgagtggtctgttgaaacttaattgttcagctatggttagtttggcttctcttgatgtaggcactaatcagtttactggccatgtaccagataatctcccttcttgtcaacacctgaataatataaaccttgcccggaacaactttactggtgaaataccagatagcttcaagaattttcacagtctctcatacttctctctttcaaattctagcaatactaacctctcctctgctcttagaatctttcagcagtgtaagaaccttaccactttggttttaagcttgaattttcgcggtgaggagttgccttcagaccctacaatgcattttgagaagcttaagattcttgttattgccaattgtagactcacaggttcagttccacaatggttgagtgcaagcaaacagttgcagttgttggatttgtcatggaatcacttggttggatcgataccttcgtggttagggggatttcaagccctcttttacttggacttatcaaacaacacattaactggggagatccctaaaagcctcactgatttacaaagtctcattggtaaggatatctcattggaggaaccttccccagatttcccatttttcatgaagaggaatattagtgcaaggggattgcagtacaatcaagtttggagttttccgccaaccttggacctcagctccaacaatctttccggaccaatctggccagagtttgggcaactgagaaagctacatgtcttggagttaagattcaacaatctaactgggtcaatcccaagcagcctggaggggatgagcagcttagagactttggatttgtctcacaacaggctttcaggccaaataccaagttctttggtaaaactcagctttctgtctaagttcaatgttgcaaacaatcagttacatgggccaatccctacagggggtcagtttccaacctttccaaattcgagctttgaaggaaataatctttgtggtgaccatgctaaaccttgttcactaaatgggggtctttctcatcaatcatctggtagaactggtaaaaaaagaggtgttgttgttggaattactattggcattgtacttgggatggccttaattctttctcttatgttcatatttgtgttgcgaaagcatcgccctggagggattgatcctgagaaagaggatgatagcacaaatgataaggggttggaagaattggggtcaagattggtgatcctgttccagcagaataaggagaacagtaaagaactatcttttgacgaccttctgaaatctaccaacaatttcgaccaagctaatattatcgggtgtgggggttttggtttagtctacagagccaccctgcctgatggtaagaaggtagcaataaagcgactctctggtgactgtggacagatggatagagaatttcgcgctgaagtggaaaccctctcaagagctcagcatcctaatcttgtccttcttcaagggtattgtatgtacaagagtgacaggctcctaatatattcctacatggaaaatagtagcttggattattggttgcacgaaagggttgatggccctgcttttctcaaatgggacgcgagacttcaaattgctcgagggtctgcaagagggctcgcttacttgcaccaatcctgcgaaccccatatccttcatcgagatataaagtcgagtaacattcttttagatgagaaatttgaggctcatttagctgattttggtcttgcaaggctcattcttccttatgacactcatgtgacaactgatcttgttgggacattaggctacatacctcccgagtacggccaagcatctgttgctacttacaaaggggatgtgtatagttttggtgttgttcttttggagcttctaactgggaagagacctatggacatgtgtaagccaaaagggtgccgagatttgatctcttgggtgtttcagatgaagaaagaaaagaaggaaagcgaggtgttcgatccattcatttgggacaaggaccataataaggaattgttacaagtctttgagattgcctgtctatgcttaagcgagtttcctaaagttagaccttcaactcaacagctggtttcctggctcgacagcatcggtacaaacatatagcttcatcatcaagtaagtgagcaatttctggttgtacagctagagatatcactttcaatactcatttaactgaaaataagttggcacttttttgtacttaaaaatcttatgatcctggtgtaaatatttacctcataactgggttcttaagcttggttttcatccaaagatgtattatattagagaaaaagtatgaaaaaaaattaagtaacataacttgttatgttcaacattgtaagtctttacatccgaattcaaattttgaagagaagtcttggctctcaaacgtttgtaaaaataaatttttttgatgtttttttgggggttggtttgtactttgtagtgatgatacataaagaaaatcattatttcatataatatctttgttttaactttggtaatttattatctctaactttataggttgataatgatatgatatgatatgtctatatacataaattaatctgttcaatgttgaaagttgaaattaaatgttgaatataaagttccaactaaaagaagaacaaagtagagttcaatcacgagagtggactataaagctgattttttcatcttcagaaaatatctttgatatataaaaaactccattaaagaaaacccagaaaagaaataatgaaaataaattaatcagttttgttaagcttgaatatcttcacgtgtctatagaaaagattagttaaagatttcttgttttttttcaccattttagtcaaaggagctggctgagttttgtttactggtttccttaataaattttgttttaatattagtccttttcaagctgactttttattcatgaatattgttgcacctaagtcctaatagaatagggacaatgaccttattagttaattatatcatttaattaggaaaaaagaatttgttaggtatacactatgaaaggtattgactttaggttttgtcatatgtgatcctcatttgagggagatgattttgctttttggttcattttttcaaaacccatcacatagttgaaagaaattcattggatctagaaccatgcaatgcatgtgactctacttggtttaaacttatctcaaaggactaaactttatgtttatctactttcttcaaccacaagttagtcatgtttagttttgttgaagataatattggcccaaagggtataatgaatcttcttttatctctctctttgttttttttttttttt

SEQ ID NO: 301170 - DNA, 753 bp, Cannabis indica
tttttttaaaaaaaaattaaaatcaagtaaaaaaaaagtatttttttgatcagtttggtattaattattttcctcttgatagaagtgtttttttatacaaatattttttgaatacacaattggcattcgatccctaatactctatatggtcactcaagtggctgctgttattaattttattctttcttttttatcataaatttttcctatttttacatctaaccacaaagacattctaaaaacattggatgtaattttttttagaagcacttttgtaagttgtgtatgttcttttatttttgctgaaactataaattatataatataattgaataaaggaagaaaataattttatttttgttcaaaaaaaattatttcatttatccaaaaagagttgcggtagggattgtcatagaatatactttgaatctaacaactctggccacgtggctgagttgcggacacaaatcatcaccgcaatggagctctttcctttcttatctcactaatttgagcattgcaacgagccaccaaagtgcttaatactaacattctaatctctcactatatttattttttttttggtaaccgataaataacaacggtaacaaaagttacacagaaggagggggatttcttccatccaagaaagtttattgtttatcttaagggcatgcttagccaatctatgagcctcaacattaaagttgcggctaatgagaaagagatgccccagaaaaactagacaatagg

SEQ ID NO: 301171 - DNA, 2208 bp, Cannabis indica
ataatctatagaaatcattgtaaacatgccttcagttgctttctgttaattattttttaaaataattcactgatgaactaaatgtaatttaattaattaatttaaactagttgaaaataagtataataactttaaccaaacaaatattagcgccataatttatatttatatatatatatatatatagtcacaggaatacatggattcatcataacactatctatatatgtatgtacttatcttaattgcaccaaattttatttagttagagattagtgttacaatgtattgtaatttttttaaaaaaatgcaaggagatacacatttattgtaatttttgttttcacaaattaaaatagaaaataattcatggagcaagagcaaaaatcatagtaacatataactaaaaaaaagagaaaaaatcacagttctcgtaaaaatcctattttgttttgttttttttttttaaaaaaaaaaaaatcaacttgtggatttaacttttaattagtaatctttcatttaataatagtcttaataataattataagcctgtttggcccactgagataattttcatatatatttcatgagtgctctctccatcagctatatatacacactgacacacatggttttcgatcctctttagttttgttttttctctcttatttccttttctcattctaaaattaatcaattgatcaacttgtttattacgtaatttgatatttcagtttacaaaaagcatatcctaaatttaaaatacatattaattttgtggtttcgatcggtatatatatacagtactactgtgttatatttaattatatatatgtatttttataagcaaatgttgcatgtggacttgtggagtggaccataacattatgtgacataaaagagattctttaaggtgggatggagactcttcatggccaaattaactcaaatcctagagtaaaatagtatttggcaccttaattaaaaaaaatatatttcttattttgaaatattaaaagttattttttagcccatttacacaagaaaaaaaaaattgaaaacaacaaaaacttgtttgtcagagtttttaagttattacttcaaattattatatattacaaactcttaaactatttatctttctataagtatatatattcattagtttttaaaaaatattaatatatataacagttttgcgtgtctttgataaagtttttgttgacactaaaaaattactaagtgtaattttcaaagtcattatacttgaaagtttgttaaatttaaattccaaaatgcacccaaggagacatattggtatgaggaggagcaaaagcacgagtcaaactccccgtgcccacgcccgcgcgcctatcacccagctccctagcttgtacgcctgcagcgcccagctccccagtctacacacctttagctcccaactccctagcctgcacgcgtgtaacgcccagctccccagcctacacgcctgtagtgcctagctccacatcctactttcgtgtagcactcagctccttagcctacagcgcctagctcaccagcctgcacacttgcagtgcgcgcgcaactccccagcctgcacgcttgcagcgcctagctcaccaatctacacaccttcaatgcccagctctgcaacttgcacgtttgcaacgcctagctccccagcctgcaacgcccaactccctagcatgcacgcctgcagtgctcagctcctcagcctgcagcgcctagtaacccaacctacacgcctgtagcgcccaactccctagcctggacgcctgcaacgcctatctcatgttgtcaattttataatacgcaagtgcacgtatcgttttaacaagtaatacttgggtaagtgagatcgttcccacgaggactgtagctaagtaccaatcaattaaattcttgtttctatttggtagaactaataaggttgaataattaataactaaaaattgaaaagcagaaaaataataataataagtgtaattaatgatggatgaatatttaagaatatgaatcctattagttcagtttctcaattgataatgttaattattaattatctccctttttggtgatgacagactatcaaattaactctaactcttctcagatcattaaggtcctaaatcatatattatctacttgcatctttgaagtaaattaacatataacttgcattaa

SEQ ID NO: 301172 - DNA, 2461 bp, Cannabis indica
ttataattatacaatatgtatgtatatgtatttagaaacttgagagtttcatgctgctctacttggtcttggtccttctcaaatttgtgatgtttgctgcaaattcttcaatgagtatcaattctttgactattgactggtttataattgatgacacttgctggttgctggtgcatctttggacgactgtttctggtccttttggtgcgttttgtttctggtcaataatcttgtggattgctctgttgtttttaaagtggggattaattggatggtatgctttggaaatacaaatgattatttccaattctgtttaggggcagtagattttgatataagtaggagaaatttaaacttataatttataaatgctcctcaaattaaagaaggatgttatctcgggaagctaactatgctttctgggtgtctttgtttttccattaatgatgtataccaaagatcagttgaaatttgggttatgaagaattatggtgactcagattcttggttcaagtatttgacactcaatttacagtcttcttccaaataggcttgattttgatccatattcttctagctgctatccaaattaaatttttagcaatgggaaatttttaattttttgcgatgactctaataattggtgtgttgactccactacatatgttgggagtgcttttaagttaaaaggttgagaaatctatattgacagagaaaaatttcataaatggatctgtggttcatggatggagcatctttccttagtcctgttcatatagttttggaaagtggactgttacatgctcctctacttggtttggttccctctcaaatttgtgatgttctgtaagtatgtgactattgactggtttgggttgttatttctgatcatttgggtgcccatgacatgacatgagcctagctctttggttaatttattatatgaataatgtatataattgataataatatattttcttctaaaattaggtttgaacaatttaaaaagtttgaagaaaattttggacttttgcttaatttggagaagttgaagtttgctgatgaaaatagtttgaagagtttttgtgataattttacaaatttaatgaaccatggtaagatttcaaatcttaacaatgattgcctatatgaagagttacaaatgatacaacataatttgccaaaagaaaaagaaaaacaatttatgtattgaattatttaagagaagttgatggtagttacccgaatatttggattgcttataagaatatgctaacgattctagtgattgttgtctacacggaaagaagcttttcaaaattgaggttggtcaaattttatcttcggtcgacaatgttttaaaaaaagatttagtggtttagctctctctctctggattctgttcgaaaattaatctagtgaaaaatgtttgatttggataacatcaatttactggcttgagcttatcaatatcttttggccagcagcttagaagaaacttgattcacatgtgtagtaacatgaaatagtaatgtagctgaactttgaatataattgtgttaataccaaaccagcaacatagataaagagcttggaaattaactcgaaaattagacaaaggaaataaaagacacaaactcgatcgtcattttatgtcatgggtcatcactcaaatgatcataaataattgtctgaattaaagcattacaaaccacaagtgtcatcataaactggtaaatagtgataagcttgtatgtagctcattgcagagttccaatcagtatcacaaatttgaatttactgctctatatatttaagatgggacaaaaccatagatccatatggactgaattttcaatcatgtaacttaaaagtactctcaacgtatgtagtaaaggccgacacaccaattcttttacccacattttaaccttcttactcttggtatcataacaataccaattttcagtttctacgcaagaaattacaagattcccattactcaaaaagccttttggaatacaggtagaacgttgaccaagtgtattaggaagaagactaagtaaattgactgataaatattgaaaccaagactctgagtcaccgtatttcttcataacccaaatgtcaactacttgaaattcattcataatgaaaaaagaaagacacccagaaaaattagctaacttcccaaaattacgtggttttaccataagaggtgactttataagattaaatttctctttacttgtatcaaaagcaattatccctaaagatgatttgccataacaagttgtattgccaaagcaaattatccaatgaatgcacccattaacaaccatggaacagtccaaatatgtgtaagtggttatatcaaaagtagaagaagattcaaattctgaaaagatgttaggcattgccattgttttccatgaattgcttctcaaactataaatcccaa

SEQ ID NO: 301173 - DNA, 3946 bp, Cannabis indica
atttacatcattatgtacattctgcacagattgacaagggttacatgtcctctcacttcattaccaatcaagacaagtctactgtggaatttgacaatgctaaagtccttgtaactgatcagaagatctctgctgttaaggacatagtccctttactggaaaagactacccaattgagtgttcccttgcttattattgcagaggatatctcatcagcagtgctagaaactcttgtagtaaacaaaatgcaaggtctactgaatgttgctgttataaaatgtcctggacttggagatggaaagaaagctcttttgcaagatattgcacttatgacaggtgatcattttttctttcatagtttcatctcaatgattagcgtttcagtattcttgatttattcataagtttgtaatttgtgtagccataattatatcttcgcccaaagttcttatgatagttgaataatttcataatttggtcaagaacctcagttttactgatcaaataaagtatggttgtgtttatgttggcactattcaatattgaattgttgttcaaggtttccaattatttcgatagattagaactcttattttgtaattttactctgcaccttctaagtttttatttctactggataggcatcaatattattttttagtacttgcttctagaaaggacaaaggagagtaaggtgagagacgagaaaccctaggagaggaagtctttcaatgcaccttcttgaaagtactattttcttactattaaggctatggtaatgaaaaagatgttctgcagtatactacagattgacctggctggaaaccattgaatttgaactatgcaccaaataaataccacattacagtctgccaaataagatgtaaattagtatgatgcttaggaatgaaataattcctcatatgacttttatgtgcctgtaaatgatattgcattgtaatgtaacataattatttatagaattcttttatgatagagcatagaaaacatcccatcctttttcattatttgctgtattaccaggtgctgattttctctctggagatcttggattgacccttgaatgtgcaacttcagatcaacttggtattgcacggaaagtgaccattactagtaattcaacaaccatagtttctgatccttctactaaagctgaaattcaggcaaggatattgcagataaaaaaggatcttgctgaaacagataatgcatacatgtcaagaaagctttctgaaagaattgccaaactttgtggtggggtagctgttattaaggtatgcgtttatataataatttcaatttcatgaaccagttagagcattcaggcttgtgatttgatcaatcatgttttaagtccaattcctcaaggccatctacctggtgaatgtttcatagcttccaaacaaatagcaaggtttggtggggctttgttttaaacttgtttagggagttctctgaacagataaaccttgttttaggaatgagtgaacaatttaaaatcatatcattttgttggccactggaaatcatatctcagttaattcgttttaatgcagcaaatggcaaatctcatcaagtatacaaaattatgggattttgaaatactttttaagtttcatgcagaactagagtttagaggggaagggttagagagtaggaagaatgtgagttttgtcaatacaaatgacgactcaaaagtacaagtctctgaaggccaatccagtattgccaagttaaatagtaaccaagagtaatcctaaatcaacaagaaagtagtttggaaccaaaaacagaacaacagaattaccaataagagcattgtatcaaatgggagaaaccatcatcggcatactaaacctgcaaaaagataaacatattgaatcctagaaatcctagaaggtgattatgcacaacttagagacaagaagtatgaactggggtgggggtagtctaagacaagtgatctctttctctttttcaaaaaaaaaagaaaaaaaaagaaaaaagagactagaagtatatttgtatttgtatcaatatagtaggggtttactcagggattttaattgtgcatctgactctgagtctggcccaatcagtggaagtggaagtctttgtttcaagttgttgttggttcacagtgtataaggggtagaattatatagttttgaagctttacacaggatgttttagttatgggatatggttaaatatattggttggctcagattaaaacactaaagtctgttgaaagtgtcatgtggtaacatgaagatctatttccaagcacagttttacatctttattttcagctcatattaaaatctagggatagagctacggtttcctctgccattagtgtgtacttttaataaatatggaaggaggtaacttacggacatgtgacctttgcctctttttctaaaaaaaaataaattctgctattgttcaataaaacacatctatattctgcctattgctactgttggtaccaggggtctatcgtttgtgataatacttttgttgatacttttcatcaaagttttaagcaatgtgctacttaaatcaaagaaatacaagtttagaaagaaaaataaatacctaatgagaaaatgttgtttgaacagaaatagaaatggtacttttttcagcaatgggtttacaggtttatcatggaggattcagtttgtttgatgtttaacatttcaatattattctatgaatatgttttgcatcaaatatgtatatgtgtgtttactcaagcatgcgatgtgtatttggtttaggtaggagcacacactgaaatagaacttgaagatcgaaaactcagaattgaagatgcaaaaaatgccacatttgctgctatggatgaaggagtagtgcctggtggtggcgccagatatgtacatctttcagaactgattccttcctttaaaattacatttgataattttgacaagcaaattggtgctgagatcattgaaaaggtattttctgttcaattattgagtaatcgttttatttacaggaagactctttattgtgtgcagctcaaaagattattcaaagagtagagtagaaactgtcattcagcatatgtgatgcatatttggactagtataaaaatcttggtgacatgcgtttgaaaaataacatttgcaagaatatttgtagggtactgttttcatgtcatcaaatgctgttcggaagcgttatgcaatgtttagggagttttttgtttatgctgtttttgaaatcttgcatcgtcagaaatgtgatttaaaatttttgatgggatgacaggctcttctagcacctgcaaaatcaattgcgggtaatgcaggagttgatggagaagttgtcgtggagaagattcgtactagtgattggagaattgggtttaatgcaatgtctaatagatatgaagatcttccagatgctggcatcctagatccttgtcgggtttcaaggtgcgcccttgaaaatgcagtttccattgctggtttagttttaacaactcaagctataatggtagagaaaacgaagatgaaagagccacctgtccctcttcttccagggatatccccctgatatatttaacagaaatccctaggccatttgaaagctaaaaattcatttttgcaacttgtctgtttgccattggttgcgatatgctcggaagtttctcagataataaaatcaccttagttttggacatgagacaggtaaaacagacatttgaagatgtggataagtaaggattcgtttagagttcagatatggaagcatggatagattgttcattgttgatccaaagttctagcaatgcttattgaaatcacaatgatttcacccttgtaaaatagagcaatgagggattttctttttttcttcaatcaatcagtctaaggctagttcattcctg

SEQ ID NO: 301174 - DNA, 2660 bp, Cannabis indica
aatagagtattcttaaatagaggttctactgtattaagtccattatcagtgtaagtggagtgtaagtggaggtttactccaacactttttatatcaattaattatcatattttcgaaactacatttaaagtaagccatgaattatgactatcaaaattaaaaaaaaaaaaaaagaaatatcatgttaatgttttcttttttgtaaaaatgtcatacaaacataaacaaaacaaaaatacaatatttctcaaaaaaaaaaaaaaagatattgggctgggcctgaaaatgagcaatcaaatcaatgacccaataaaaaatcctccaaattagaattagggtttactgaaacccctttctataaaaggtggagtctttagcaataatctccaatcacttgaattagtatccgaagaagaaggtggctagcttatttttcttctaattttccaggaaaatcttcgaagtttctttctttattattgtttgattagagaaaaagcctaacattgcaattctttgatctagtatttaatatgcataggtcaaagaatctatccttaggctagagtaaagccaaagtacatacattcaattctgtatgtattttcaacctttagctccgattcttcctcaattttattttcccaggaattattcggtgacaaggttgatacaattttgaatcttgatttttgattttgaaattctagggttagggtttttattattattatttggggttatgatgtttggagtgatgaaataaatcattcggattcccaatgatcaattttctattatgatattaacaaccatctacttctgactattcatcataaccaattttagttttttatttattttttgaatttatgctttgataaagatttgatttttaatatttttgaagttgaagaaaaaggcttgtgatgtttcttaatatttgctactcttgatgggtttttcacccatttgatgatatttttccaccaagatctctgaggccttttattagaaaaaaaaagtagattttgatttttgtgaaaatatttctctcattgcttagagaaaattaatttgaaaatatagagcttattttgttaaagtttgtagccttttgagcctatagaaacagaacatttgtttatagttatttttaattttaatagtattattatatttttttgagttgaaaatgtaaatttagtttattaaaaaatgtcaaattttttgaaattaaaaaaagggattaaaggttatgatggatttgggtgatgaaagaaatcgttcggattccaattgatcaattttattatgatattccaaccagctacttctgactttccatcataacaattattccttttttttaatttcatttattttaaatgagtaaattatgtttttgagtaaattaataattggaatgtagaattaatggaaatttgattcatggagatttgagacaatgtatgattctaagccaattgtcaaaatgtacttataaatccaagatttaagttagaaacaaagcataaaatgatttggtgatgcttctctataactaaattggtaagcatgagctatttgaaaggacaaaaaaggatcttactaaccttggcttaccttggcaaaaagtcaaggtcaattaaattaagagaaatactaaagggcacgtggtttcagcattttcctatatgtcttaaagcaatgctcttaaattaagtatattccaatatttttttgaagaatgtaacatctctaacctcgactagtgtttatgcatcgctctcctagtgcattgaagagaatagatttgagaacccttaagggaaaatagagtatctacttaaaagagaaaacatagtattaagcatgataagaaaccaaaatggacaaagatagcaattgaaaatggaaagggctcttgaaagcatttcgagattaaaacctattgcatcttggcttttgaggtgagccacaaggagtagtcaagatgaagatttggagtcttgactagagttcctataacatagaggagtgcatgattagcctttctagggcatttgaacaaagaattctcaaaaaccctaaacaaaaatagagcatccacttaaaaaaacatagtccaattaagattttatgttgcttaaaatgcaataactaataagaactcttaaaacttgtatttctgtgcgcactgtctcaacacgttctaaccatcgaccgtgtgagtcaacaggctagtaaacccataagacacaaagaaattgattggtgggatccccttgtgggttgcacctcgaaatgcccaaatcctagtgaaataaggaataattacatgaattattatttaaaaaaaaaacatattaaaaggcactactgtttcctagcactcgctattggtgtaattaaatattgaatctcatgtaacttaagaaaataacttttaaagagtattgctaactaatcgtaaggcgccacctataaaaagtgttgaacaccactggtacccaatagcaatgctcttaaaaaaaatgcatttttatctttgtaaaataattattaagacataataaagtcgtaaccacttgaggctagctcaagtggccgtgggtgtgtgtgttggaggtcctgggttcgagtcccagctaaaatat

SEQ ID NO: 301175 - DNA, 1401 bp, Cannabis indica
ataacattatatatatatatatatatatctgtgaaaaactgacaattggaaaactcaaactcacagctttgagggctaaattcaaacaatctcaacaagctgcagtttgaaaaaactccaataacagctctcagtagctataggctagagctaactataaacattttcaaagcaatagacaatcaggctctgacgaaactaccaatcagtcagaataagcacctccatctaggatttagcaagagggaattctactttggatagataaactctggacttcaataatgtttctccaattttaaagccaggcataaccataaactcaactccacgcatagattcaagttgaaccgaacaaactgcgccctccttatcctcctccacagattccatataaacatctgagaatttgcttcctctgttgacagcaaaagctcttgctttagggtctaatgatcctgcaatgccttgtaaaacccaaaccactttgccattttcacgaatatttggtagaatggtgttctaggatgcttgccactcaatacaagtgtcctgtaatccagattcccaaaaaatgatgcttccataattggatgaacaacaagtaggtacttttttccacaaaatttggaaaactctgagtctggatcattgatcaaagcatcaataggatcatcaaacctcatgacatcatccacattatatccttgtaaggtcatcccactaaacattcttctccctatgtaggcttcaaatgcgtacttcttgtgagacctttttgagtaaacaacttcccctccaatagaattagcagccagatctaaattccaacctgaagctttcatcaggctaattaatggcttcgcaaaatcatgaattgacttagaagtggctgcaaaggctttctgtaatgtgttgacattgtaaacaacagcaaactttctttccacactcatctgcttgatcttctcagcaagttttgcattgccattatctaattctctaagctcttgtgccagttgtttgatctcggaatttttagctttcacttggaacttcaattcttcaacaaacccctcatttacttcaattttcgcctgcagtagagcaatgtgtgacaaatcagactcggattttctaaattgtttctccttgtaggcgcgcttgatcttgcagagcgcttcgagctcagccacaacaagtttattggcagctataatcatcttgggattatagggaatgtgagcttcttgaagccgaatataagatgatttcagagctgaaacaatttcaaacaacttctccatttctgttttgccattgttctccccccaaacttcagcagggtggggatgaactttttgaccctcaaatccagtctcttttgtcaaatcacggcta

SEQ ID NO: 301176 - DNA, 1760 bp, Cannabis indica
atataagaatgtgttagcgaatgcaattttatgacatttagctaaacaatcaaaatttgtgtaataaataaaaaaaatagtatgaatatgagttgtatagataataacagttaaagaggagcgattaaaaatagacttaatcttgtataagaaaaaaactgataataattaattttttaagtttattaatttttttttataattttattattattatttatttttattttattttttttatttatatttttttttaattttaaattaattttattttaattttttaatttttttaaataattttttacgtggaccaataaaattgtgccacgtgtatactgtgtccaatccaacatgccacttaacacctaaaatggacggaatggattaattgctaacagaatactgagtattaggggttttaccgcccaaatttgggtttggggttaagtgaaaccaaaaattttaggatttctgctgccatttacccaaaaatttatattgtgattaaaaattataactaaaagtaattgttttttatagtaaaaaattggcattaaaaggaaaaataaagagaaagtagaatcgatcgaacataaggaatttgattttggaatgattacgtctctgtcaagctcgccttagagtagtttgatcttcactatgaacaacatatatattacaagaatccctcaagacttcgaatcataaattccttggttgataatttatgttttcatctctcagtttttttttttcgatctcacaatgacacactttctttttctttctttgagtgatattacaaatgagctcgagaagcctttctctcttctttcccacactacaattttcctcacgaagagaatgaaggtctcaagtattaaactacacctgaatctggaaattttataattcgtatgagtagataaagtagtaggatttgttgagctgtaatttgttacgctttttttattgtaattagtttctggtattatcttttgtatttgaaccttcaggcacgcttgtaatagttttgttagagtctacatgtgtatgaaacttctttcacaagattttacatattggagaaaatgagaaacaacaatgatttggacttcaacttttaagcttctaaatctagaacaaattaatataattttttatttgccatgaaaataaggttagtgttaaatgaaaatcgtcaaagcttagaaactcttattctatttttttcaaataagaaaaataaaaaagatgaagagatgaaacacaaaaaaatggttggtacacatgagaaaatggagaagatttttttcttattcaatttatttccctttttttttctagaagagtctctctcatttcatttaaaaaacattaaaaaggaaaaagatagaggaaggtaacaataaataaaaatggaagaaggatatggagatggatatgtttcttgagggactataattaattagttggcaaaagttgagacagagaaaattgagaaaggaaacttttattcgtttatcttctacacaaatcgattgaagaatttagcaccacactatctaatatctctacctttgaattttgtggatgaagtattttattaattgattggggctggtaaattaaatagaataatgacacgtacaggacccatttggtacgtaggactcgattggattagacaggctaatttgtcaaattcagtgtttgggcatgttagaagtctggatgactaatccagctaacctcat

SEQ ID NO: 301177 - DNA, 2450 bp, Cannabis indica
cgcgacctggagtgttcggtctcgggacatttggaattttatttttgtacttgttgtgcgaccaggctaaaatattttgataatattgtaaaagtttaaatatgggacccgacttttgcaaataaatgtataaaagtttataaagtttaacaattaaaaaatcacggtagcgcgactaagcatcaggacgttacatttctccttagaacactctgaattctcgcacatgtatgtaagtttcacttaaaaaataaagaacaatttgaataattgcacttttactcaaattttgcgtacattacttaagaatattttttttacaattacactgtgatcgcaggagtgaggacactctttttgttaaattgcatgcacatcatactgaaaagatcttctatctttcagatgaacggtctttcagatagctaggagtaccattctcaagggggagcatccacggaagaaccccataatagcaataacttcattcctacattaatgtcaaatgaagatattctagagcgtcaggattcaatatccatggaggacataactcgcatgattaggaatttagaagaactggtggaaataaagttgcggggaagtgaatcgaccatattgacctggggcagtttcattaatctgaaagctttattaaagggtgaagtgaaaaaagtcaattgatacttcaaattgcctatctatggagacgatatcgcagacgaggatgaagaagtgggtgcttctgatggagaggacacacccttaaacgagccttttttctgtgtgaatctcatctccaagacgaggcagttagacttatttcgagaaattaagactgatttgtattggttgcataaggcatgtgcccatatagctttccaccttccctcaccaaccctgagatcaacaagatagaagtcgtggtcatgtcaatttctattcttcgttgcggagtaattctccccttccacctttttttcaaatctatcctcaattactacgacatcgcaccctttcaaataaccccaaatagctacataatcgtccttagattcttcgtactatataaagtaagggatatgcgaatccaacagtcgaggattttagctttttctacgacatcaaaaatgttagtaacgataacggtttcttttgctctaacaagtgggcaaacgcaaatataaatagagttgaaggcgcagtttccaatatgggcgattagaaatcgaaatggttctttgcctttcgaataccaggaattagtatagattttcatcgttgtccatataggtcgcttattttatacttgcatatattttttataacaagtttctaaccttttccaacttcacagggaggccagctcgaacaaaacttactggagagaagttagaagctacggacactattagtgctttgcccctcaaagctcgtgactgtagagtcttgtgcacttctccaaagttgggaaaacacgatttgatccccactaactctaggctttaacgaagctagtttataaagaaccttatgacaagcaaagggaaaagatagagaaacaaatttcaaaacaaaaatagcctggtaatcgatgtcccttctatgctatcgcttattttatcatcacgagttcttgagggcaaaatagtaattttttatacattgttattttaaataattatatcaattttgaattgaataattaaaataatatttaactatttaattttatttggtacaaatatattaatttgttaaatataatattattcttaaataatatttaaagagagaaatatattattttagtgtaaaataatatttatttagtcctagtaaaataagagattaatgagaattaatcaattattatttattgcagaataaataaaaaatcttatttgtgacaaattgagaaatcaatttctagctttaaaatatgactcacacgagtagggcttaggtttagagtttggtgtgtttcctccatcttaagttgcagtgtctcatgaatagattacacactgtaacagaaaaatttgttcgtcatattaaatctataagccttcaacaagtctattattgctttagaattgatgatcgaatttgtataagaaaagaaataaggatccctttatagacatcaagaggtaaaattatttttcatgtagttagatttaacttatgttaagtgtgttgaaatcttgagtttatggttcatattagattcaaaacaattttttttaaagaaaaacttgatccaatctttatgcttacgatatataaactctaaatatcgacacgggtttatatcgaggtctcaaagtattaaatatatatttttaaaagaataataataataataataataataataataataactattgttttagaaacactactacaaaaatagtttttcttgacgtttttaaatagtcatttaa

SEQ ID NO: 301178 - DNA, 973 bp, Cannabis indica
aatgacaaaaaatatatatatatttatatacacacatataagaacaaactaaaaggccagtcatgaatcgattttttcatctatataaccttaatttatttaaaaccatgagttattaaaacgttaatttactctaaaccttaatttggccttatgagctataatgataaaataaaatgatagttagttataacgccaaaaaaatatataaaatgtatcgtcaaattctagcagaactgaattagaaccaataatcaataccacaaattacatttcagacactcttcttgtaagaatagagtaagatattccaaaactaattcacaaataatacttagacatgcacattttcagacgtacttagctttcaagatatatatatcataaaatttcattaagcacagggccaagataaacaaactacatcaaagaaagttctaaggccaaagggaaatagaaagtccaggccaccaaacttttgaatattcaagaaataaaataagaatgagcaatttagattttagaataggaaatggaaataaaagaaaaagtattacatacttaactttctaaaaaaaaaaaaaaaatagttagacatgcacattctcatatttgggaccctaacattcctaaagaaattctagcagaatttttttgataattattaaaatgaatcaaaatactatgtataaataagaccaaaaaaaaaacaacttttatttggtacaatcttaacattttctcaagactacaacagaaataaaacattattattagacactaacctaaaataaaatgagatttacttaattttaaattataacaataataacagtatgacactttataaaaatgctagtagagacggatctataacaattatagagggaagccttggccccttccaaattttctattaataaaaaaagggtaaattgcggcatcaatacctaatgttttcgattttatacac

SEQ ID NO: 301179 - DNA, 1193 bp, Cannabis indica
ttttattattctcgaatcatcttgagttcttgttggtgcatttgtgcaccacataaaataataattgaaaagtgatattgttttggtttggatttggtatgatttttcataatctttcttggtccaataagatgtgtaactactcttgaaaagagtttgatattgcaatgaccaaatattattattggtgagtgtaacactattcacgtaaaagcataaggagtgatgaaaaaacataattatgatagttgttgaactcccttaaaaacaagcttgcttcatgaaatcatcaactagtaacataatagtgaagaattgaagcaagccctcatgcacatggtgtagttactcattcttaaatataattggttcaatataagggcatggagcccccattacttctttcactgctaaatcttcttagctctcaaacaaggaagaaaatgatgaaaagaagaagagttttctagtgaacaagtcatggcccattggatttaacagaaagatgattagtgacaggcaggagttgggccatatctctttccagggcccatttacccaaattaagccgttaatagccaaaaagaaaacaatcaaatttgtccgttcattaactctttatgagtgaaaagatgagtaaattacttcttcttttggacaactttctcatcttatggcccatcttatctttgccattttgccattatccattgttattaattctgattcttgaacctataagttgcttattgcaaaggacaatgacttgtggttttcggtattcctgtcactaactaccactaccatcaccagcatcaccaccaccacttccacttcctttagctaaaaaataatgaaatattaaaatgtcattttggaactggacttagatgttgatccaacatgagtgttttccatatttaaattgcatacatgaaaatatgaatttgcatgtctgcattctttttcaaaagcattaatttgtttagtaagatgtacatcttaggcattttttctttcttctgttcagtaatatagttaactaaaaattaagaatgtaaagttagtcctagttgatgtggataagttataatgttaacttttataaatgatgatattcattgtaattataatataggaataattacacaaggtactattttttgtaaaagaaattacattttacgtttaaa

SEQ ID NO: 301180 - DNA, 952 bp, Cannabis indica
atttcatagttcaaaatagtgtgttattgaccagtgggagaactaatggagtggattcagagcaccttttccatgttaatcggctctggtaaaatcttagctctgacagtgtttacatacttaagactgttaattacaaaatgtacatagggagatagtagagaaaaaattctaaattgtacatggtttggtatttatatttgtaattgtatgtaactttcttgacaaacgataattagattttaatgacacggatgtaggaaagattagatcagctcttacaccaaagattacagtattatatatatatatatattgataattacaagcagaagcaaactgtaatataaacatataattcattttaataagtttcatatttccttgtttttctttaatgctaaagaacacctgtgcaaaataatgttcaattgggacaacaatttcattctaagggaagctaaagtaattatctttacctcgcttggatctttgattttaaaagtaattattttcttattttggattttttttttcaagaaaaaatgcaacttaaagaggacaagccaataaaagtaatcttgtaataagggtaattttgtaaagctaatgtagttttttcttgttaaaattccagatccaatcaaagcatgtaatgtaggtataggcaagtgcctaaatacgtaaaaatgcaaaccaacatattattaattagtaaaaaaataattgcatttcctaaaataatggaagcaactatttactcgtgggttcttgttattaattacaattgaccagtactaattatcgactttcttacttgtaataaaatcacaccacgatacatacatacataccatagcagtagcattccattaatgttccacctcaccaacttgattcttcttcctgtttattatatattaatttgaaaaaaaaaattgcttaagtggcc

SEQ ID NO: 301181 - DNA, 1253 bp, Cannabis indica
tataagaactataataagaaagagtatattgagagagaaagtgaagtattaactaaacaaagttttttaattatggagcacttgtttctctccctattactaggctttatgacattggtatctcttggcttttttgttttgttttacaagcacaaatctctctttgttggtaccaacttacctccggggaaagttggttacccgatactgggagaaactatagagtttctctccacaggatggaaaggtcatccggagaaattcatttttgaccggatgaccagattctcatctgatatcttcaagacctctttattgggcgagccggctgcagttttctgcggttcgacttgtaacaagtttcttttctcaaatgagaataagctcgtcactgcatggtggccgagctcagtcaacaaagtcttccctacctcagaacagacttcctctcaggaggaagccaagaaaatgcgaaagctcctccctcaattcatgaaacccgaggctcttcgtggctacattgggctaatggacaacatagcccaacgccatttcgcaacagattgggataacaacaaggagattcttacattcccgctagccaaaagatacaccttctggctagcagctagggtcttcgtcagtctcgacgaccctaatgagattaagaagttcgaggagccattccagctcctcgcttctggaatcatctcgatgccaatcgacctcccgggaaccccgttccaccgagctatcaaagcctctaaatacataagaaaagagcttgttaagatcataaaacaaaggaaagttgacttggttgaagggaaagcaagtcgttcacaagacatattgtctcacatgcttcacacgtgcacagatgacggcgtttacatgacggagttagacattgctgataagattcttggcttactcatcggtggtcatgacacagccagtgctgcctgtacttttatcgttaagtatttggctgagcttcctcatgtgtatgatgccgtctatgaaggtaatcaatacataaaactctcacacgtttttatttatttattatttcattatatattctctctcttgtagtgaatcaatcaatatcataatcataaaacgagcattgttataaggtaccagtggtgtctagcaccttctcgacatgtcgcgttgcgattggctagcgatatttcttaaaaactattatattaaattatatgggacccgatacttaattgaattaa

SEQ ID NO: 301182 - DNA, 2707 bp, Cannabis indica
cgccattgatcactgtcactaatagcatccactggaactaactctgacgttcaactcgatccttcaaactccacggctatcgttgctactactcaaccacttgctccaacacactggaatcctttttccaattctctctttgccgcccttactgtcaaaatagatcgtacaaacttcctggcataaaagtctcaggtggttcccactgtcatcagacacgatcttgatgacaccctgttcactggagttcctcctcctcaaaatcttgtcattggtgctcccaatcctcagtatctgcaatggaagaagagcgatcaattgcttctctcatggttgtgatcatcaatgatagaaggagttcttgcctctgtggccaattataccagttcttactcagtctggagagctcttgagcaaaaattcaccagtcaatctcgagctcgacttctttaactcaaaggtgaattttctcacatcaagaaagggtccctgtccaattctgattatgtagacaaagtgcaaatgctctccgattcaatcactaccactggttctagtgttggaaatcaagatgtcattcttcaattactaaatgggttaggtccaaaatatgacccagtggtttctggaataacctcaagaagtgatgaactaaccttggaagaatttcaagcccttctaatggctcatgagagtcatcttgatcaccataatgttgtgtttgatctcactctcaagatgcaagtcaatcttgtttttggagcatcaagaactggacattttaggccacctacgaacaatggaagaggaacaactactaacagtcaagcaagaattccaagaagaggatctggtcgtggttcatatccaaattctaagctcatctgtcaagcatgtatgaaatctggtcatgtagctgctgtttgtcactacagagttgacaaaatgtgatgcagacactgactctcatccacataaccccattattctccttgattttggttaaaaatcttgagacacttgaatcctccactgcctatgttggtccagaagaacttgttgttgcagatggtaagaaaatctatatctctcattttggttctaccactttaccttcttttactaattgtcctttgaaattaaactctgttctacaaattccttcaattagaaagaatttagttagtgtttccaaactaatagaggataataatgtgtttcttgaatttcataaatactattgctttgtcaaggacaaggacactggtcatgtgctgctcaaaaggaaggttaaagatgggttatatcaattgggagatgcctcttcttcatcttcttcagctacactacagtgcaatcttgtgtccattcagttttttgaatttgaatgtgtctgtaatcaacattgtcaaagtcaggatcaacctgaaataaataattgtactcaatcttcaataaataaaacatctaactctcatggttactctatcttgcatcttgagttatatcatacatatgctaacaaagatgttaatacttggcattacaaatttagacaccctgcaatcaacactataatcaaacttttacccaatctaccccacacaggatctatcaaagatttgacatttttaaatgcctgtcaacttggaaaaagtcacactctgcccttttctacttctgaaactaagacaactcaaactttggccttgattcataccgataaatggggtccctcacatgttgattcaaaacaagggtacaaatattatgtgcactttcttgatgactacaacaggtatacttggatttttccactcacgctaaagtcataagcctttgaagtgttcataaaatggaaaggcctaatggaaaaacagtttaatctccctgttaaatctgtccaagcacactggggaggagagtacaaatcctttaaaaggtttttagaggatcaaggaatccattttcaacatccttgcccaagaactcatgagtaaaatgggagagctgagagaaagcacaaacacgtcactaaaatggcctaactctcttagcgcaatctggtttggatctatcttactagtggtatgcttttagttctgctgttttcaccaccaacagattacctacaaggatcttaaactatctctcaccctatgaaactctcattcacaataaaccagattacaacatcttaaaatcatttgggtgtgcttgctttccctacttgaggccttacaatatacataaaatggggtatagatcacaacagtgcctattcttgggttattcacctcaccataagggctatatttgtgaaaattctaaaggcagactatacattgcttgaaatgttgtctttaatgagcaacactaccctgctaaaggctcctcatcaacatcaaaggtacattcttcaatgtctaactcaattccttctactacttttactattatgtcatcacaacttcccactaatataactgttgatgtttatgtacctttaaccacacccatccaccatctcccacttctacttataagccacaaattccaaatccctctcaaagatcacctcacgctccccaacaacaagatgaaaatccatctggctccttacctacttccccacatattgctcctgaaccatcaatcctgcctccatctcagtgttgggttttgtgccctaaataaaacccattac

SEQ ID NO: 301183 - DNA, 4603 bp, Cannabis indica
gtcatcggtagagtccaaatctagttaaacagaggtgtcttacccctttctgtttcttgcaaagctttacagatatgtaagaaagttttcattcaataatagaagcaaaccttgcgatcaaatcgacctggtcggagaagagcagggtctaacaaatccctacgatttgtagcacccaaaaatataacaccttttccggtatcgaacccatcgagttctatcaatagctggttcaatgtagtctccctctcttgagttgcagcattataaagctgatctgaggattccttgaaaataccttgccgcctatacaaacaatataagttctcagattatgaatgtgcaaacgaaatttatcaatgtttcgtaaaagctgatcctttgccatatatttagccatcgagcttatgtctcggacgagacacattctttagaccacttagttacaatatgatcacattgcatagttcccaattaactaaagaatgatgttgaataaaatggttgcctgttatattacagttgtgattcaatttgatacaataaggtactaaaagataaaaaagcattggataatgcctcatctcgcttattataacacagactataattttcaacgaatatcctaaaatggtgtttattgtaaaagttaagtcactaagcgtaaaattttagaaaatgatcgatgaagtttctcgtacctagttgccaatgcatcaatttcatcgatgaatattactgatggtttgtttacctgcaccgagagaaataatagctttctgcgttaaagcgagcatgtaaacgcattaaatcataaaggaataatacaccggtaccccgaagaaacaatttaacaatatgttattagtaaagaaagttgacaaggttgttcggtgttccttaacaccgcatgtaagcctttttcgacaactcactaccctttgggagactggagacaagcattcatttctttattttgacaatgccataatatttcggtctcccaacaaaattttaactgcaagaaaaaagaaagatcgattaccttagctcttttgaatagatccctaatacgagcagaacccacaccgactaaaacttcaacaaattcagatccagccatttggtaaaatggaacaccagcctcaccagctatggccttagcaaccagggtctggaaacacaaggatagtcgtgagatttcaatggtacaattagcgagaaacatcacataatttgataaaaatgacaaagtacaaaccttgccacatccaggggggccttctaaaagaacaccatgtggaggttttatacccattttatcaaaaagctctgggttcttcaagtacctcaccaactataaaaaaaaattataaacgcatcattaacctcggtattaacaataaaatacttgatcatcgttttctatcgaagaacatggagcaaaagatgacacatttaatcacaacagcaacagcttaaaatatctcatcttggaaaaataccaagcagcattacgatttaagagcatggcaaattaactatccttttttaggaggtattataatacattatctggaaattttctgttttttctatacagtgtagcataaagttcacctttttttctttcttaacagttacataattcagaaatttccaaatttctttctcggaacaaatgtacacgaaaaatataaagcattacagcgagagaaatatgcatgcgctaattgactatttatcataaaacaattccatatgagagacttgaaaacatacctcctggagttcctccaccgcttcatcaatccctgccacatcgctaaatttaactccggttgaaccctgaaagaacatcaacattgaaaaaaaatcaaaaaatttcaagcaatcaaacagggtttcattcagttgttgtgaaatgagtcaactaacatcaacacgagcttctgccttagaacgggaaaaatcaatcccttgccacaagtcctgaaatttataagcaaattgattagaaaggcacgggatcaagaaagtgaacgataaacataagcaattagtagcgaaaagaagcaacatttacccatttcctaaagttctttggtcttctcgaaagtgtgaaacggacaagaaggaccatagttaaaagaacaaaagtaattggttttaacacctcaagactagcagagacaccaccaaaagtgtaaaaatcggaaaatttagaaaagatgcctccgtcgatgaaaaattcaacaaaattctcccagactctttctaaaatacccgatacaatgctaaagaaaagtttgatgaaaggtctgacaactggccaaacaacatatgaagctgtcacatatacaaaactcgtaacagcaaatactgctgaagccaggaaccctccaataacagcagcggcagcagccattacagcagttgccattccaagctccactatgattctgctagataccgaagatgccactggatgagggtgctcgggtaattttccaacccaagactgcagcaaaagttcaagccgtaaggaaaatatacaaaatcgagaacctcaaatcgcgacgtttcaaatttcaacctcaatttcaaggacctctctttcctcctataaaatttcttcttttaccttttgcgaaattactaaacacgattgaagaacaaatgaaaaagaagtaagtggggggattcacaagtaacataacctatcaatgattcattgtattatcatacaaacaagtgaacagcttatatctgattcaattctttttaatggaaagagagaaaaattctttatttacatcaaagattacaaaactaaaagaggataaggcattgttgtgaacagaatgaacaaaacgaaaattggcaaaatcaaacagaaaaaccttcaaactaaaagcaagacagaattaccaatacaaattaaaggaaataagaaatcttttagcttctttacagatttcagtaattaatctttcatagttagaaatgcttcaatcttttagcttcttttagctgcaagtttatcattgtggaaagtgattctaaggcggtgatcaattccatcaatggcattgatcctagatgggaaattgtgaactactccttattttgtaaaagaatcacaccttcttttgttagctgcttattttgtagtactattagaacttgtaattttatggcccataatgtggcaagtagacctttacccactaccggtttggtcgtttggatgtatcggtcatacctaagaacttattttgtaataaccgcaagatctaactctttcagtctaatgaacgcttcttttaaaaaaaaaaaaaaagattcaccattcaataatatataactagataaagctcatttaagttaaaaattgttcaccatagtttgcttctctatttgataacaaggaccagtatactcttccaaaagattctgagctaaactctcatccagtctcattgccctaagaaaagaaaaaatgcatatgattataagtttgtataacatcacataaaaataaaccttaaactttgttaaacaatctaaaccaatcttaccattttgttatatgcaagctcttatcaccaggcatttccttcaattcaataatgaaatccctataaccattagcataagcaatactagcagtagcaacatccttccaagtcaacaatgtaaccttatcattcctcatagctttctgaaaatcttcaagctccattcttggcaatgccttaaaatccttatcaaattcctcttcttcagacaactctttcccaaaaacttgctctggtacataaagcttacccttatactctctcaaaatatctttcaaatacacagcttcattttcattcttcaattcactctcattcttcactttcttcaaagttagaacctttttcaatgaacgaaaaatacccaagtctgaatttttcttcaaattctctttttccttcaaagtaaaaaacttttcaccaattaagtaccttggttcaacttggcttggattctccttcaaaaccctagtcacaaaatcctcctcaattggattgccaccttcgccggcggcctgggatttcgattggcacaacaccacggaggccggtgaccggcgaaggaaaagtggttggaaggtattggggaagtgaagcagtgattttgaatgcaatccatggcggtggccatggggtttcggaaggtataatatcttaggagataaacgaaaatcaatggaagccattgtttaacaactgaaaatgagaaattacagaattaaaattggatgaagatcaaaaacaaggttagtgagtgatttcatattagggtttatgagaatttggagaagctatgtgtctcataatctctgttctatcatggttggttgaagccagagactcaacggtctctggtaatatttgtaaagtttgaagctttttagtattgaagagcattttatccaaaacccaagctaatgtttatttatgagtttttctttaaaggtttagagatttttacacctgatgtcatatttcatcatttttttacttttttggcattacacggttttttaaacttt

SEQ ID NO: 301184 - DNA, 1356 bp, Cannabis indica
aaaaaaaaatctaaataccataccattccataatttattcagatctcaaattcaatcctacacaaaacaaaacaaaaacagaagaaagaaaacaatattccacttgttggattaaatccctttacaagctcaatgaacatgcggaaaaataattagactatctcacttagagtcagttgcatcgggtggcaacttaactatcctaaccaactaaactaactctattaactactaaagcttctataaatagcaaattgagctccaagagagctagagagagaaaaataaaatggagttaattagagagggaaagggagaaagttgtaaagaaagattgaaagaggacgagtgtgatcaagtagattaattaccagtcaatttgtgacttggaatcctcaacaccattgatgtaattcaagactgattatagtattaaagcaaatcagttcctatggcaagctcaacggggatgaaactctatgatttagggtgaactttaagaaaaattctgtgtttattctatctttttgcatttttgtttatttttctttaatgtgattgcgatgtttgttcatgtttgaattgctaattctgaccgatttgaatgtaaattaatccctcgaagcttgatcaaatcagtttgtgtttaaagattataatttgaatgtgtatgagaaatcttgcatctcataattgttaattgtttgattgaatgcaaaggtcaaattatgatcttgatcatatgatctaatgtgtatggtgagttagtgtagggattgagtattctaatccaaccagtagtatcagagtcagacattggctaaagattcaactcaagaagtgatcaaaaatcaaacaaaagctggaggaagttgatctccagcatagagtttatgacattgaagacttaatagatgttcctttgaacgatctaatagaaatacctctaactatatctctatctattttttattgtaataacatgaataatgtgaagattgatattgataggtttgaaagatttggtgattacatgatatggagaaggaaggtcaaatctcttctagcacaacagatcctattgaatgcgctataagacattacaaagatttagagagaagaactcttggagacagccattgttggaccgaaaatggtacattttaaatttatcaactcgcaagcacacaaatttttattgcagtgtagagattgtaaagcacgagatcgaacccatgagagttgcataaaatcgaagaaaatacttttttctaatctaaattattataattctaacatagttccaaaaattgtgagatttttggtaacaaagtaatgttagacatttatatgtat

SEQ ID NO: 301185 - DNA, 4149 bp, Cannabis indica
tttattaattaataattttttttggtaaagttcatgaactaatttgtcaaaacttatataatttaagaacataccgtataaataagccttttgtttgttttttaaataaaacatgtaattttatagaaatcagctaaaaaaaatagcttataatctactcgtgacatatacaactaggattagaattaaaaaatctagcagcgtctaattccaaattatttgtcaaataaattaaaaaaaaattaagataactttaaaaacactattgaggttcatttatctttcctaaaacacaaacaaaataagccttttgtttttaggtgcacaaattcaaaattaaaaaaaaaaaaattgagtgtaagaccaagtctatagttattactagaaaattatgttttagtaagatatgaaaaagaatatgatatgttgcaattactttgtttatgcggcggtaggcacgcatggcagtggtgcagataaaatcaggggcgagagaacccaactagattctccactcctctcttttcttttcttatatattatattacacacaacacaacacaacaccccatatttgaagcaatcgcaacattgtcggcccaaccaacataaaataaataaataaataataatcataaattgcttttactacttactatatatgttcacagcccatcttaagatgttaattaatatttcacaatgctctttatatattcccaggaaaaataaaaagaaataatgttgtttatagataataaattacattaataatatcaaataatagtgtgatattttacaatgttaaatattaatgtttttatatatatggaatatattcattttttttggaaatcaaatgcaaaatatattaagcaaacaagatatatgaagagactttagcaaaaataagagtcactttattaattgatcgtttaataaaataaactgaaataatattcaaagtaccaagtaattatttacattcttcaattacttgtctaaacaaaaaaatcatcttaagagaactctctaatgcttgcacaatagtgaagcaatcaatttcaagaaccacttattgccaatctttgtctttgatccaactaaaggcctcacgcacccccattctttcagcaagtttcagtgagatcatacatttagaataataggtgcaaccctcaatcaaaaaagcctctctcgtcgcgagctaccattccatagccataactattacctccttcaaacaaaacaacatcaacattaaccttaatactatccatctgaggaacaaaccattcttagcaccattacccaattggagaccagtccatgataattatatagtagcagtttgagcaattatccactaattaaggtaacctttagctaatgccacaatgtcgtccacccctaaaaccttcccctgccgaacacactcgttacaggcattccataaggcccaacataaagcaaccatcatatattttttctccaaattatattgttagaaacaagacagacactaagcaaagaatgaagtcccaagttacacaaacgttcctattcctattccttccctattcaaacacaaagcagcagtcgaacaagtgactaaagcatgaagaatggattcaacagccactacaaattaggcaaagagaactcacttgagctcgctttgatctcaactaaattatggtaggaagaatatcacgactagccttccaaatcaaatttttcatctttggaggaattttcaaactccacatcttactccaataaatagcaacagcttgttcattgaagagttaacctcattatgatcttggagtagtctataggcactctttacagtatataaatcagataattcaatttttcaaattaaatggtcattactttagcctctatataaatgaatgcttaacataagattatgatctctctccttaaaaagatcatcaagaatctcattgtcccaatttgctccatgaagagattaccattggggtattagaatttggaagtcgaggctctcccaatgttgcaatattctcaccattaccaacataccaccgcacctcgtagccagtactagttgttgggctttcagcacactatgccacacaaaactccaattggagccaattgagcctgtaagataattaccatgtagatagtactgagccttaaagacacgtgaaaccaaagatgaaagtcttgtaagcaaacaccacccttgcttgcccaaaagagcaagattaaaatctttgaggttacaaaattccattccaccttttgtcttgtgatgacaaaatctatcccaagacatccaataattttcattatgagaattattagtcgtcttccaccaaaacttggtcattagctttttcatgtctcttgtaacttccaatagtaataaaaaaaaacacattgcataactagagagcaaaaatgatgacttagttacttatgtataaaaatgatgacttagttaattacctataagtgattcataattttgttttattggccaagcaagttacgcgaatgtgatagtcagtagtctcgtgatatgtaagagaaaatattgagtaagttgtacaattccacatctatggattattgtgcctcttgaattttttaatcccttaaaaatagtctcgaactattcatagtattgtaaaatgattattttgtcatattttatcacatgtggcaaatagaatgtatgacgtggttgtttggacaattatcatatcagcaacatgtgtgtaactaatttaaaaacaaataatttaaaagctattcatttgattttattcaatttttttaattattaattaattttaatttaataattttttaaaaaatacttgatttttatttttattttaaattacacacgtggtgttaatgtagtaatagtataaatatccacttcatcattttatttgccacgtgtgacaaaatttaagaatggcaaaacatgtcaaacacgataacatgatttgaaacccacacaaaataaacaggcttaggttttcttaagggagcgtttgttataagtttaggtttgcataggaatgtaggcttcattttgcatatgaaactcaaatgtagaaattgtttcatattacccgctaaatataggtgggatctaccatattcccacataaaaaatgaaccaagcaataggttctcctcacctgtaaatgagtttaagtcattttttggttgagtgactaacttatttatgaaacgggccatttttaagttaacacgcctaaaccagaaataatatgataatgatatatttaaaaatatacactcttatatttaatgtaaattgtattaagtaagttaaataagacaaaaacatgttaaatgactcatgttaacggattgataagttaactaaatttaaccacgatcctttatataaacgaattaaacatgttaggtcatgtcaacctttttataaacagtttgaattttaatttttgacacaattaataaatagatcgggttggttcagattgggtttgagtttgacattttcttgtaatacctaagctatgacatgacacgaacagaaggatcactttaccatattgttaatagttcaggaatcttttaacaagttgaaaaatttaaaggacacaataatacatatatcatagtttgagaggtaaaaatcataaataatctattttcttcattaaaaagttatagtttaaaaataaatgtgattttatatatagaaaatccaatctatacactaaacacccctatcatccaatttcatttattgagtattttatgaacattcctagcaccaacactaaaataagtttatcactcacatatcaatgttcacctttataaaaataaaaatctctattagtatgaagacttttgggtagagtcgaaaataaaatatgtaaaaacttaagcctatatgatcaatatcatactataatacgtatcaaagaaaagcgagctcaatagtaaaaaacacacaatattagaggttgtttggctatattttcagtttttagttttcagaattttgtttttaaaattgagaatagaaagtagttttttgttattttaaaattttaatggtgtttggctcagattttt

SEQ ID NO: 301186 - DNA, 2037 bp, Cannabis indica
gagaccaacctcccacaaatcagaaccgcaaccaagacctcccatttccatagcttcaacttccacaagtttttctttctcaaatgtgggactgaaagcgtacaagccaatgccgcaatgttcaaaaccaaactagcccattgaaccagagttaaggcattaagattcgacctagtgaattcatcgggtatgtcctcatcaaaaaatgggtcatcttcttcctcctccccattagccttccccaaaataccagatttcacatgacccgacttcggtgccaacccggatttctgacccgacttaggaatctgcccagactttgaaacccgatccgatcgtctatcagggtcatcgggcgggtccaaaagcctggactttgtccttacccgtaacaaactagacccactttgaaatgaaatgtcgcgctgaaacgatgcgtttgatgtacacctcacaacctcttcctcatcatgatttggttgctcatgttgtcctcgactcccctcgtcgtccggcgactccttataccgtcgccgcatcgactcagtgccctgagatccatctatggcatccgtcgacatcgagggaggatcaaacgacaccttcaactcccttgactgccaaacattcatcggagactctgccaaaggcgacaaatcccgatcatggtggttactacgaagctcctccatctccaaatccatatctaatgacatgtcccctgaagctctctgcttatgtaaaaactgcccaatcaacttcgacggaggatcatccatcccctgctgatgttgctgcttattaccttgaacaaaattaaaactctgtctagtcccaccatcagtactctctccgccgccgtcctgcacacaacctccacctccaaccgggtctttccacacatcatagctagtttcccgccaatacttcccattcgcagcatttttagaagggtcaccgccaccggtggcagcggcggaatcaccaccttcgtcgatttttacaatgacctcactccggtcagtagtagaactctccttcatctggctcgtaatatgggggtgacgtcgatcttcgacaatgtctatgtcttgatgtgagagaataggcagttgttcgtgactggtttggatacctccacctgcggagattttcttcgtatgtttaatataagagccttgtgacttcaacgatttcttgagcgagaaatccatggagtttaacgtatatatacaatacacccctgtcacaataaaatatttaaattaaattttcaaattttcatttgatgaatcatcaacataaaaaaatagagagaacgtggtaagtgttgtttaagtttgattttaattgtaacagaggagaatagtttgacacgtgtagtcaacaaagtattaattaaagagtgaccattagagttagaacaccttagtacccaaagatcattttttttatcacctaatttattccactccatctaatttgagtttaatattaacggaaaactcatacgtatatagagaattgggcaaaaaggtcttaaggattttaaaactcatttcggcacctaccttaactaaaagagtcacatgctactgccagaaataccaaatccatgcataagtccttctcagcaaattatacactgcatcaaaactcacccatgcagactgcagaaccaataagcaattaatcataattgactacagtgaaatgaaaaggctatctattttttctttttttttaaaaaaaaaaaaccatccatcaattttttaataatcttaaataattataacatatataatttaaaaaaaatagacaataaaaatattctcagctaaaataaataggagatttattataataccctttaaaaaagtgtactgtggatttaccttataagatttaccaaaaaaattataatatgataataatataaagaaccgtacgtgacatttgagacccacgactccacgagagagagaaaaaaaatattcgagtcttttcccaaaatctatttgtatataacatagaaca

SEQ ID NO: 301187 - DNA, 6110 bp, Cannabis indica
tttttttaaaaaaaaaacacattttatttgaatttagtgttgtgtcatctcattagatcttcaaacgataatttaaaaataagtccaatttacgttaaattttgaataaataataactagtaaatacaacagaagcatatgcatatatttattctagactgactaaatgtcgttttcataaataaataccaaatattttcactagaatgattccacaaatccgagacgttttgagtgtcatggtatttgatttcagaaatctcttaacaccatttagtccaaaacagtaagtaaacatatcccaacatatactgtacagaggattcattataacttatagataccagaacagaacagaacagaatcagataataataactaaagcctatttggacattgttaatctggaaactggagcgtgttcaactaccagaccagactttcacttcatttccaaaaagaagcaaacatgtcaggggcctgtacataagaattagaaagaaacctttgaaactctaaaaagggtctttcagtttcaaatatcaccattcatctaatctatatccaggcttaaaatgtcatctccagcagcagtgaactccataaggataccgtgcaactgaaaaaacaaatttaagcaataccgctgctgttccattcattcacatcgtgctcgttttgttggtggaacatcagagttttccttgcaggtttcggtttcatcatatgccttttccttctcacttggatctatgaaacttacatccggattagacttagcattactcgagctgattcctttttcgaggagatccacttctgaaattttggatttgttattctctgacgagtgaggtgctgtatttgataacgaattcttgttgtcatgggaggttgacgaagaagccttgtacttggtttccatctttttatgctgatcaaacatcttttcaaggtacttcccttgttcttcaatttgcaactgcaactttctttgatgctgcatttatgaagtaaacattacactaattagtaacaaagtacacattacaagtacttgtcagttgagaactttgatgaatggcaattcaaggaaatgaagagaacaaaacttaggcactcaattaatgctactaaatggtaaatcaacagtaatttcatgtttgatgttatatactgtgtttgcctaatccacactgttagatgtaacatgcttctactgaaaatacaagaaaacaaagctgcataaccaaatatacctcaagttgttcgtggaggcgcttctgaagttccacctgcaacctcaaagcttcagtgatccccatactcctgcacaggggaaaaattttcaaattgtgagcctgaggagatttctatgctttacttctccgagaaaggacaacaataatattataacattaaatacatgagtattctgtcagggtaaatgaaaaatacacacgtgtttaactcttgagatctcacgtcttcagcggttggtgattttttcccagtgatccctgaaaataaacaaaatacaggtaaaatactttcaacttatcaatcaattatcaattatgaatacatatatgtagagaagttagaatgaaatttcatagtaaataagcaaaggtttgtactgaaatctttcaaaatactagtcattgacaagaaaagctgcataggcaaagcaggtcaaacattcaaaagattaaccatgaaaacacatgcataaatgtttagaaatgtgaaagtcgataggcctcagtggtacaggagataatgagagaggaaaaacaagggtcattgattaccttctgacagttctggcttgtatctggctgttctatatttctataaaataccaaaaagaaataattagaaaacaataaaactggcaaggaacttggcagaagaagaagcaaggatttaacatacctgcaggtggctttttacatgataaatagtcaatcctggaactttcatcagatttaagataccttttggagtagctcctgtatgcatttcaataattttaagtaaatatggaaaggaatgttctgttttgagtcctaatcacatgtaaattgcaataacagaatcaagtggtttacgcactttcattgccaccaagtgtgttgacagcttcgacaaaggcctcgtgaagctcttgtgtccaacgcattctggatttcgttgaggatgcattacacaatggatcaggagtagtagcatgctctccacattgcagtgaaggctgttgataattttggatctgctgcaccgaggcatcaactgattgtatacacaccttcaggtataagaaaagaaaaagtcaaacaagtttcctttttgttgaaatccctacgaaataaacatgtacagaggcctttttttagctaagagcaagaatcaaagtgatcttaggtcctcttaaatattagaaacacaaaacacctattttaaaagttaactactgttaatttgaaaatgcaagagacatttcaaaggcgtcaagcaacaatgaggtatcctagaatttcaactgtgctttaaaaagaacatatgctttaacaagtgggcttccttacatgtctataaaactccagcaaattcagcaaaacaatattaagttgaagtacacacctctggtttggaatctgttctattacgactaataggaaggtcaggccataattgatccagatcatcactgatggaaatcatctgccaatctggccaatcattcttttgattatggtcctgagatcttgcagcaacagtactagattcaacctgatcattcgggacagagaccattccaggaaaatcaagtaaatcatgaattgaattcggacaccaggcaatatcattattttctgtaatgtgatcaataaatgttgtagattgcccttctgaaaggggagaatggattggtggcattccaccacttgactgaggaacaagagaatggagggaatgtctttcatgtggggaaactgaagatataggatcttgaacatcgcttggtaacctggagggtgatgaaaagaatcgctcattagacccagcactggaacttaacgaaggaccctgtcttatggaggaattcatcatgatttttctttgtgaagaaacctggtaagtatctggcagcttggtatacttgtcttcaataggggtagagccaacagggaaagataaagacataatttgagatgccccaaggtagctcagctcttttgcatctgacccttgaacaaataaagtaggacatgttaaccatcacaggcatatcaagagtggtaaccagtaaccagtaaccagtttcagcatcttaaataagatgtagcaaaaaaaacaatcattacatgggatattgtattaattagctctgatcatagaggaataaccccaaaaaaacaataatgatatttttttttcagaataccaaataatttaattgagtccctaataaatattaaagggattaaagtggaatcagaagcccacacttgaaataatagtgacagtaccaagaaaacacaaaaaagtaaacagtatggcaaccaacagacaatccaagttgagcatggcatatttcttttagctttatactattcaccaatctatgtatatatttgatatatcaaagaaaacaaagcatagctataaaaaggaaatgagagaagtaactttcatagtattatcattatgtgtacttgttgattttttttcttcttttcataataaaaaaaatctggttgttaagcaatcacgcatctcctttttatttctctctgaccaatatgaagttgaatttaatcatattaatgacaaaaacagactaaaagtttactctcctaagaacatctaagaaacaagtgtcttcaatatcatacaccattatagggaattcaaccacaacccaacaaattctcacccctaccccttttaagaagaacagtaaactagccaaagcagtttccagtagcataaaattgatgcaataaacaattacctaaaagcgtcaacagtatcaaaccaaaagtcatataaaatttgatgaatatatactaggagaacacaatcaatcataagtcccaatcataggatgattagggtcctcatcttaagcttaattatgcatgaaacaatacaaaaagacaaagccatagagcatgagcttgaattaagcttttagacaatccaaatcacagtacaacggatatggcccctactcacgatcccaaaaagagtcatcattaaattcagctacagcaaataaataaatatgtattatatttttttctttaaaaaaaccccaaatagcaaaagagcaaatggactttgttcaattagaaaaggagcaaaagaggctcgcaaaccacaaatttatcaaaaccaattaagattacaacaaaatcccaaaatctcaacaaataaacaacaaaaatcatgcatccagtcaaaaaaaaagtaggacatgcagagacaaagattgaagaaacgcaaactgggtattaaagaatcttacagaagaattggaaaccccaaaaattgaatccaaagaaaatcgatttgattccaaaagtagccaatattggagggaaaaaaaaagttaaaaggcggtgttggaaaacctgaaatgatgggctgctattgcttcacttgccttgccttcctgactaggaactcacaaaaacgccgtgctttgtcctaatagaggaagaagaaagagaaaatggtgtccaacatagcctatattgcttaaatttatattccattgagtgaatgtgtcaggctgaactaggaaacaagtcctggactttaggccgtctgattgaagctcatggcgttttgtttaatgggcaacgaacggtgttgacttgcccgaatttattcataaaatatttgagctccattagtgacggccatacatacatattacataccaagctagctttatggtccctttttgcttctttgttttctccttttggtgggtcatgttttgtacggtaatatctacacaactttccataacaccaaaaaaagattaaaaagaaaaaaaacagtaattagatttggtcagttacttcttggaaagtagaaaccaaaataatagcgctattatatcatcgtatcatcattattgacattgttattcttccatttttttttaacatattattcttccattaaatatcaaatatgacaacatattttcctcgtgggaaattttccatctctttgttagtaaattatactaataatttttatctctttctactaaattttactcttcttggcgtggtattcaagcatattatatttatgtacttctcacagaaaaaaaaaaaaaacatattatatttactaatatttttcttcttcattttagattcattttaatttctaggcaagtggtgtgttattgactttttgagtttattttatttttgttaagataattcattgttccttaataaatatctaataaaatatccttagaaaaaaaaaatctaataaaataaataagacttttgtgactgagcataaaatctaaaaaaatcgaaaaaaatcgttcaaaccgacctaccgaacattgttggaatcgaaactgacggaatggaaaaccaaaaaaaccactaacggttaaaaccgtcattgaacggtcgattttttttggtaataaaccgatcgaaaaaattaaaaccgaccgttatacatatatattaatttattaaaattttttttgctttatatattgtagttactaataatatataatatattattatttcattaatattaaagttaaaagaataagataattagtttatgaacaattaatttgtatatttgtagttataaaatgtagaataatgtgtttatagaataaattggatcatattttttttttaaaaaaaaagtttagtttgggcggtttaaaccgaccaactcgtggttcaaaacggtcggttttaagataaattctgaattggtcggtcggttttcaaattgcaccaatccagaccgaaaactgaattcttgatttttttatattaaaaaaaaaatcgactaaaccgaccgatgctcagccctac

SEQ ID NO: 301188 - DNA, 1768 bp, Cannabis indica
aaaaaaacgaaaaaaaaagaacttgttaatttgttagtttatgtaccagatgatattttgatcctctaatatatgcactattgtttttctttttgtatatacacttgttctatcctatcgtttctttcttaactatgatttgtgtgcacaacaaattaaagaatactactatgcctatcaacaccatatgatatggtgtctaagactaggacactgattgtggggcttatccgttcacgggtcgatgtttgatacccatgtgtgtgggctgtttttcgggtacaactttccccttttcttgggcgtctccttcgcttcagtcaccaccagtttgatattcgggaggtgctcatattgggcaaacttcgaaaggtgctaatattaggtagagttgggttttagggttgtgctttcgggtgtcaatgagttggttgtggcagttgaccgctttgatgttggtgttggggtcagatgcctcccctcctagaggtgttggtggtggtggtggctattgttacgacgggaggttggtgttgggttgtggctttgcatgtcggggatttctttcatccccgatcatggtcaatggtatccatttggatccactagcatttgtgaatttggggtaggatggaggtttactccgactagttttttttttgtttagatggtgtcttctttttgctaagtctaatttaaatttatcacctttgttccttggacgttggctttaggacgtttattataattgacttggtttgattattatttgaccttttttttttgtgagatttgtacaattttgtttttgcctaacattttggtcttcatctaatcaaattgtttttcttaatacactttaatatcttgttttatatattttatataaaatttaaatatataagaaatagtattaaattagatcaggactagcccttggctaaggcaggctaggttcgtgcccgaatccattcattttaagagcttaaataacaaaaatgtcttttcaaaagtatatatattttgttaataatttttaaaaatactttttatttttaccataagagtctattttttttctaaagcctatttaaccttaaggttgatcttggattagatcaatcatttaacactaaaaatttagaaaaaatatatcatttactattattatctatatcattttatgaggtgtctttattatataggtgatatattaggagacaataagattttaattcacctatttgtaatatggttgaggagcatgtgtgtaggttaggtaggcacttgctcttctctttattttggattggactattggagtcacttttgcaatttcagcaaacataattttcttttatttccttttacacaacatatttgtaattaaattctattttaaactataatgtgaaatgcctttacaattatttaacccatcatctactattttcactttttaaaaaatatatttgattttttttaagcaatataaattcctagattttaaaaaggggaaaatacataatacattactttataaataattattacaatatatacaacttatttatactttttacataatttactatacaatttataagtaatgcattatgtaatttttttcttttattataaatgagtcttgtgtttggtgattaagtctctctataaatttaaactggattgtgatgttagagttaggataagaaatatgtatattgcagtggtagcaaggaaccatcttggtgaggtggtttgggtt

SEQ ID NO: 301189 - DNA, 5425 bp, Cannabis indica
ctccaagattccttaatagccaaccaatagcaatctaaacaatcatctcagccactaaggacttagacaatccaaaatcctaatcaattatactattgagactagtatgaaggtgtaacaagttattatgaactttcaacctgtttagttcagataaaagatgacaaaacaaaactatgatcgaatttttcgagtagttgaatttcgatctaagtcatgtttgttggttcaaaatagcataaataataagcagaatttggacttggattttactggccagatattttatcagaagctttatggtaggtacaaagagtagtagtagaacacagtgttattccacttgaagtaaataggattaggtgatgatttttggtttgttcatgaaaaagtgagcttgatgaatgtgacaaggtttaccaaagataatgacctccataataatattaaaacttcaagtattttcttctgctctgatgtaaaacacatggttgaagaacaatatcagtttctttcttcagtttaccatttgaaataaaataatgagtttatacaattttgaatctctttgtttatttaataccagtttggaaactccatttcaaataatttcaaacaaaaccctttagaggcgtttggttggaggtaatgaaatggaatggaatgaaaagaaaacaattttaatttcattcctttgtttggttgcattttaaagtattggaatgacttttccatcattttggtagaatgactattctattttaaaattgaagaaataactattcaattttttttccatgtattttaagtttgattcctatttctattccaaaccattccaaaccaaatgtgacttttgtttttgactcccatgaattcaatttgcaataggagacttgcaatggaaatccagactatttatgagttcattgttgaccaaatttgtaaaacaaaaggcaatgtttgtaatattttgtaatcaaggatccaaaacaatattactaaaaataataaatagcttttgggcccatatctattttgtccctgaactttggtccaaaaaaattatgccttctgaattattacgagacgtttgttaaataattaacaattttactcctcgaactatgatcactatcatattttgctccccaaatttctatcactgacatactgtgtccttttaatttaacagaagtttggaggaaaatacatgatagtagtcatgctttaaaattacagtgttccaaagtaagaaatatttaacatcgctaataatttagggggcatgatcttattaataacaaagtttaggaaacaaataccaatttattcaaaaaaaaaatccaaaatggtataaacctttaaatattttgagaaatagtataagcaataacactaacctagagggttttagttgacaagtgtgcctagacagatttatttagtagtaagtgggtgtttccattccattccaaagtggctggtggtcacaatcaattgacttgcatggtgaaaacaattgttttgtagctaatctatcaggaatagttattacatcttaataatttcctcatttaaatgatattaaaatatattttatatctcttgattattctaaagaatttgtgaactaattaataatgaagaattaaactttcttcagttgcctttagcattaaggaaactaaaattttctttcatttatcaaacttggccatcccttcttgatgattggtcaacaaatataaatgttactcttgaaattgaaattttctaatgtgagattttcaaaatatgcagagttgaagcatcttaatgacatttctgcaacttggttctgaaatcaacaaagagtttatgtgctattacaatgctctcaaagtcattgtagtgatcaaagttttgacttttagttgatgaattagtatagtgttacaagtagctaaatgcactttgttaatgctagaaacatattacacaccacatgaaaaattggattggagaaaagagaaaaagagagaacaccaagaacatcaatcaaacaaactgtattatttacttgttacaggtaatatgaaaattattgtgtatgcaaaatctgatttacaatcaaacaaggaaaaattaaactctcaaacagcaaggtatacttattacttacaatcaatatatatctgaaaattttgaaacaaagaatagataagaaagcaagcctaatacagtactctaaaattacactctcttatgatgtgcagctacttatatgaacaactatgcaagctttttatttttcttttcgttttttgttttcgaaactaggctccccgcctaaccttacaagaaaaaccttcatttttttccctcactaatggtatacttagtgttagtgagctgtaagatcaattttggaataaaatccagttagaaaaggaaatccaattagagatttttttggatattcaccagggggatctcaatgaacataccacagcctgtctgaaactggtgaagcctagatcttttcaacatctcccgaaatggtaccattcaattgaatttattgatcaaagccaaaagtgtagcagtgcctgccaagaaagattgctagtatcagttgaatcacaaacaagatgaacataaaaggacatgtgaaaattcagcaaggatagcaagtgtgctacctcatctcatgtctgtttcttcttgtgtataaagataaagaaagtgaaaaggacatctctaaaaggaaaagatcaagaaagacatacctcttttagacaatgtacgcgatcattatcttgctttccagttttgttttctaagggttgttcttgttcatcatgtactggagttttatcttttctccaactgcagatttcagcttgtaaggtgttgattttttcatgtatttccctcaataactttctctcttcttcacctgcagaagtaatttcttgacttgcactattctctccctcaatccggtctacccttctacacaactgttgaaacttggcctgagattcagaaacaccaattgttggatgaaccatagtcacattgcatttaatactcatttcatcatttggtatagacaagtttctcccatcttttgagcagtgcagcatcgtctttacacagtctttttcatcttgaacacaaaagttactggtttcctctgacataaaatccagcttcccaagcttaatctcagcttcttcaatcaacttgctctgtgctttgttttgttgttcacgaatattatgatcctctttaagtttcggaacttcataaatatcttgaacactcgacgactcttctcgtccattatcagcacggtttacttgatccaaactgttaacagtttctaacctcgaaaaatcaactgatgtgctgctgatggttactggtggaggcaatgaacaagatctagaaccactctttgattttgtagctttctctctactagaatctctaccatttgaaatctctcttacttgttcatctaacatctttatctgttgccagaaagaactaaaggatccacctgaagaatccacggatttttcttgttctaaaccgtttttcttgctgtggaaatcctttatgggaattggaggcaaagagctaaacctcttaacattaccaccaccaccaacaacacaagaatctcctttccatagatcacttccttgtatcaataaattctcaggaaacttgctttcaacagcaaccatatcactgaatcccaagctcaaaagcctgcacttataagcctgaacttggaattcaagtgaagcaatttccatctccttggaataattagatcctcgaaaatcgcaagagactcctcagcatgataaatcttttcctctgccaatctcttgtactgatttgcttccatcttcacagcagctttctctccttgcaaacgtagtatcatggataaagcttcactagctgcactagctgaagcttccctttcctggtccaactctgcataaagcttttgcagaagctgttgctgaagttggagtgtgtctttcagaactattatatcagtttcagacatcccagaaattgtactctcttcagccatacacatatatctttggtattataaacaatcaacttctgattctgctgggtaccatagaatagaaatttatctcagcaagaatcaaaaaattccagaatcatatcatgacccatttcagaaatcaagtctaagatctcaagagagagatatatgaactcagtttggactaacataacaatatgaactcaaagaaaaaacccagaaatttcccataaattccattttaaaaaggttaaatcttttaacagtgattcaagcataaagacaaatatcttatgagcaaaatgtagacaaaagaaaacagaaaggaaagaccattgtacctgaaaagcttgagcaaacccaattgagataatttccactgagaaaacaaatttcagcaccaaaacaatatttcagaagtaaactccaaaaaaataaatactgaaaaatcagagctttaaaactttgaaacgaagaaaactaaaaagaagaacttttttttttcttattatgtatattgattaatgagcaaataagaatcccagaaaacgtacaaacaatatagaggtcttaagtaatcattaaaaggaaaccgaatttttctaatagggaaattaaatgagaataaatcctaagcttagtaataatttaagaaagaaacccaagaaaattgaataaataaataattaaagaaaggccatgattacaaattccctgtaccttataagatttttgggattgttaccttaaagagaatccaagtaaacatgaaaaaccacagtgtacccacaaacagacaaggctttctttcctgtaataaacgttgtttttgctttccttacacagcaaagttggtactcaaacattttcaattcgtctcataatttcattccacaaagaaaaaagaataataataactataaactgaaatagttggtgtgaagaaaaaaaacacgcacaggttttaatatagtaaaacggataaaaatgaaccaaaacgcggtcgttttgccttgtcaataatgactgtaataaattttgtcctaaactcatttaatatgtaaatttttattcttatttattaaattatgcctttaaatttttaagactataaaaaaaaatttatgaattattgagatggttgaatttaagaacttaagtctaacatgaatcaaaatttaaaagagatgatttggtacatattaaaatttgaggggcataattttgtaaatatcaaaatttacagagcataatttagtatatagacaatcaccaaattagtaaaattgaatgaaattatacaagaatttcaacaatctcaatagtttaagaaaaaatttt

SEQ ID NO: 301190 - DNA, 3004 bp, Cannabis indica
ttaaagtattagaatatcattctaatgaattgatttttccatcattttgatggaatgactattccattttcaaatagaaagaaagactacttcaatgcatgatgagaaaaaaattaataataattttttatgtattttaaatttgattccattcctattcccattcccattcctatttttatttctatttctatgttttcattccttccaaccaaacaccaccttagagtaacttaaattaaagtctacagagatcacttgctagatatggttatgagcttggtacaactacaacataagcatactactgcaataaaagagggcattttctgagcatagggacttcgtttgggtaataagatcaaaataggtcaagataatgctaacactaggaaacatctctcgcatcttgtggcggcaccacatgtctataaactaccaaggcaattcacagcttctaccaagcaggataatgcatcactaaccagaatcttctaacaatgttactcgggccttgataggttagggggaggaagggtatctgataaaggatccagtgtgataattttgtgaatttgggagagcctagctttattaggagagatcaagcctctcaaaagcttggaaccttatattcatcaatgtttttccagaaatttgtctttgatagagaagaaatctatgtcagaaactagaaaaataatgacaaacacgacactcaaattcatgagaaggaacagacgaaaaagataatatataagggaacagacccaagaaaactaaaccctctaacaaggaaatgaaaaagccactgacaaggaaatttccaccctcctaagcccttgagagagtaaaaaaaatcgtctttcacatatttaataagaagaaatatatatcatgagtcaggatttattaaataacatgaaaaggaaaaataaacgaaatggaggacgaaagctccaagatactagagaagggctaaggattaaggatggccttgcatatccaacaactcatttagacctttcagtctttctaatccttcactcatcaaaaaacgaattcgttgcttgtcattgcaattcttgttattctccatctcctgcctaattgtcctccttaattccccttgagcatgaggaggtgctcttcgagcagttcttaatgctttcctgtagagcttaaatattcgagctcgtaatatgaaatcctgcaaactcaacgaaaccaccatacctcccttcctaaccctaaattacaagtaaatggtagtataattatcctctttcacatatttaatgttcttcatttcaagaaagggctcaaatggaacccttcaaatcaactaagcaaatgaccaaaggaacattcatgatcatagcaagaaaataattatcacctataagcatgcactgtcatcacttcatataaacagcaggaaataaacctaaagacaactaaaaggtgcatacaattacgagaaagaataaataaatatggccacaattttagattagaaagaatgagattctaccgttgaattccttctccaacttccattttgaaaaagctcccaatcttgacaagagatccaacttcttgtgatagattatctaataccgtctacagagaatatatttaaagcattagtaatcatttgcaaaatatagtttcatatccaaaaatccataatgcatgaatgtgctctcctacatcgacttgtgcattatgtagcaacatgccgcaattcatatataacaaagcagtctggctactcaagatgcaatctaacaatgtcatgatataaaacacgtgcgcagcttcttggaagatgcaagagcattaaatttgatttaaaaacagttatgggaaaccaaacaaaccatctttataaagaaaccttgatcaaataatcaggaaacattcattccaaggaaaagctactgataaaattaagaaatgctaaagaacaccctagggtgtccaacaccctatacatgcaaattaatattgggtcccacatattcaactttcattaattttaagttgaaacacatgagatctgctactgaattgcagctagagcgaaatgccatctttagggtgttgagcaccctaggttgctttatagcaatgctcgataaaattgggttccctacaagattcaatcttcactttaaaaagttggtcacattgatccaatgataacttggcaatcataaatcacaaatctagttcttatttttttttttttttgttggagaatagagtgaaaataatgattctttactgaatttattagttcatttccgagtttgtcacaaaattctacatgagacactagtaatactactattatgataccttcacgtttagatcattcataataaacttctgctccataagcacaacgtcctcataatatttgcgcaatcgaccttctaccatcttttctattgccatctgagacttcccagaactttcagcctaaaatagaaacaaaatacgttataaagatataaatgtaggcaaagctaaaatgaataaatccagattatatttgtgtcaggatgccatggaattttaattatagccatatatgatttattgaaagcccaagtaaaatgttatttatatcaactttcccctatataagaaaagggtgaaaatagtgataagttcaacatgaaacaatcagcaaagggttaagagcaaggacaatgatgatagttccgaatacagaacagttggtatattataacatgaattagtttcaatttaaagatattcgagtttgaatcagaactttctaactattgctttatgcttccaatttggctagtttctataagcaatcgcctgtttccttactttatgaattgaaaatgttttattcatttgtttgttagactcagaaattgattaatcacaagatttataacataggaattggacctaagtgaggaacaccactcctgtggttgtgattgatactaaccaggtc

SEQ ID NO: 301191 - DNA, 5863 bp, Cannabis indica
aaccggtttcttcatcaagaaatcagtttcttcatcaagggataatctagaaacggtagatgaagaggcattcagagacattcgaaaagcaatcctacatagcatccctttaacataggatcccaccaaatcaaggactttttccccacgtcagacttgaggagtatgcgcaccaccaaaaggaaactaattttttatccagtatcatattctctaacattcattgtactaacacggcgacgcacaacacctgtcaccaccaaacagtccctatatgtatagatgatagttatctcgtaaatcgggctttacctaaccggccaaagccaatacaaattgtattttacccccaagagtgcgcctagttaacacatttaaaccctaatgggtctggcttcacccataaccaactcaagcctataaatagaatattatcccttcatacaaagggttggaaaatcatttctcaaatcaagtgctaaggattaggtttcttgaacttaggcaagaacactcttgtgtaaaagtacttcaaggcttttctagctcaataatattgactcgtggactagggttcattaacgtcccaaccacgtacaaattcttgtttctttgtctttaatttattcttctttaagtgtaatctatttattaattggtttttgaaaatctcgttaaaaattttagtactttcattgagagcttgaagaaattttaaccatattttattctataacagtagttgcaactccaaacacggtaagtagactgcctgttcgtgatggttgagataatgttgccatggatgacgtgaacccacccccttcggtgaacgctcaggcaggcgccgcaagggatggagaagcgttgaaagtggataattgcctaatccataaaggccaaaatcaagaagaatacatcaatgatgatctcattgatgaagatgaatgataaaaccgagacggccggggatcccgaaaataactacagcaaaaattataacaaggaatatgaagagttttaagaacaagactttgaagtaatacgactacaacaagaacttgtagatacccaaaaatgtttagcagagcaataagaggtttcaagacaaatgcaagaagctcttgtacagtaaaagttgctctaacaaaactcacggactgtttggcccaaaaataaagtggagtcgtatctaattcagaagatgagaattcggagccatgtgtaagaataattataaaggctcagttgccagaaaatatcataatgccacaaatggaatcgtacgagggcatgacgggccccaagacacacctatccaagtacaacaggttgatgcaggtagaataagtaaatgatgattggaagtgtttgtgcttcactttaactttttccatgtccgcgaaggattggtggaagagtttgtcatccgaatctatccaaaattggaaggatctatagtccgtgttccggaagcaatttgtggctgctaaagattttttcatggaggtcacttcattgaccaacatcaagcagcaacttggagagagcctgaagaactacgtccaacagatgatggaagcagctgcaaagaccaaagttaatgacaacatgaaattagtggccctacagttagctattggatccctactttggtcagaattacgaagaaagagatttgacacttttttgatttcttaaccagggctcaaggtttcattaatttggaagatgcttacacacaagattttagagtagctccgacactctcagctaacgtcattaattcagcttctgcactacagcttctaactccatcgattatgccacccgggacccaatacaaaccccctaccctctacagaccaactgcctcagggtatgctcccacatagacgaatttttatgatttaggagtagcacaaaccggatgtagtgtcactcccaaacaaacacaaatgaatcaaaaaatggaagttccaaaattaggcgtaagctagttgggaattaagagaagtgaaaagattcaaagctggagcgaagctctgaaaaaaggatggaaaggatataaagcccaatatacagagtataccaacttgatcgacgctcatgagaatatttatagggctacttgcaatttagttcattacaggaagcctcctctaatatgcaagggtgcaagcataggagagatcatagaaagaaatgcgagtaacatggtgatattgggtatactaccaatgagtataattgcttaaaagatgagattgaaaatctcataaaatatggacgtctccatgaataggcaataatcccaaacatttatccatgacaaagggcagcccgaggatagttggttattctcagacagcatggggccataccctcttcagggagcagtttaccaacaaactctgggaatacaggccccttaggggctcccaaacctccaggcacctagaaatgtatgagctcccggactagggaacccctaccctctaggtgtctctccacctccaggctcacatattgctgaaagcaccataaatgcccaaaagaggcatcttaatgaacttgagaaagaagggaaaatgtgtgctctggttcagacccccaaaacaaaggtcgtagatgttgaatctgccatcactttcatggaagaacccgagagaaagcctctgaccaaactagagtctcacgaccatcggaggaatcacaagtgccagcaatgacggtggcgaaaaggctcggagtctcacaaaactcaaaggaaatggaaagtgacttcaaaatcgctcgagtacctaaatattctaactgtagttatatgttttttcgttacttccatagacgtgttttataccacactaacaccagtattattgaatatgaaatatgaaattctaaccaatggaacagattatccaactgtagtgtctcatcttctttacaaaagtgaaattgttagtgtctcatcttcttcacaaaagtgaaattgtaacctatgaaatagataatccaatattttttgttacttctattgccagtattattcaaagtgaaatggttagccaatagagatgttcccacatgtacctttatttttctaatatatcctaccatattatttttaaatccattttttcacaggttaaattatttttcttatatgattatttagttggaattttttattataataataattttaaaaatgtacttgtaattgcaacttgaatgtagaaatgggaattgaatacatttaaaataaaatgtattgcataataagatttgagatttaatagactgcaatgcaactagtgctgaaaaaggctcttaaagctaataataatgagccccaattaggtaacataaagggccatcaaaatcacaaatcgtatccacaaccacagctactactctactacaaacaaacataattattactttttaaagcaaaatccttccttataatactgttgttcagtaatgcacattcattcattcactatactcttattaatttaactctacacctccacaattaactatgcacaactttattagcacaaaagttatccacaagttattttaacaaaaaaaattttgtttggataagcacgctcccaatttgtacattcaaattatgataaatgtaattaattcctacttaatattacactaatttgagtgtgcaaattaaaagcatgtctatcattaattatttaactaacatcccaacttacaaattttgtacaaataacattgtaattttctccaaaaataataattttaaaagttgaattaaataaagtaattttcttatttatagccactatgaaaatgatcacaatataattgctatcatgagcttattgtcaatacttgtaccataaaagtcccttgaggcttgagttgtttccattttagcaatttagtctcgaaacaaataatcaattaaactctcaaggtttttttagtataccgtataagtatcgtattgtattaaataataaataatactatatttaaataaagcaatatattattaattattacgaccaacatattgtattatttaatatataataaatagttcacattagcttgtattataatatttacaaaagattcggagtcaatctcaatttctgacccggtcctagaccaagaccgagacccgatactcgaacccaggaccctgaacttgagacccgaacctagacccgtgacccaactcatagttgatgtagggatggagtgtattgaaatatatataactttacacaatttattaattataaatcaatactaaatatagtttgtattaaataacactaataatacaatataatacatcgtactaaacgagtttaaataacataacccatgtaagtctatttgttaagaaattaaaaattaaaggatatacaaaaactgttgtttcaaagttatcattgccgtccttaacaaaaaaaaaggttatcattgccttagtacaattttaaatcttttcttcttctttttttttttttttactgagatagagtatagtaacttgattttatgttctgaaaaattaaataaaaaaataattttatttacttatatttttcaaataaggcaagcgagccacgtagacctgtttcatttttgtcgaaaatgatttgaccaatcaaattgccattcctctatttatcaccaattattagtactaattttaaaataataaaaaaaaaaataggtgtgcatataagattatacactagattcgtcagaacccacaacactgtacatacacaacatacaacaaagagtcacgagacagctctaataaaataaaactaaaacaaaaacaaaaaaagaacagagaatcttaagcaacaaaagtcttcttcccatgaaataaacacatacaaacacataatggatacaaataaaaaacaagatcaaaacaacacaactgccaaatacatatcactactcaacacccaagaacaagaagaatactaccacaacaacaacacccctcccaaccccacattttcacacccccaattatttgcacacatacaaaaaactgacacgtccataaataccatttcagcacaaaaacaaatacaaacttccttcccttcccttctcccacacactcagacaaaaaagtcttcttcactacacagtcacaggttcacaggttcacaagttcaacagtcttcttcttcttcttcaacttcaagtgaagccaaaccaacccaaccacactataagttacagtgcacctgcaaatgactttttaaccccccttcccaccacacgtgtaaaaagtacaaaacaaactagactttattacattactgttattattattataataataataatcagagatagagagagagaggagtggaccccacaagattcatcatcaaaaactcaccgtccaaactccaaaggttccttctttcaatcccacaacaccagaaactttctgaatacttttaaagatctttttctttttttttttttcttttttttctaccaacattacaggcgtggagaggtgaagagagaggacaaggacataaaatcaaatggggaaaagaaaaggaaaaggaaagaagtgaaagtggggccaagagttacctaacgcgcatgcacttcatccataggggttctcaacaattaagagagaagaaaaggtaagccttattttacagcacaccagcccaccactactactaccattcccatgcgtttaaacctttgtgtgacttttttgattatctttaatacccccaaaagctaaaagataatcatttctggtcaacaagccaaaaaaaataaacccacttttttttaa

SEQ ID NO: 301192 - DNA, 2057 bp, Cannabis indica
gaaaaatacttatgtttctttatagatattgaataatacggattacattgaaatagagttttatttagggcataaaacccaatattaacgtcacaaagtgtggacagttttgagcttggagttgggcccatatctcttgtggatcccatcttccacttagaacttaattcacatagttttgcgttaaagttggaattgctcccttccagctcctatcggtggcatacaagctgcttgcaggatagtttacattctgtaggtcctgcgaaaatttttttctagccctagaagtaatattatacttttatgagttaaaatctcaacctatgcaaggacatcccactaagattgggttttatcgcctccgtaaataaaatatgtttgatgtcccacaagcacttcctctcatagccaagactaccgtgaatactggtttttcccaactagcttccccaggcgagttccaacactctccttggacttcaaacatctaggtatcatcttttactcccttgtacttttagtgctttgatggtttgtaagttggttccgtctcaataccttattatgattcatttgttgccttccttccttgcagaatctactcccagaacaaagcttacggaggaattgagacaaggaattacttttttataagcctctttctaagggagatttaagagttaaggagttgattaccacccagttgttacgccactacggtcttgttgctaccttctagagtattcacagagttaatggcaggggaaaacctcagactcccaacgatcttaaagagcaaacgagtttagagcttccagtggcaataaccaaggcagccaaggatgaggaacttcttgcagctgcttgagacagtcatcatctcgaacccctcactgaagaaggagagatccaggccaagttcagagctacataccagtaagcaagtacttctagagctagcacttcggaaagagttaatcaacctttctacgtaattggcacccccaaccattttcagatgccactggtagaccaagggggttttgatcattctttcttaagtttgaacccttgtagatatccaatgaaggattacattagtagggtagaccaattagttaagcaccacaacaatcgagaatatccccccaacattgttaaagtgggtctttcccttactatgttcttcttggactttagggaacatgacagcttcatcaactgggaagaaataaacttatttgcaaaaggggaaccctatagttacacattctaagattgcactcacatgctatccttttactttttgaaaactgtgcaatttaggctgttactttctaccttttaactgatgagctttcttgtggtgttacaattcttccaaatacacttcagtccaagatgctcaacaatcttataaacactatcaagaaggttaatgttacggccgatagaaagggtaaatagaagaaatcccaaaccaagaaattcaaataaatattgcatcctctggcacccccactaaagattaaagattccaccaaacctcgaacgacccctggaggggagagcagtggagttgtgaaaacattggctctgccaaatgttgatcccaacaatagggaacccattctcccgtctaacaaaaagtattctggagaaggacttgtgttcccgaggttgaatgcttcgctgaagcattccaacactgctcctcatccttgaagagaagaaaagagggctaaacattctgtaccagaatactctaaatccatgagagtgggaagccttcttgctgtcaatcagcaatcgcctctttcgacccaaccaccatgcaacaacactgacaggcaactggtccttgtgacctccaacactttaaccaaaatccaattcaaacaaccacataatcaatccaaaacaatactgcagcgtcaggtagccaatccatttttgccctaacttctttaagccatccatccaagtgctagcccaagatatgtttccaagagggggtgaattggaaatttaaactaatttcggtaaattaaaac

SEQ ID NO: 301193 - DNA, 2946 bp, Cannabis indica
ctccaactcatcggcatatctctcaaactttcagcaagttttcaaggaagataatgctactggtttagcaccaacagtagctaaaagagtgccatggaaaacgctccccctcttggacaaattaaaactgaatgtggatgcaactataaaatccttcatcgaaccatattggattaggagacatcctacgcgattcttcgggacatgagatagctgctacttctatgaaaataccaggcaactttcggccacaggatatggaagcaaaggctttaattcatggtctacaatgggcaagacggttgaatatccaattagaccttgtggaaactgactgtttaattcttgtccaagctcttcatggtttaacatcaagctgttattcgtttcacaatctcattcttgatgttaaaaatctatcatcctattaccctaatgtttgtgtatttcatgtacgtagagatgcaaaccaagctgctcatagcttggctaaacaaactttaactttggataatgattgtaattggttaggtgaaatccccttccatttatttctttttttttttgtttaagtccctgccatttattctgttattgtaactgacactttatctatctaataaaagattttcctcaaaaaaaaaagtaaagtttattttatcataaaattcttaattaccataaatatattttgggagagcttttaaaaataaaaaattattaaaatatgattcatttaataaattttgggagtggaaatacaactcctatcttagcaaaccaaaattaccataatgagctttcccaaactaccggcacaacaattccttctttctcaaagtcacgattctgtgcacctatcaatactaaatctctgccacagccaccggaaccgcctctgctacaaccatcggaaccacaacaccgccaccgcctctgccaaaaacacaaccgctacggctccgccattttttgtacgtattcttctatttccctctttcaatttgtattgctttctccttttaactctagtatgtattttgtggtattccatcccccaatatctttttcaacagcgtgtgtggtgtgtctgttatgtcttggattttatgtatgtaaatacacctaaattgaaatgccccttctaactgtttgttgaaataattcatacaaatcaaagatattgtaattcaagttcttattataattttatatggatcgccaaattaggatagagaaaagatatcaaattcttagagggaaaagatactttgaaaattgtcaagtatgtatgtggacatggtttgaagtacatgtacaaccaatcttaagaggactgtattagatattgaagtcatgaatgcaaagcacactaactttcagtggagtataatttcaatcttgatgccaatatgttttactgtcatgttttggaacatggttgaattgactattgaagtgttgtttattattaccctttattttaagccttaaagaagaaaatatgcctctcaaagtgactttagaactgaattcttggcttgagaaatttcagttgctttgtatccttctaatgccaaattatgttgtgctgggatgtatttgctggaaaggtggacaaaaaataagtgttaaaagaatcaccacttttattaaagaatcaactgtaaaaaccaccacagcaatagaaatgtatttgctttattttattctctgcctgtaataaacttttgttactatgatggacacaattggttcattcattatttagagaccaaaggaggacactttacgagaattgaattatttcttggcaagataacttaaggactcttttagtcttactaatctcatgtgctcattttacatatttcctatacagaattttcttaggttgctttactcattttgtaattaatctaatttgtttgttttgtggaagatatgaatatctgaactcatgtttgttttgttgtgctctgttttttcataatgaacctcatatgaggaagttagtcattttgttttcaatggaagcatatggaaagcgaggtcatacatatctgcgtgtattttttcgatgtaagcagctagcttaggtttagaatattgtatttttaaagggaaaaataactggggtgaagtcgtatgcttgtttaaagatacatcattgagaggaaaaaaagaactcctgaagtgtttggctcaccatcttgattgacatccgtttatttttaatgggcataagctggtttctcacctatatatgcagagtccgaatcagagctccaagaacagaacgtaaatggcagctccttcatcttcatcattgttatccaaggcaggaccggccttgcgccgtcaagtagtcaatttgacagctgctgccgctgatagaatacgccagctcctccagcagcgacaacgctcttatcttcgtctcggcgtcaaggctcgcggctgcaatggcttgtcctacaccctgaattatgctggttagcttttccctattatccttgtcctacaccttcaatcgaaaatttctctttgtgatatgatgtaattggaatttaattatcttaattagtttgataaaagaaacaatcattttttttcatctagaaatagaagaagaaagaaattaagtgatatttttttagaaatatttcttaggttttaaagatcgaggttgaccggatagttctttttttagaatatggaataatgtgttatttacaaattagtagacaacagttcaatttttcattctggtaagatttaatgaagctagtaactaacatagctttataagggtgtttgtacaagtcatttgtgatgaaagttgatttatatatattgttttttgtttttttttttgttttttttgttttttttttttttaaatttatatatgttttttgttattcaattttgtttctgtgtgga

SEQ ID NO: 301194 - DNA, 1198 bp, Cannabis indica
ttcaaggcttgattgaaacaaaattggcaaaaatcaaattatgggccttcatatgtgggtcggccatgatgtgtctttcagcctaattatatatattttaatttgtctatataatttaatttaagggatttttacaccacatattaaaatttttaacttttttttattttttcactgtaggacaggattttttaaaaaaatattatgtgttttttttaaaaaaatattagttttataccgtatactgtgttaagtttttactgttgttatacggttattttttagttattctattgttgttttaattattttgttttgttgttttgcggttattttataaaaagacagtatttttgtaaaaaaaaattatgtgacaaaattataaacttttacccaaacttcaatatttttataaaatccatttaatttaaacttaactctagtgtgatgactatataagaaaagatacgagaactttgtgagacaagtgactcaaaccaaaaactaactagaaaaagccctccctcttgtctccatatgggtccgcagtggaaagtggaaacacaatcaaaatcaggatttaagatcgaaattggccacaaaattatcaagtaaagtttatccctgcatatatatttttttaaaaaaaaaaataataaacaaatgttccaaataaaaacttagatattcatatacataccaaatcaaggcaaaagagttatgtattatttttcttaagaaaaagataatttatgatttttattcccaaactattaccactataaaattgtgtccccttaacctttttatccgtttttgtaatttttcctcaacaattcacaatgctcaaatataaaacttcatgttaagttttatcttatgtggctaacaaagtggtgatggaaataatgtgacaaagccacatgtataatttaaataaaaattaatctaaactttaagaaattcattcttatcaataaataatgagaaaattaaaattggtttatattagagcctggcccaaactaattgagggccttgagccaaaatttttaattgggcttttctcttatataaaacaattatatattttatatatatataaatatatatatatataatggtaaaagttaaatatgatattttgaaggggttttataaaaatgttagattttggtcaaaagtttacaatgttact

SEQ ID NO: 301195 - DNA, 5503 bp, Cannabis indica
agagagagagagggggtaaggtaactaagtaaagaaaagaaaagaaaagaaaaggaggagaggcgcattggtgcttctgtgtgccatttttacaaataaacacccaattttgatggccaaaaggccattcctcttctcccaccctcgtacaaccacccatactctcttcctctctctcttctctctcactccaaacctctctctctcctcttcctctctttctctccgccccatctctcttctccgccgaatctcttcctcctccgccttgctctcttcgcccaaccaccatcgccagaagccttctcacaaccgcctccctccgcttcctctcctgccggaaaacctggcgcagaagatcggtaaatcgattcgccgccccggcgctgcctccaaggctagggtttactccgatgttaacgtgattcgtcccaaggagtattgggactatgaatccctaaccgttcagtgggggtaagtgaatgaaaatatatgccttaccttttttgaaggtttcttgatttctgttggtatttggatgttgagaaagtgagggaaagtcggaatcttcggaatcttttgagtttttttccggttttgtttgaactaaaaaaaaaagtatactgaaaatgatggtacggaaacttaaatttattgtttgtcgttgtgtgattatgcagggagcaagatgattatgaggtggtcaggaaggtcgggaggggaaagtacagtgaagtttttgagggggttcactgtactgataacgagaaatgtgtaattaagattctcaaacctgtgaaaaagaagaaggtgagatcttgccttgcatttcccttttattgattgatactatcgcatacacgtaattctattttggaaaaatagcttactctgagcaaggtggctgttttggcaacctgttgggtccgctacaaaaacaacaagataagctttttagaatagtaaagacaatgtggactgcatatgtaatagaattaaattttgggtgctgtttgtttgatgtaaataataataaaggttttatgtattttgatttgatctgttagggattagactcctatttttcttgtgtgggttacttgtccacttcaaacttgtaattcttcctattagtacaagtttaatttcttatgtagaagaaaacaactcctctagtttattggagaaacaatttagtacagtagatatggacaactgaatgcttttaaatgaatgaatttgatctcgtaaaacaactagaaagtagatgcttattgaggtttcactgcatgacttggcctgctcaaataatagaaataaataataaattaaaggatctgttttaacaattcacaatcagtaaataggttgtttgtttatttgaggggattatgtgatatgctgaagctaagaatctcagacttccaatacttcttgtcattattgcaatggtctttgtatgaaacagtgaaactgttctttttccttctgtatcttaaaattttgtttgttgatagaactcctttattactgttttctaccatctaaatgcagattaagagggagatcaagatactacagaatctctgtggagggccaaatattgtgaagctgcttgatattgttagagaccaacaatcaaagactccgagcttaatatttgaacatgtgaataatacagattttaaagtgctttatccaacactttcagattttgatattcgttactatatatatgaactcttgaaggtaaggcttttgttcactcaaacagacattaatgtgctacattcctttgcatgtttaatcattgtttatcttgtcttgtgtaagtaggttttatattactaattaatatattgaaggatgtaatgttgtgttctgatgtgtgagttgtcaagtattcaaatacagtatacatatatttgctcgcattttccctgacacctggtttgatgtccatatcttatttatagctgttgccttattgctgacccacaatcaactcaagaatgagtataaactttgtcattatcatcaaagttaacggacaattgggtttgcattacatatctagtgatcttcaacttgatctttgtgacttgcttcatgtaggctttggattattgccactcgcaaggtattatgcatcgagatgtgaagccacacaatgtaatgattgatcacgagcagcgtaagcttcgtctcatagattggggccttgcagagttctatcatcccgggaaagaatataatgttcgcgttgcttcaaggttgtatgcattaaattagttttagaatgagaaatggtagaccatgcagtgcattattaactactgatgttctctgtgaaattcagttgattcatgtttggcttactttatggcatgtcaacagtttttccttttgtatgcatgattttactttatccgcaagtaatatttgtcctgtgattttctttccttacacatatgtgctttgcagatattttaaaggacctgagcttctcgttgatttacaagattatgactactctctagacatgtggagtcttggttgtatgtttgccggcatggtaagcatttttatgtaattttgttctgtatagttagagtaatatatgttggttgcctaccaccttgagtggtctgctacaatgccttgggaaacgttagtactaatatattagctaagatttattgtctcatttgacggctgctttagttagttaatttgatctgcatgcctactcacccatggatgacagatgggtaggcagttcaaaattgatattttgtcaaggtgtgtgatgcttattcttaagaaattgtacccgtgcagatatttcgtaaggaaccgttcttctatgggcatgataactatgatcagcttgtcaaaatagcaaaggtatgtttttcagataccattctattttgtcatacaattcctctttatgacccacatttttatttttaatcaaacatgttatttctaaatttgtatccttcatattttattatatgtgacgtcataacactctttaaaaagaaattgaggttcatttgttggcagctaaatgctgaaaatttcattatccttctgaacaggatgaaagttaaggtctttcttttacattttcttgcaacaggtactgggaactgatgaattaaatgcttatctgacgaagtatcgcatagagttggacccacaccttgcagctcttgttggaaggttaatattattatatattatttgtatcattttatcaatttcctcatccagaggattgttctaattatcttgaactataatttacccaacttttacatttgtacaggcatagtcggaaatcttggacaaagtttatgaatgctgataatcaccatttagcagtacctgaggtaaacacttacgagttaatttaaatataatcctttgttagtcagctttcagaatttatggattcatttcctgtggtttgtttttgaaggcaattgactttgtagacagccttctacgatatgatcaccaggagaggccaactgcaaaagaagcaatggtatgtttctttattctttaaatagatgtctaaaaaagatggtccagttctttttttctattaccagatcagatgccccaaacaagcatgttgtggttgattacaattcacatggtttgagctcaatggtcatctggagcctgccttgtcattattggttttatgctgtttgtatattcagctctataggtactgccgtactggcctttcggaattcggaaataagcagtaattctttggctatgtttggtagaggataaaagtgaatgaaagaaaatttagaaaaaatggatagaagcaaaatttggagtcatttgttaaggaagaaggggagagaaaatgtaggtaggtccatcaaaaagattctcctccaaaatgggagagaaaagtgaatgggatttttgtaaaagagtgaaaatttaccaaaataggtatcccaccaattttcattactctctatctaaaatagccctttagctggagatgactgagtagaccactttttgtcttttcaatggtgtttttctaactttatgtccatgtagcatactaccctccaatgatgaaatatagtctctcatgaattgtattcccccaagatataatctgggattaaaatgttttattgttaatcatcattgttgcctcattattatttaaagtgaagttgtttgttgacatgacgtttctgccatgcaggcacatccttacttcttgcccattaggaatgcagaaagcagcagatctcgcacacagtagatcgtaatgtgtccattatgacctgagtttttctttatcttctgaattgttttaggatttttcttcgtttggcttgttataaactcatatattctttttcacttcaaatttttaatatccatctaaaacttagatgtaatttttcccccgaatttgtgtgctcctctctaaattgtgaatgaattacatgattcaaggcaaatatttgttgctttctttacactatgttttgtagagggcagagaaaggtggagggaattaggaagggagaggagagatagagacctccaaaaatgtacaaatttcaatccctccaaaagttgtggttttttttatataaaaaagtgtttttttttgcggttaaacactctcaatttcaagttcaaattttggtggtaaaatttttcaaactacaattccttagtaaatttaaggtgatatttattttttacagttaattgttaatatggactgtttatgtgtatattttgtaaacgtgagacgtttatattggtatatttttttttatttaaaaattataaaaaatattttcaaattataatatatttatatttttttaatattctatttttattttttattattttatttaattttaaaataatgatattaagtgtaataatatagacgggaattgctgcatatattattttttaattttttttttaaatttatggtttgagtttctaaggtggttgcaatgctagttgcaataggggtttctatgtagaattctgtgaaaatatatatatatatataaaaaaactattttaaagtgtaaaaataaaaaaaaacctctaatataaatgtgctacgtgtgtatacataagcagtggcagttaataagttgatatcttaaatttgctaacagtttagtagtttggaaggttttattattaaaatttgagcttggaaaattaagtgtaagtgaaacgatagttaagaaggtcaaaaactcatataaataaataaaatatataaaatataaaaaaattctaccatgcatatagatgggtgtatcagtgtgtctaatatttgataatataattagtgacatgttatggtggcgtttggtaacattttttaattcagttttctgcttttaaaagtagaaaagtgaaaatatttttcaaaaacatgttctataaaactatttttactttt

SEQ ID NO: 301196 - DNA, 1081 bp, Cannabis indica
gcttcatactcgaaagaatttttgagatgagataggtgatttatgctgttactttgcctatggacccggtggccaacaatatgagtacttcccttgggtacatggagaagagttgaatttgagcaatcaatttaatgctgttactataataatgttctgaatgatcgctcttgcagtgcatcatcccaacctggcttcattctagaaaaatcactaatgttgcgttcacgaccccatggtcaggagaaaacaaccagacacaagttgaagggagttaaagatcgacttggaagatcgggagacctacgtgacaccctaaccagaagacagttgctggaagggggagcttctagaattgacttaggcaataaaatttctgacaagaatacaaacaacaacgcatggtgtcaacatgatagatttccacaatctagcgaccttggtaaaaggaatcacaacaccaaatttgttagaatttgaattggatagagagcgatgctcatcgctcttacaccgaatggaagctctgtcaatccctcctaagttcaaatatacttcttgacattagtacattgggaaacaagacctattgtctcacattcattacttcaaagtgcataccaatctagaaggagtaagggacgacgttcagtgaaaaattttccctgccacactaacaggcttatctcagctatggtatcttaaacttccccctagatctatcaattcatgggaagagctttggattcttttggtaataaatttgctccttctcgacagtgccaaattgtacccaatgatttggtaaatgtgaaatagctagaagatgaatccctcaaggactacattcaatggttcttagaccatctccaatgggagatgtaaaaattgtgttatatttggcacaaaaagtaattttgtagttggtttacatcaaattttaggattgtgctccaatgcacaattgtaaaattttgatgtaaaatttaacatctaattaatgttgttattaaaagaataaaactaataactttattatcaattttattattgttttaatatgtaagataataaaaaaata

SEQ ID NO: 301197 - DNA, 9475 bp, Cannabis indica
gataactaatcagattgtaaagagttttatttagagcataaaacccaacaatagcaaccgggaaaaacctgactagggagattagttattcaagccactttttaccatattacatttcttgcaagcaattttctagcaacagtagcattaattttaataagtttaattacagtcattttaattttgaatcattggtcaaccattctcgtatttttctctttgctttaagttgtaattagttggttttacatcgtattttgtttgcaatccttatgaagacgatcttacttattactttattacttgtgtgactgcgtatacttgcgtacataattttcacaacacttgtgcgagatactaataatatgttagatgaaacaacattgggtgactagtcaggccataaagtcgtggcaagagacgggttcgggcaggtgcgacaggaggagagggtctccttgtgggatcgagcgggtgcgataacaggccttggagtccagggcttgctggactgtgcgcctagagggcctcacaaggccttagtgcttacattcccgggatgagatcttttttggagctttcttcctctttatgacttttttctttcatggtgatttcaaaattcttttctagagaattttggggtcaacaataactttagatatttaattcataaaaaaaaaacaattaaatgttatataaatgtataaatgttacataaatattttctttcaaaaaatattaaatatttgtgctgtaaatatctacttttaaatgtattttcaattttttttaaagccataaaactatcttttaattcttaattaaaatgaaagtttgtgagagccacacatatggatagcatatattataatacatatttatggaattaacactgagagtagagagagagagagcggtgaccagtggtgggctaaataaatatatatatatagcacatattatttaattttaacctaataataataataacaataataatttcttgttgtttctcatcgaattttcttttgttgtgttgtttttccctttctcggggaaattggaaaattttcttccttgttcaaaacaacttgtgctgctcactctgtagttgaagccgttcgcaccgttcctttcaggtatgccctttgagctgcgattttcgtttattgttatgtaataatttgattctgaaatgaatgaagttctttgtgtgttagttgattagttacgaagaaaccctaattttctctttcaccggggatttcgttcgggtgctagtttaaatatcttttggattgtattgtggatctagggttctgttctaggataaaggttgtgggaaaatttattgtgctgacccagtcacctaggtgagttataattaagagcctttgctttggagttgattctcttctagcgatctgcggttcaattgggttttctattccttaagtatgttagttagttatatgcaaaacatgtgatgcggttcatattgaggtagatgcatctatatccaaaacatgtgatctagatgattaaatcggtataccaaatccagctcacaattcaagattttatttcttgtgtgggaaacactgaattggatttccgtcaactggttaagtataaattcattttatattgctttttggttacgaggatcatttcaaacttaattgcttgaatatttgctttctttgaatttctactctgtacactttgatcacacttcaactttgtgttcgcaaaaatgaatttaattttgggtatctttttattgatgatataagcggtgagaatgtcgactcctgcaaggaagagactaatgagggatttcaagaggttgcaacatgatccacctgcgggaataagcggtgctcctcaagataataatattatgctatggaatgctgttatatttgggtatgtctagaatcaaaacagtcacgtctttcccttatcttcgttttgatgatttagttgtaattgtatcctgtattcttacttgttgctttgattgcagacctgatgacacaccatgggatggaggtgagagcttaaagtcttgtaccagctaggatctgaggaggattctattttattttacaattttctttcaagaatttattttgtcatctacgactgtgcttattatgaagaaaatttttatatatttggtggtattgcatcttctaggtacgttcaaattgactcttcaatttactgaggattatccaaataagccaccaacagtgcggtttgtttctcgaatgttccatcctaacagtaagtagaaaaagcatctaaacatgcattaatctttttctttttactgatttgatgtaggtgatcactttattaatcaacaaacacccacacagtgtctttaattttgtactttgttgtgtcagtgcagtgttagatagttttccttcttgtcctgttatctaattttgcatatctgttctgccttcacgttatatgatttgaaattgtttttttgaatacataaaaatgatgcaaattctggcttttaagccaatgaaaattaggcaatctctttctagtttaaattgaacctatgctaaagtcaaataaacttgtttactataatttgctttagctttgggcctctctaaagtagcccaagctagatgctacttagtgaaaatacagatgaatatgggaagaaatgtggcgctgtgtttgttcattcgttttctattcatatttacatataaatatgtcaatatatatctatattgatacctttttgttgcttgctcttttgcagtttatgcagatggaagtatttgtctggatattctacagaatcagtggagccctatttatgatgtggcagctatacttacctctatccaggtataaataaattactcttccttggtttagatattctgttacagtctagctaaggtctcccaaattgtctggggttaaagctatcttagggaaagtatgttccggctacacttgcatagcataccctcattgagtcattaatagtggccttaccatgtctatgatactgatttattaacgtaggcctttgggctctttacagtccaatttttgtttttggtcctggcatgctcgtatagtgtaccatcattcagtcattaatttaagtttttggctctagtaagtcccaacttttttgcttctaataattaatggcacctaccaaacctttctttatacactacgatctactaggaactaggcaaggcaaggtgggtgggtgggtgtgtgggtgtgtggtgggatgtgttagggtggggactctagattttggaggaagcatgttttaagttttatcttttgaccatcttactaatattaagtggtgggatgtgaaagttttagtttcctttttagagtctggttttaggacacagcttcatgtccatcttttgtatttgtatttatgaatatcattttaagccttatctgctgtcattgcagtcattgctctgtgatcccaacccaaactctcctgcaaattctgaagcggcacggatgttcagtgaaaacaagcgtgaatacaataggagagttcgtgagattgtcgagcagagttggactgctgattaattgttcttgcttaaatgcttcaaaaccttttaagattcagtcgaatggcctgtttaaattacattttagattctgaaaatgaatttgctccaactacattttctctctgattacatgaaatgtttgcttggtgttcacgaacgcatgtttggcctatcggtcatctgtatccagtgtccattttatttgcctctatattttttagttttcctgacatagaatgaagcctctcgttctcaatgttttttttttgttttactattattatttgatcaaatgtgggtgaaaatgaaggttggggagtaaaacgtcattgtctgaatcctaaataaatgaactaggaggatcaaacatcaaaggtaaacactggatgcatttacatttatttatttattaggcgtggatgtaacaaacattgaagtctaggcaatgatacaagctgaaatgataaggctttttacaagttgaaatgatgaggatttttacatctgtgaactgagattaccactgctggtccatccctcttgtacttgcatggcgtattgtaaatgccagaggacatcttctattgaaggacgcctgtttgggtctttgcctaagcaatttagtgtaatttcaactgcagtcttcagtgactggtatgcgtacgagccctgaatcgattgttctacggcatcctttaattttgaatctgctaagcctcgttcgagctgtgacaagaaaagcaacaagaggaaaaaataaaattgatatcagttttaacaccaaaagttttgtaaattaaaagatttaccttcttactaatatgaatgattatcataatgaaaaaatcgaatacctggagctttgtatcattcagatcactagctgatatcattagtctcccggtgataacttctagtagtataatacccagttgataaatatcttccttctcctcattttccttactgcatttgaaatttttgctagagaatgtgaactcggcaaccaaaagaagaagatgaaacaggagaaagagaagagtaatacctgtctagatgaacacctccgtgtagagggctctccaaaccaacctggaacatttaaattgcaacactaaaataccaacaatgataccttcaaatttctgagttttaagatacattttttttttcgaattctaaccttagatggcaaggggatactatagctactaatttttgcagagagactttcatccaataatatgttgtttatcttcaatttgtttccataaatgcctggtgcaactcctgtgtgcaagaactggaccccccttgctaatccaattgtaattgccatcctttgcggccatttcagcatttctttctttctccaatctgccatggaaaaaggtatcacagaatttcttttgagcattcgagacttgcaactttaaacacaatcaaagttcctctggttcactatgctatccatacctgtgacatattcgcttagcgattttgtcatgctttcaaggacaacaaagactgttgtagttgtatgggaatggtctggataggtgacagtgcagtgtccaagaacgctgaccaaatgtcgatgccttagcttcgacaacgaatcttcaatgccttgaatcatgctctgagctaagtgtttctgcttcagtttcatgcattttacatgaacaacagaaccatctgaaagccgacctttataaacctgcagaaatatcaaatttatgtgcttaaattcaattaccatattaatctagttaactaacatagcaaataaacaagaaaaaactatcagtaattatttaattaccttcccctgagatgcttccccaatcaagtttgaagcgtcgaagctatttgttgcgtcttcaatttcctctaatgagaaaacgcggtacgatggtaatccaatagatgctaacctcattggctgaggcacacgccctgtggagaaacactaatccgatcaatacaagttttgcaaggcaaacaaaccatgttcaaatgaataatgcatagcacagaagatcagaagaaagaaaaaggtggtcttacttggttcgatgttttgttttggtaaactacgcaatgatattttgtcgaactggtcatgttcatttgttgtatctgatttcctaacgatgatcaatatgaatatccccataactgcagcaatccccacaaccccaccaactataccaagtattaggcctaatttggagcccgattcctttctttttcttttagccgggggcttaacggctaaagcttctttatgacaaaacgcatatggtcgttgatatctcgagttcccacttgacaaacagttgaatgaatagagaaccgtccgattaacagatttcgacccaatgcatggtggcaattttccaatcaaaaggttgcgagaaaggtccacaagtttgagctttgcattacaagtgatgttcaaggaaattgctccactcaattggtttccagccaaattgagagactgaattgaaggcaatgaaaacaaaaatgtaggaataggccccacaaaataattgacagagatgtcaagctgctgaagcttatcaaagttgatgagatttgaaggaatctgagatctcagggagttattcctcaaaacaatatttacaaggctcttccccaaggaaggaaaaccaggtccaaggtggttgttacccaagttgagttctgctagtaatgctaagcctttaagatctggggcactcccattgaacatattatcagccaaaacaaggcttttaagagttttaatactagaaatcgaagatggtatctccccatatatgaaatttgagctaatgtttaacacctcaagtgacctcaacctgttgatctttaaaggtaaaggaccccacaagcccaaggataccaacgataaaactctcaagtttgagagctttgttacaacagtgaacagagaatcaatggagaagcttttagataagctttcccgagaagcaacaaagttccctgaaccaagtttaggggtatgagaaggggagcttttgtttccaactatggttagttctatgatccgattgttgtagcagacaatcttgagagaaggagaagaaggaaggtaacaaaagctagtccaattagtccatccccgtaagacttgagggtactcgagaagcttttggacttggaatagaagacgggtctcacttggagtcaattgagcagtagaagttggagtaagcagagcaaaaatgataggaaaagagcagaagaagaaaacccagaaattcttcatattctattctattctattcgataaaggagtgcaaactaaaatactcaaagttcactcatttagatttcagagacaaagattccaatgaaataaggcggaaaaaacaaaaagaatcaaaacctgcagctcaacattccattacataagagcaaaaatgggttccaccataatagtttcatgtataaatattatcaatggccttgatttcacaacataaagcagagactttttctcaatgggccaagggaaagaagcacagtgtaaaagatctaggccagcctagcgaggttacagtacaataatttgtttcccttctctttctttctgggaaagtaaccaaagaaaaggtgataaatgattaagtgggagaatttgtaaaagaaccactaacttaaattaaagaaagaaagaaagaaagaacaacccattattgagaatggaatgaagcaaaaatctgcaaagaaagaagtttcagagcaagacaagaagcactgaggccatatgaaatgaaataatagtaacgaagtgaccaaacttgatagtacaaaagttaagcaagcaatccttatcgtacgttaggagtataaacccaattataaattgggcagagaccattctacaccgttgatctttctgacttttaactatagtttagtgaaagtcaacagtggctctgattcaaagggtgcaatatattgcgctaacctcgatgcttgaccagaccacgttagctcctgcaagacaacaaggctgatcccagggtcacgcgccacggcacgtgggtgttgtgatttgctaccaccttttccatagatcaagaactcacgaggtaggtttcgttctccaatgacggtattgacccttcccttgaacgtcgaatgactaaaatgcccccatccatgtatgtgtcaactgaaaataacggccgaaatgatcattaaagttacatatatgccctttggtgtttgtgctaattcgaggtttgtcggtgagagaggctctatggggaggtttaatccatggtggcatgtaaataatttaattcataaataaaaattatacttatacaaccaaaaaaacacttctagatacccggaatttatatataattaacagatactatgtgtacttgacgacacgtctaataataaattgtttttggacgaaagctatttttcaaattgttactgttacttactttctaaaaagctagatttaataataaactgcatcacattcgatggccagtctgcaaatattctacactcaaaatcgtatgtagaaaagtattcaaagtaagaaaacaaaaaaaccttctgcggccattcaaatctgatcctgatactattgtgttaatataattaatttcggcctaaattaaatatgatcatgcatcatatatagtttaagcaattattattattattgggttttcacctaatcgttcgtcagcttatgctaatacagttccttttaaaggtggggactgcctttttccagctatatatatttgtttgtatgtacctgtaagaactccatttaggggacaatgtttcctgcaaaacaagacaattgattgtgatatccaaccagcattaaaaaaatacatgcataaaaaaaaacacaaccatttcattttaattcatttctctcttttattaaattcactttatattaatttaacaattattttattagcttggcaaaactactgtacgcttttatatatttaaaagtctctactcatgaaagacatgatgaagaactatatgtctctgtcttagatgtaaaactcttattattattccttgatactgaaacatctacagatatttatatagattaagaatatgaacgactttttgtgcaaaggcatttattagggaccaaatatgatgtttgccaaagtaactgcataacattaattatttatagaaaattgctaagaaagtactattgtacctattaaaaaataaattttaaaaagtatcgctaactaagtgtcatttatagaaagtactggacaacacaactacccaataacaatgctcttatttatatatcttataagcatattggcaccttaagttctcaacaccacccatgtgtcatcctataattgagtcattgacgagctatttttatattatttatgtgtcatgttttgcccctatagtatagaattatagtatcagttctctgccccaccgggctggtgttatattcatttattcttctgatcgtaacccggccgaggagaaactcatatgatagaataaatgtaaattttaaatctcttggcaagtcttaatttgtctctcatgaataagaagaaaattaaatgttaaacaaaataaataaattaatgttttgcacaacccttaaaaaaaaagtttaggacaatggtgtgctctctctcgtgacattattagtttaaaagtatcaaaaattaaactttacaagtgaaatggcccaatccatcatcgataaatcatgttactcaagagtaagtgatccatatatttgataagggataattacaccacattcaaatttttaacttttt

SEQ ID NO: 301198 - DNA, 2205 bp, Cannabis indica
taaataatttatatatttattgaaggaaacaaggagtttaggcctaagagagtaatttaatgaaaacctaagtgagagctagctacaacactgaatttataacttgctccatatatagtaaaaaataatctatttggcctaagggtaagaagagggtatcgatcaaaataagaaaatatcaatatatatatatatatatatatatatatacaatatttattatatatacacaaacctttggtagctttggaaaaaatgaagatgtaattggaatgaataagataaggtttaggttgtttttgatgatcagttttctggtttttttttctttcaatcttttttcttcctctttttcttttctgcgacgcctttgtgagaaggtggtgctgaccccctccctttatcctttggtttggagtttcaactaagctttccctttcctcttatttatttctctttcgttggtatctttttggtcttcctttatctatatattggtctgtggaactcaactctttccaccactctaaatttatagtctgttgagtactgctattactgctagtctttcctttcttcttacggcattctctatctctaacgcctccctctgtagctttcaggggtgtgtggccgggttttattttttttgtatttttttttgtaaaaataaaataaaataattaatcttatcatgaaactaaaaatatatatttagagagttaattaataaaataacattgtgtttgttgctttgtgattggtccaaagcatataattacactctgttagtgcagtgtagagagagaataggaaacacaagcaagaaacaagagtgaacacacaacacacagattgtcgaccgaccaaagaccaaaaaggctgagagtatcatcatgataaaaggcttagctagctaagcctaaaaaacccttttccttttctaatttatttatttatttattttttcttattcaatattaaaataaaataaaaactcaaaataaataaaatgatcggaggggtttgtttgggtttccattcttttgtttacctcggtcaattagcccccacgttcttccatactcttggctatttccacgccaccctttctgcttccccaagaccatgtaatcattgtgtcttgggacacactccacatctctctccccactctctctctctctctctatccctttctatctcattctctagtacaacctttctccctcctcttcttcgtatgtttttcttggtttcagcttcgcaatatatatatatatatatatccccatataaaatatgttgtatctgtattaacctgtaatagtagttttaaggtctcgtaacttgttgcacctctattaattaatatgcgatatgataccatcagttaatacatggtttaagaattatgagagttgaagaaaatttatgtaaagatttaatttcattttaagtaaacccaatgtgttcattggtatatatgttataggaatataaatgtcaattaattatcttgtttttcaaagctatacaactataaataaaagaaggtagaggaagcatgcaaatctagagttgctttattataattgcagtgatcgctcatatataattttttcttagtaatattaatatattatatatattggttccaaaaaagaatgaattaattcaagtattgtaacccttgtactctaagcaatatgtactcattactattcaaagttgagattttggggcgaggaatatcctctggttggaaacacttttaaagttcttgtaattaagactataaaaacactgtccaagcatgtaaaaagttgaaaagacaaaaaaagaaaagaaaaaattgtaatatatactcccttggatctttgtttgcctaaaagctgtccttctttctctttttcttccctactttaaatgcagtaattctttggctttagtattattgcaacactaaaatctaaaatcgtctacaaaaaaattgtatttcttttttccctttttatgaagtaaactaaagaaagaccatgcatatataaatagatggcctcatgagtactacgaggaaatttggtggtatcgtgactgaccacaaccccaatatatttactaatggaatattagttggttacttacaataagttgattattagaaagaagaacaaaaataatgtaatatattatatatatata

SEQ ID NO: 301199 - DNA, 866 bp, Cannabis indica
aaaaaaaacgtggtgtgcaagaaatctacacatttatacactaaacgacgtagtttagcgttatgatttggtattataaatactccttgagtcttccaaaccctaccaccaccaacctttttcaaagaaaaccctaacgcctattactctctcacgctaatttcatcaggatgaagatcatcgctgcttacatgttggccgttttgggtggaaatgctgatccttccgccgctgatttgaagagaattctcggttcaggtataatataatgccgatctttgtattctgttcgtaatcacatatcctagggtaataatagtagtgatcatgatgaagaaactgatcacattgttagatgaaccaaacaagaataatagctatatgacatttgattttcctttattaatttgtattaggttacgtaatttgttatctgtatacagaggaaagagctaatttctgttgaatatttccaagattaatgaaaaatttagggacattttgtttgtttgtttttctcgaatgatacagtgttttgctttgtagtttttgttgatctgatatgtacattgaaggaatatgaatcattgtaggccaagatgactgcgcattgttaacatgttatgaaatttagagtttgtttttttatatgaatgaatgagaatgtggattggtctgttttgctgtttgttgcagttggaattgaggctgaggatgagatgattaacctccttttgtctgaggtcaagggcaaagatctgacagagctaattgcatctggaagggagaagctagcatcagtcccatctggtggtggtgctgttgctttctctgcacccgcaggtggcaccgacgctgccccacgc

SEQ ID NO: 301200 - DNA, 3697 bp, Cannabis indica
ttattttttcctttcccaaaataggaaatatagtatcaatgtggaatctgtatagctttttcgcactagtataatattgttggttgcatttgcaaaatcgatctgattaattgcaggctattgaagctgaagtgggttctccagtggatatggccaaagtgtatatgcgcacacgtccacaatgggcatctcctaccttcaacaatagagagatcaaatcttcatcaccaataagtgcacatctttttaatgagaaaacaccttattcaaatgatggtaatgctttgtcgtcatctaaggtaccatattgagcattgattcttatacattttttgtttctttatctttttctttgggatgattaaaatgtactgaaacgttctctcaaagaaacaattgagatatttactgtatttgttctaccacttctgtattaactatatttatcacggtttactttttgaaatttgaacacagcctaaatgggatacccctaacacggggtcttggaacatccaagaggaaatacagagagtgcgtgctaaagcaactgaagagatgctaaggaatttaccatctgaaaaaattgattggtctgcgtctggttttgaaaatagagctattccatgctcgttgctatctgaaaacatagatgctaatgtaggagaaaaaccggataagtgtacaaacccgatagatgcttctttgcagacagctgatataaagaacacatcccccaggtttgagttttctttctgtggttgacaagtatattttcctttgcttttttttaatggctaatgagattattgacactattcttgaaatattgaaattatcttggtttgcagtaatgctggcattgatgatgttcctaactacaatgacacaatcaccagtgcaactctcaagcagggacgccctatcggagaaggaagcctgcgaggtacgtcttggacccctccgttagttgttagggttagaataattctacatttgcatgttcaatattatgatctatgtgatattattgattacttggcttgcttttgaaattgaactcgtattcaaatgcttccactaaagcattgtgatacctaaattttgagaatttgatataaatatgctagatgagcataattaggagaacataaattttctgtgtcattctgaaaacaaaattggcactaaagcgagttctattgtggtgattcaaagataatattttttcaatgcattttcccaatcctagttttcttggttggattctcaaatgattttagttgcgtaccatatgtatatttttttaaaatactaaaaatccctatctcaatattgattcaaggcaaggatttcagcatatattagtcattatctcttgatgcttttttatacgggtcagcctagattttgttgcttcttgtacattattacagttagtcactgttggattctgaattgagcggacatttgtcatgtacttattaattgcacttattgttttagaaaacactgaacatctattcaattccttttattcattcatcgtttactgtttctttctcagatttttatatattgtcctttcatatgcagttacagatccaagattgcttgagaacaactgcacaacatctgaagatgtgtctaaaaacgaaaacggctcgcctgggtactgaaaatgatcatttacctcattagttagtgcttttttcgttgagttgagaatttagatgaattggttttcctggtttcagtttgtctgcaggagtggcaggtactgatcatgatcatcatgagggaatgccagatggtggggaacccgcagctacaggcaattttgatggcgagacctgtgagcttttgagtgaaacttacatcgagatcccaaatgtgagtgatacaatgaatgagaatgagtacatttcaaacggctctccaagtgctccaagcttgagcaatgtgtctcctcgggtcacaactcgtcaaaacttgaaacgtggaccagcagccaatacgaatgccaccattgatgccgaaaagcgacaaggaaagagactgagcagaaacagtaaaagaaagttgtaatttattagttgagcttagtgtctatcacgtaggttttgttgttaggtagtttttcgtgtacgagatatttaagcttagtattagcagtagttagtctggaattggaaagagacctaaaggttgattgtgaatgttaagtaattctgctactttcattctgtttgttccattatgcttgggacaaaaaaattgtgtttgtgtaaaataaaattattttaaattggggagtggtactccatgaagatttatttttttaattggcttgtatttaactcattattattattattattattattattattattatttaattgacatgtcttaactcattaaccaattgcaaattcatgtggtggaatatgaatttagtttgggaaataatttctgtttaagaatttattatattgatatgtgggtgtggtgtgtggtaagtggtaagtggtgcgtggtggcatgatttacagatgtatttggccttgtgttcttagtttgtatattgcttaattttttttaatctttcaatgaaagtttcttcctatgcattttttttataaacaatttaatcagtaatcacaccaaaataacatttattcaattactaaaattgggttatattgtgcattaattaatgttgattaattcctattattttcaatatgaccactcccaaaaacactatctagaaaaagataccaaattagtaaatgacaactcaattggaagagtaaagggaaaaagaatcactcccttatcttatcttaaaatgtttgtgtaattgtaggggtgttggcataattagtttcattcggatttatataccttttgttcaatccaaatcaatattataaatttttgaaaatttaaaaccaaaccagattaatgagatgctcaaactaaaataaactaattacaaaagaaacaataataaattgatttggtttgaaatcacagtttaaattatataattgtcccaattttcttactaatgatatggtaaggctcaccatatgtaactcaaaagactgcatatcatttgcatatcatttcgtgttgtgcttaataaaaatgagcaaacaaaaaacaactcaaatctcaacatgaaatacttgagcaaatttattttattatgctcatataacaataaagattacctaaatttacatttttcacatttttttttatatagataagaattaggataacgacaacaacaatagttctacttctgtataaaaagagcaatatataaccactaaacattttagtgtctttataactgtaagtattgtaattgaattgttcagatttgcatttcatagtgtctttgtaagatttgcaaattgtattaaatacaattaaaaattctttggtgtgtgtgtgctaacaattttacttttacactgtagtaagttattttttgtttttgtatatattgagaaatcataactatttttgttttagaaaaattacggcataagtctttaaaaaattcactttgatgcagataagtcagattgcggtgaaaatatccaagcttgccaaaatttaatcccatgttttctttttcaaattattgtaaaaactaaaactaataactaaaataaat

SEQ ID NO: 301201 - DNA, 2784 bp, Cannabis indica
agagtaggcccaatagaaattcattgttgatcaacttaggccaggcccaacagaaagcttaagcccaaacttgagctccatcaatcatctagcaagtgttcgatcaaatctcataaagacgagacgagtactgaatcttcacgttgtcctcctcctcatccttccttcagctccctaaataacatttataaaaccagttttgtcagccctaaaaataagattcagaacagagaaaagagaatcaatggacagaaaattgagatatgggaatgggtcctcgatggcccaattgctattgtgctttcttcttctgacgagcttcgttggacgaatagcttccctctcggtcacggtcaacgatgttgaatgtgtctatgagtacgttctttacgagggtgacaccgtttctggcaattttgttgttgtcgaccatgatattttctggaacgccgaccaccctggcatcgatttcaccgttagtctctcccttttctcttcttttagttattgcatccctcttttttttttttttcttcaatggattcaatttaaatattttattttggagtttctgtgttgaattataaagttttgtaatttgatccttcttttttttgctaaagttttgtaatttgatctgggtttgctactttggtttcaacggattatgtgggaaccgtaattatttggcgagaatttgaattttcctccctttctttcagccccattaatctaaatataaattgggatgttgtggaacccaaatctgtgatgtgatgctttaaatgattatgactaagttatattcttcgttttgttttatacaagatatatgtggacatttgatgcattttttaatggaaaacttcatcaaggaatgaatctaaagctagtagggatttcgctacggagaactgagaagcaattgttcatgttttctgtcaaattgtcaatgtcaaatccccttctaccaatatatatatatgtgtgtgttgtctgtcaatacaacctatgcactcttttttcttttcagttttcactcttctctatgtgctaaaagtctagataacccttttctttttcttgggagccaatttttgttttagtttttccagtaggaggtttctgatatgatgttttcgttttgcttgatgatgattggatgttttaggaacccctttctgtctttctgttgatgtctacatgaacaaaggtttagtcttcagaattattagtcaatataatatatagctaataacttgtgtttacgtacaagtttttcatttaacaagtgttgccattttctacaggtaagtgctcctggtggtaacaccgtgcacacattgaagggaacatctggagacaagtttgagtttaaggctcctcgaaatggaatgtacaaattctgttttcacaatccttactcaaccccagagactgtttcattctacatacatgttggtcatatccctaatgagcatgaccttgctaaagatggttcgtgaaatattcatcattgtctttctttttttcttcctttctttttttctgttaatgcttgccgtactcactttccccattttattattgcagaacatttgaaccccattaatgttaaaattgctgagttgagggaggcattggagtctgtcactgctgagcagaagtatctgaaagcacgtgatgctcgtcatcgtcatagtaagttttaaatcaatagtaatgaatataactttgaagtttcaatagaacgtgtacagctttgattttagaatttttgcattagaattggactttctacatctgattcaatagaacttatgtttgtgtttgcatatagtttgaagttgcacatgttcacaagaaagatgcaactttgttatttctttcactcttttctccacagatacgatgatcacataatttggttctgatctagtgtctcctatattctctagtatatagagattctccatgcatggattgtaaaaaagtgttaaatgaaacttgaggtccaagtaggcaatcattatttgactttattgctaacttattacatttcaacctggcaagctgagtcttccagtatttttttcgcaactacattctttggaacctcattagaatccgaaaataaaaggaggctattaatcctttactaaccacatgttttccttgtgctgcagcaaatgagagcacgaggaagcgtgttgtattctacacagttggcgagtatcttttgctggctgctgtaagctcacttcaggttttatacattcgccgtcttttcagcaagtcggttgcctacaaccgggtttgagctatgcattaacagcgttagtctgtgtcggtttagtaaaacaggatgaggcttgtaggtggttttggacgatttactttcacatcatttgcatacatgtatcaaagatgatttattattttattgctaacaactttgaaacttccaaacacagctataattgttgttttacagtttccacctttacttgtgtctcctatatccagacgaacctgacaaggtatagatacttatggaagaaagtaaaaaacaaacaaacaaaaaaactgagagaaggtgaaaagaaaagggaaaataaggtagtagtacgattggataaaattcttaacaaacaatgtgcttataattactgtttttagtgctgaatttggagtatgttatgttttttttttttttgtaacaaagtgctatgttaataatgtggtggagactggagactggagttggagaatatatatatatat

SEQ ID NO: 301202 - DNA, 4750 bp, Cannabis indica
tgtatataaaaaaattatatataagaatagaatatacatttgatttattaatttttgaaatataattatattatatgtattagacttttaattattattttctttacattaaaatgttatatgtatatataatttttttttataaatatgtgtaaattgaattggatcggttacttttacatgtcaatcaacattcaatccgtacaagtgcgaattttgaatttttcaatccaatctaatccgcaaaaatatagatattcgtactttacggattgtacggattgaattagatcggttattttatgaaaaccccagtgactattgtgctctttgtagtttactaaacttttctttattaaaacaaatccattaacttagagacatgtcaatattaatcaaacttcaaccaccaaattatgtcaccttctgtaatttaggagtaatgggcaggtgtcctaaattctattaattaggttagtcactgtctaaaaatgtttttttttttaactttttttcttctttgaaatggtctaaaaatgtttcatatcttccagaacacttagtagtttatcagcaattaatgaccttatcttcacatattagaaagccaaatcttatcttagagagtgttagtcaggttgcaaaatcacttgtttccaactacttacacgttaacaaatggtggtttcgaatgcccattttcaccgaatggaagaaatttttggtataactaataatctagcttaaatattggtcacatttgactgttagaaccatgtattgactcaaggactatagagtttgtgcattattgaatttgaaagtgcttgaattgattagtagtacaacccaagaaaaagtaatgtttcaatttgtgaaaagaaataactatgactttacccgtgagttctttttttattattttgtacatgtttttagacacaagaaaaaagaggttgaggtcaattactcagtaggcataaaagaaattatatagaaccactcaaaaatagctttacaagattgctttgcttctccttgggttgtttttcaagtcttatcattgctgtttgggattttcaagctctgattaaaaaaaaattgtactccaaaatccttaatatattatatatattatcaaaagtcaaaggggaaatctagcatagagattttttttaatgagtggtgaaaagaaattatatccctactttcataaacttaagaatgtttttgtggtcctatggattaggcctccattgttgcaacaaaaattccaacacaacccaatatttaaaaaactaaagtaatgtctttgagcttttgtaattatcaacttatttattgatgagaatgacccttcaccatcctttacaccaagaatgatataagaaagttaattcaatattgtgattcaacataactgttttttgaggtgtaaatgtgttttgatgagctctaataacaaacaaaacaaaacaaaacaggcactggtgccttctttgtttaattctattgtcataatagccagcttttgtaactgaaagtattgattatgaactaataaaaacaattttattattattatgatttgtagtatgtgaatctaaaatttgagtttgtagtaggtgaatctcttgcctaattttaatttcatggacccaaccatcaccatcatcatcatcccaaccccatgttatccaatagtatttcatgtcagccttaattcatgaaactattcataatataactgatatgatatataatctcatattttcggcagttacacaaattttgcttttatttcccactaatttaatatttaatatagtttttattttcattctcaaaataagtaagttaaccaaaacatttatcatcaccataaattcaatcactatttatgttaattaattttacgtatgacttatggtaacctcatttacttatcattattaaaataatataatatatatttgttttttaaggttaaaggaatcgttattaatgcatatataaatatagattgggcttagaatttagatatatccaaacatggatttcatttctttctatcttaattttgtctttactagttttcttttttttttttacactaatttatattgtgaaatagaagggacacccccacatggatgaaaattggaaaccatataataatattaataagtaagccttcatcttttgtctccttcaatctccaagttttcttagagaaagaaaatcaaaacacattctcttcccaaacagaaaattcctctgtttttctattcctatttttatatttaattatttttcattgagatgaggaacatagcaacttgttacaacgaacatgccactaaggtatcagattcatattgttcaggttcatcaaacttgtcttatctcaatccaaaattaaaccattcttcaatcccaaaccaagttacatgtatatacaaagccaacctctctaaccaaacacaggttttgattactctaacctggtttagcaacctcgcaccagggataagagtaacccaggaattaaaacactccgagtttaagcgactatggaagaagaaaggtaccgaaacgtttcgatccagtggtttcaagattgaagttttttgggatatctgtgaagctaaatatggaataggaccagagcccgttaatgggttttacgtcgtcgttttggttgagaaagaaatggtcttaatcctcggtgacaaacaagccaatattgatgaaatagacagagtatcaaagagaaaatctttattggtttctaggagtgagaagttttctggtcattactgtgtttattcaacaaaagctcaattttctgataatggaatgattcatgagattgtagtaaagtgtggtaaagaaaaagatggtcgtaatgatcatgatgatcattcttgtgaagaagaagaagaagtaaagagaaaagggtctaaagggtctaaagtttttagccctgttttatctgtttgtatagatagaaaaaccattttccaggaaaggaaattgaggtggaattttcgtgggaatcatgcaatattcttggatggtttagtggtggatttgatgtgggatgttcatgactggtttttcaatacgacatcgggttgtgccgttttcatgttcaggacaagaagtggtttccataccaggctgtggttggaagataccattttggaccagaagaaggatcaagaagaaacagctcagttttcactcctcatttgtgcttgtaagaattctcactaatgcaatttttatttatttatttatttatctaaaattacttatctttaattgctaaaccaaaaaaagaaaaaaaaagaagaagaaaaaaaagacaggtatattgacattatagttctcaattttatttcaatgttttcctttttttactccaaactttttacatgtaaattaatttatatctccaaacttttgggatagtatattcaatggacttttgtttttcctttcttttgggtctatttttctcttggtacttttggtaattaaagagaaagtttgtgttgtttctttttttgctttatatatatatatatgatttatatatatgagacgtatatattagacacaaggaagaagatacttgataacatagatggtcaattattcacttactcggttggattttggggtagcactagcatgagctccattttgaatcattttcattttcaacactaggattttgacttactctactataaccttaagaccaatactacatattttaacaaattatgaattagtatttttagagatgtgacaatatatttattaaaaaataatttaaaaaggtaaaacattaattaataaaataaaaaattatagtacgggatatcattcaagataaattttcatgatggagcattttcctaaccttatttagagcctcacctcttctatagggcaaccaaggcactgacatgaatagcattcagatattctaagacctaaaaagaaagtactaaagagcatcaaatgtgccaattagattcttgtgttaatgagttgatattttgttgcaaggagagtaagtaaccaaagctttcataatgacctcttcttggagctattgctgaaatatgagattatataattttgggttttctttctttcagataattacaaataagattttttgttttgtcaatgaaactggttattagttaaggaaatatgattatcactattttaaccaagatatgatccataggatatgataatgaaaaagcagtttgttgtttaggtggcaaaatggggaaatgttaggtgaagaggctttaaattaaaacgatagaagattaaaagaaagggccacacacacgactacgacaagttggttgtcacggataattttactgcacgtggttaagcccatgccacgcatgtgacaattaatcagagtcactttctctcattcatcactatcaatcactacaataaccaattccattattccaattatgcaactcacccaaacgacttgtcgtacaatcactctctattttatacttaaaaccaacacaaatcaattcacaatattgtattttctttttttaggaaagggacaatattgaatatagttattatttcataaatataaaaaaatgattaaaatttttactatttttattttttatttacaaaaaatacagttgttgttttgttggttatttttaaaaaaaaattatta

SEQ ID NO: 301203 - DNA, 621 bp, Cannabis indica
atttcagtatgtaatgtaaaaacatcttttataatgcatagacgtacgtaataccttatttgtgcatgaaagatagctttcgccccaaccaccagaagaaggtagttgcttagagagcaagaaagtagaagcttttcgaatggaatggctggtttggtaggtgcggccagctgcgatcaagccctttacggcgaagtaagtggcatagttgtagcaaacgccccatgatccataccatgagccatcttcttcttgcttgctctctatgaactctgttgcctttcgaatacattcttcgatctctttctttttgtgctttttgtatttttctgtgaatgattttagccctttgatcactgatgctgtgcattctacgtacttgtgttcgatcatgatgttctcaaatatctcagatggattcatcatctatatacacatcatattataattatatataagagttttcatgctctaatttttactataagtttgtaatatgtatattatcacatatctcacatcatatcatattattaatgtagtgttaattagtgatgagtgaattactctgtattcttatatatgacttaatatttttacatttaaccgatgtaaaataat

SEQ ID NO: 301204 - DNA, 1839 bp, Cannabis indica
ataataatcataacacatatttttatgaaaatagggtctataaagaataaaacatataaataatcacatagtcatattaattagtgttaagtgtcccactcatcccatgtctaaaaataacggtcattacaggatctattactaaattgaaaaatgcttttaatttccctaatggtcttgaagttcctagagtaggtcttagtgggggtcttttatttctttggaaagctaatgtaaatgtaactatccttaattatggtataaactttattgattgctacttgtctcttgttgatggccctacaacacattttattggattctatggtgctcctaatgtttctcaaagacatgtcacttggcagctcttgaaaaaattaagcgacactgctcctttactcccttggattgttttgggtgatttcaatgagattatgtctcataaagataaacttggtggacctttgcgcctcgaagctcaagttgatgcctttagaaataccattgatcgttgtggcttacatgaactgaattatattagagaaagattcacttggcataacaaaaacaaaaatggtgctaatgtaaaagagcgtttggattatggatttgttaatagatcgtgggacaaccctttcaacacacctactatcactcatttggacttctttggttcggatcatagagcattaaaagtatctcctcagaatagagcagtccacaccagatggtattgctaatgtggtacaaagctattttaacaatattttcacatcatatggcatggacatacaagcaattcaccaagtcgtctcctcagttctgtgtacaatatctcctcaaaataaccatgctctcactcgaccatacacagctgcagatgtctttgatgcactttcatccatgaaatcgtatggtagtccaggtcttgacggtatgtaggttatgttttactcaaattattggcatattgttggtgatctagttaccaaaacggttctcaaagtactaaatgatgggggagatccttcaagcttcaaccaaacagtgattaccttgattcctaaggttaaaaagccaaactcaatgactcaattgaggccaattagcttgagtaacgtgctgtacaaattggtttctaaatcaattgttctttggttgaaaccatatcttggtatagccatctctgactcccaaagtgcatttctatcttctcggctcataacagataatgtgttaattgttttcgaactgttacattctctaaagcacttaaagaaaggtaaggaaggttatgctaccatgaagctcgacatgagtaaggcattcgatagagtcgaatggtactttttacaaagtatgatgttagcaatggggtttgatgcttctgtggtggatctcattctacgctgcattactagtgtttcctattccttcttgatcaatggcattgtcaaaggaaaggttattccaagctgtgggattcgacaaggggatccccttttgccatatctattcatcatatgtgccgaaggtctttctagactatttcaagcggatgaaacaaggggtaatcttcatggtttaaaggttttaagaggcgctccatcgatttctcatttattttttgcggatgatagcttggttccatgccgtgccaattcacgatcagccacaaccatcaaaaactctttggattgctactgccgtgcttccagatagaaattgaatattgaaaaatcagtcttatcattctcaccatgtaacaccctaactaacttaggcatgttagtgtgatttttaacttactgtgcaactcgatgctaatcaacgaggtta

SEQ ID NO: 301205 - DNA, 2198 bp, Cannabis indica
ccaaccaacaaacaaacaacctaacacgtgtcaacgagaatatttaccacgtgtggattcttacacgtgtaacgtgtgagccaaggataatatatattattattatttatttatttattttgttaaaaagtgaagaagaaattaccaagaatataacttacgtcaaaattaagggcttgaaaaagctgaagaggccaaaaattaaaaggaaactccttttatgacaacgcgcctttccagtgaccttctatgcttatttattttatttatttatttattattattatatatatttgtgttgttcagactttaaatttcaatactcttctttctctcccaaccacttatatatatacatatttaactctctcaatccatttcaaatcaaaacaccgtccaaatttacaaggttgattcgattcggtgtttgttatttagctttgaggagtttggattgaatttgaagaaaatgcaagcgagtttagtttcacagagtgaaaattggatgggtttttcaatggattatgatgaaatttcatcgaaaatgacacatgattttagggcaaagctgaaatttgaggaggaggaggagttgcggagcgaaggtgttgttgttgttgatgaagagaaagctgtaaatgatcatggagaagaattagaggtagaagaggaagaggaagaggaagaggaggaagaattttcttttgcgtgtacgaatccagatggatcgccgatttctgctgacgatttgtttcaggacggtcagatccgaccgattttccctatttttgatcaatctctactgtttgcggacggtgaagatggcgctagcggtaccgatgattcgtctcttcgtcttccgttaaagaaactcttcattgaagaaagatctcattcttcttcttcatcgtcttcttcctccgatgccgacgaattggaggcgcttcctcccggtacttactgcgaatggtccaaaaaggcggtggaagcttcacctgagatgaacaagaagagtaactccacaggcttctcgaagctatggagattcagagatttggttgtacggagcagtagcgatggcaaagacgctttcgtgttcctaaaccctaattccactaacaacgcggcaaagcaaagcgtggaatcgattaagaaaacggcaaaagctgagaagaaagcggcgccaggaggagttgaggctgcgacgatggtcaaaggaaaagtcaaagctaaggcaaagagaggtgaaacggcgtcgtcggctcacgaaagatattacgtaaggaataaagctaaggaagataataaacacaagtcgtatttgccttacaggccaggtgtcgttggctttttcaccaatgtgaacggtttaagcagaaatgttcatcctttctaattaattttaattaaattttttttgggggtggttcaaaattttagaatattattatatttattaattaattttatgtaaatgattggagaatactaatgttgttgtctttagagattaaaaaaaatgtgttatttagacatatgggcaaaatcataagtagcctttctttgtctaacaatacttttgttttgtacacacaaaatgcaaatagatctttttatctttgctttttcaaacatcaatgtttcatttcatgtttgttaattatgagatacgtttttttgacataatcatcattataataagtaaattacagttaaattactaaagatttttggcatgtgtaaacaatttgaaggtgaattgtaaattcagagtaatttattaaagatctgtgctccgtgattaactgtgtgagcataattgtattatgatcttttgtcggaagttttattatgaaatgataatataaataacttaaaggaaccttctcttctctgtcccctcttatttgctctacattaaattattgctagctaaagttgcaagtgtaaccactaaagattcattagaaaaacttaattcatatacttaggaaaaataaacctcaaatctaactaagtaatttctgaatgcattggtaccactactttctagtgtcgttacctattttgtaataataattattaaattaaattgatattttagggtagtttggaaaatcatattagctcgtattgtattttattatattaaattagttatacatcatattttttatataatattatcttaaatttta

SEQ ID NO: 301206 - DNA, 3611 bp, Cannabis indica
aaaaaaaaactcataaccctatactattatttatttataccaagtaaattataccctcaattttcatatttaagaaaattcccctgttagagttgcttttattttgtttcggcccaataccggcccaatgggcttctattttactgtgtatataaccctgtacaagccctacatacacattacatatattcattttttatagtagccactgtcgctgaatataatgaaaataagagaggtcttttctctctataaaaaatataaatgtactatcttaaaaataaattaagtattttttcaaaaaaaaaaaatcaaaattaaaaaaatatatagtatttttaaaacataaatttgagacttttttattaaaatattttttgggcttggatgtggccctactgccccacccttgaaccgacgaacattcaaaatgattagacataaaaacaaatttggttactaatcattacaaactttagttaggctaattagtaattttttccctctaactttgacatgtaccacatcatgcttttttggccgttaaaaattttcctaaactattaaaattatttttttttttttgaaattaaataaactattgagattgttaaatttaggaatttttgtctaattttagtaaaaaattctaatatggatgaaagttcaagaggcataatttagtacatatcaaaatttaagggacatgatttggtaaatatcaaagtccagggagcgtttagtacataaacaatcactgaaacagtaaaattgaataaaattagacaaaaatccttaaatctaacaatctcaatacttcgagaaaaatttttaacgaccaaaaaaattcagagacatgatttgatacatgtcaaagttagaaaaagttactaattaaccctttagttacttaaagaatacgaaagctgtcacatattcaaacgttttagttatcaggttcaaacaataagatgttagaggttcgaaggaatgtttggattgcattagacacagtgaaggtgtttctttttgctagcacatgaccctaagttgtctttgcttagctaccctcatatggcttgctacacactggttggccctcatccccattaggttgcttggagccgattttgttttttctttttcatttttcgaaactaggattgtcacccaaacctaaaatatttgactcgaacagcggacgttgtcgagcaaactatatgcctgaccatttgagatactctagggtgcatttgaaggtgttgattaatatgaaaatgcttgtaatgtgtttaatagtaataaacattataattacaggtaaatatattaatatctaaaacagacctaacataacaatcttcacaaaataaattggtcttgacttctgcaaaatgccactgatctatgaaactgttaaactaagtattgatataactatatctaatcataattcaatggaggaaggtcactgcacagctcccataaacaatttctgaatttcaaaagaaaattttctatttcctactctgccaaagctcttcacatgtctttcacatttttactgttgcaaaaaaaataacaaatcattgattagcaaagtaattaagtataagaaatttcaacaaaagtcacacactttacaaagatatatacatatatgtatgtatatagaattcagcaagatcacactatcaatacaaagaacacaatcttttgttatcgagtttctcatattctagtttaccacacgtgttcaaataatttcaaacctattacggtatgtagcactatacaagattagatcacactatcaatactaagaataaatttgtcatatacattcagtaatgatcattagcagatggttatagttgcctaaacacacaaaatcaaataacattaagaatagttctacaaaaacagaaacttgagccaattatagatcaaacataatcaaaactcaaataccttaattagaagccgaaacccaagtacgattgatccaattttgacgcggtctcaaatcctcatgctcgaaaacaatttcttcacatgaattctcaaagtaaaccttgtaccttcctctagacaatacttttgatatagcaccttcccaccaaccatcattataataggcatcaacttcttcatttaggctaaaagaatcagccataataatttcgggaggaactggtcttatgtttcttctctcagcctcctcacacaaatacttctcaccagtctctgtctttatagtcttgtactgaatatagtacttgtcattctccataattctgataatactagctgtataccatgaaccttctagtccctcttcctcgttcctgatctcgactagagatcctacctcaaattcctccattgtttttgcaccattagaatctgacacaggggtctgatatgtaaaccacaagtgattgaatgagtaagtatagtatgatgtaatcaatcaatagaggctaattcaaggtcatcataaatcaaacaaatttctcattttgtaagaagtgttaagagatttgagatttccttatttctctttttagtgatgaaaaacttaaaatctatagagaaatttgaagctaataaaccaacagaaacaaaaacactaatctccttttctggggtttgaagttaagttagagcaacaaaaacagtaacattagaatcataaaagaacagtaatttacaagcaaagacatgttttcacacactaccagatcagcaacaacaagaataacaacaaaagcttaggtttcgtttggtatcaaattaaaatttcacattctattatataaaactatgaacacaatctaaactcgcctaccaaacgaaccctaaaagattaaagattgaatttttacaagcagcatagtatgaaaatcagaaataattataccttaacaagaggaggaacccaatgatcatcaacccaatcacgatgaggtctcaaattacaatattggacctcgatctcatcgttctcgtacaaggaaacagcgaaattcaaacaatctttagagacattggtgatcaatccctcccaccacttaccattatagtaagcatcgacttcttgatccaacttaaattccctaaattcgatctctttggggggcgatggccttatcagagacacatcaaactctctcctcaaggactttagggttttgtatttgacaaaaaaactggtggggtatgatcccctgccgatgattgttgccggaatgaagccgccatctggggttccgacctcgacatcggagcctatggttaagtaagattctcctccattaatggaagccattaaagatttgatctttttacagaagaaaacagttgcctctttttttcccaaggttagagaagagaagagagaccctttgaattgaaaacgagagctttcaagagagacccaaaaacgtaatatttacacacatctttataaattccaattatttacactttctatttaaatcatttttatttggctaattagcaatttttccccccgaactttgatatataccaaatcatgccccctaaattttttggtcgttaaaaattccccatgaactattgagatt

SEQ ID NO: 301207 - DNA, 2886 bp, Cannabis indica
  modified_base (2743)..(2743): a, c, t, g, unknown or other
tgtgtcaagttatttatttttctgtaaatattttatattcttcctgttctgttttgttactgtaaaactggtttctgcaataacagaattacactctgcttctgcagacgcatacagtttatatttgcaaaaacacggtttttcaaataatcttgaagctaaagaatctggcctagtaagaagcctccacaccgttgcttacctaagagaaaaaaagttaaaatctcttaaattggaaaaccccattcctccatcttttctatgtttacaaagtctatctcatgttatccaatagagtccttatgatcaccatttgaagattgtcaccaaaactttgccattagctgttcaatgtctctactaatctcaagaggtaaaagcactcacaatagctaatataaaatagctacaaagattaaaaaatagctaagaattaaaaaaaaatattgttgaaggaattttaacaacaccaaaataaataacatactaataatataaagaggatatgcgggagtattcaaactaaggacacaaaatactaaaaaataaactggaaatacaagaacacaagataatatagtggtttagtcaggtcacggtctgcctagtccactgttgcaaagatttttatccttgtccatttcatgttagatcactcatttatatacaaagtaagtgtcttttgattacatagagattgaattcagtatcaatccgtttgtacattgaattacaataattaaattacaaaagccgtaagtataataaatgaaggaaagtttcagcttaattcactaaatttagcaacgtatgcgatttttatagtgtgagttggctgttcatattcctacataagctcgcaggcttaagatgcatacaagactagtctagtttagaatgtctgcgccttgtttaagtcgcttatactgacattttgtaataagttggtaacctaaggcatgcaagtctttatcgggttatcgaggttgttgggtcatcttagaccagctcgcaaagtaaagaatcgatctttacaactcgcaggaggatctcgaaagtcctcgcatatatcttggtatatgcaagtctaaaactgtttcttgatcctacgctatgcgagccatacgaatgcgactagactctgtcatggtcacatcatctcgctgaatctagttcaggcgaggttcatactcgaggggtctctcactgacatctcaactttcctcgaggagagtgagtacacgtgtcattttcgtaggagtccggtctcaagtttttaggtgaaaaaatctcactataacaaaaaaaactcaaaaaagtacatttaatagatgagctaaaacaactcaaaaatttaccttatgaatagtgttgagctaaatgtagctaagagttatcttagttttagtgcttagttataattttttattaggtattttatttaattgtaagtgtaaaaataaataaatattatgtaatatataatattttattacttgagtgtattataaatatattatttaaatagtttagagaaaattataaaaaagtttatgtataatataatgtaaatatatgaagtaaaataagaaaaataaagaaaaataaagttttaataaagtattttaaaagaataaaataaaaaaattattgaaagtgctctaacaaaaaaacattcattacataactaggaagagtttgcaccacccacttgattaggatttctttaccgccctttaaaaagaaatttcccttcccatctatgtaaccttttgctgaccttgtctgttaaaagcatgtttgattggggtagcttaggagaaagaatgtggggttaaagtggggtgaggttttttccttttaagaaattctttaattagtttaaaatgttaaatgagccaccagtccatagctgctattataaaggtgacttagattggtgatgggttgacttgttcctattcatagtacttgaaggcccaagtaaaaactccccacttcggcagcagccacatggagaagattacatagatgatcatttaaatgggttgaagtaactcaactcaagactagtactagaatctagaatagatcatttataggaaacacatatgttagttcctatactcaattgtacggaactattagttaatgtaattcacaagcaaactaaactaaactaagtcaaatcatattggagcacacccaccaaaccaaatatccaaacatgaaaaaaaaaaaaaaaaaaaaaatcacacattttatttttacacccaaaacagagtctgccttagttataaaaaaattcactataaatacacataaccccaacaccaccaccacttctccctataacttttcctcttttcactttccccaaatcccctcttctctttttctctttttttatttttattttttttcttttcagatactctgttttcgaatttcttctttctcagatcaaaacgcaccgtttgatcagccatggccaccaatcccaccaccactaacaacaaaaaacagccaagtattcccccaaaacgtggccaaatcaaagctcgaatcttcgacagccttgtcaaaacagtcgtctcaaccgtcacttcaagagttccaacctctgaaaccaccggaaataccccatctccaccggccagctcctacaactccgacgccaactctgaaaccacctaaagatcgaaactttttcaatggggtttgaaaaaaaaaaaaaaaaacntcttttatatgtcttggtgtttttgagctgagcatattaaaagtcacccaacttttccagtcctactgttttatttgttttggtctggaaaatataaattaattgtgtattagaatttagaagctatatatttatgatccaat

SEQ ID NO: 301208 - DNA, 4093 bp, Cannabis indica
taattttctgtttttaaaaataaaaaattactttttaattatgatgtcaataataattgttgaaaagaattgcatggcctttcccttccattagcggacttgtctctctctaactctctaactgtctttcttttttgataatactgtctctcaagttctttctaccacaccacgattgcaccactattacctcactacggcggcatagctctaggctaatattgtcactaccactaatatcgtttttgctattgacacttccacctcctttctgaatcttcccattgaagcaccacttatatatactttttttatgttaatgaaattcaatatctaacctctataaatatatacttaaaacattaatttaaaagttttaagaaatgatttattagttttgtttgtagttttttattaagatctaaacctttgaaaattttgtagaattgtgatcaaaatgatgtttttgcgatgatttcatttttcatatttttgaggtaagaaagaatgcattagtcatacttctgtgaagttttcatgggaacgtgactaatgcatcatttttcgaataaaattatgaaaaatgagaatacctgtagtacgaggttatacaacaaaaaaaaaaaaaaaaaattaatgttcataaaggtgttctcaattatttttttcttttctctccttacgatactattacgatattgaaatcttaattttgatgttgtttgaagaaaacatcaatttgtattttagtaattgaactttattattagttggtttttttttttcaaatccaaacctctaacaatcagtagaattttgaataaaatgatgtttttacaatgcttattggacacttccatttttcatacttttgagatcacaaatgatggctttgtgatgctttcatgttgacttgacatcattttacctcaaaatcatgaaattgagggtgttcctagagtgtcattggagcatcgcaaaaaaaaatgatttgttcaaaattaagcaaatttaaagatttagatatgaaaaaaaaaaggagtaaaaccaataatatgtgttcaaaacttttaaatttaaactttttatcatcttctcaagtattatgcaaaatatgtacacaattttagaaaaaaataaatcccaatgagctaaaatttaattagtaattaaaaaaaaatatgaatacctttaaaaaaaaaagagctttttaatgacattgtttattagtcattgaagacatacaatgtctttcataagagaagacgttataattggtgtcattgtatgttgcctcgcttatgatatttcatggaagacatcgtagataatattttttacttttaatatttaacatttatatattattaatacaattaatttgaattgaataaatttattaatgtaattgattataaacagcaaaataaattaaaaaatatatatattcttctataaataaataagtataatttactagacacataaatgattaaaaaaagacgcacatataaaaatcttctaatcacttttgtttttctttttaaaaaatgttaaatcacaacagttctcccttaactcgatggccttgaaacacagatataatacagtcattttaaatatacaatgctacttttcaagcatcactctgacaaagaaaataagagaaaaaaaagccatagacagcaacatataagatagtaaatcgtgaagcatggaaaaaatcgtcgaatgagtgttgataaaagtgttaatttctaatagcggttaagaactgtcgttaatgatcattttcaatgccaaaacaaccgttaatggtcattttcaatgccaaaacaaactttagtgatcattttcaatgccaaaacaaccgttaattgtcatttttaatggcaattctcacatacttctaacaatggtcaagaaccgatgtttaaaatgattatatatgacaatttaatttttaattaggaatgtcaatcgggccgggccgggccgggcccgacccgccacaaaccggcgcggcccgacatcactttggtccgacccaatctggcacgactccttcctttggcctagcgggtcaagtccgacccgagataagtcgggtccgggttacggcccgacctgtttaaatttttttttataaaaaaaaaaaatcagtttatttattttaaaagaaaaatagttgaattaattaggtaaaagaattttaaatacaaaatagaagacatgtttaaaaaattgttaaatttttcataagttgattttgcattgtagaggatgttgtttttaaattttaagtagttttttttatatgtctaacaaagaaggtaaagccaggattgaaaacctcctggttggtcatctatttaaagtaaaaaggcttaaggtcatatataaacattgttcaaaagtaaagggcctataagccatacaagaacaaaaaaataatgtgcaaaataaaaccataaaaaatgaacataagtttttaaacatcattaggagtaacaataagggtaggaagattcagactagtcggatcctaggcagcgacatcagctgggaaggttggagcctctgaagagggttctacactctgaccaccaacaggctggccggatggtacctcacctaaaggctggccagtcaatgtctccacaggctggccagccaatgtccccatgggctggccagtaggtgtctctaaggtctggctagctagcaccttgacaccctggctgacctgctttactagaagtctactcttgtagagctccctccctcgctaaagtgaactctcacagaatggcaactctatatactttatattgacatcggggttgtgtagaaagacctcgtaaagcacctccgtggataagtctaagtacttatccttaatcgcatgttgctcatcaagggttgcgtacttctccttacactccttctcaagttctttcttcagcctggagttttcagtagtcagccttgtcagctcttagtagcagagaccaagcagttgattcaggccatcatactggtgttggacattgcccaagcgggtcaatgttgagtctagatcaacatgcacctttgtaagggcatcctcatttgccttgagttcaacttctttgccctcaagtttcttcttgaaggctgtggtagagcctttagccctggcatgagcatggctaagcatcagcaagacctaaaaccaaagagaaacaaagttagaaaagttgtacaaaaggcttgcatataaaaagttagagaaataaattacttgcaggggaggcatctctgagggtgctcattgtcaagtaatccagggtctagcatctagcttctagaactcctcatcgacacttggaaaatttttgccaagatagtcctcggctacctcgatcgccctatcacccttggacaaacaagtcacttggctatgcctctgggctgccttgcctgatgacctatgagggggaggggtgctcctcagaggaggatccatgaccacaggctggttggctgggggagggcctgaggagggggaggcaagacagactgagtcacatcagaagactcaatggttcaggccaccttggtttgagggtggccggaagaagtgccacctgaaggtcccttcgccaagtttctaatcctggaagtcatattttcaaaaagaaaagtaacaaagttagaatacaagttataagtactaaatgcgagagaaagtaaaaaaagttaataacatctaaagggaaatctggaagcctatcatcctcagaagaggaatcattgggactatcttcagaggcagcaaccttgcctttgtctcttgacgcaggcagtggtcgggcaagcctaccagagtcttgttctccaggcctaacaacacgggggtattatcagtagtgcctcctcgtgccaagtattgtaaaagggccctataacgccctaatctacaagggtgccacatgtgtgcttttattaattagtttataataataaactaacagtttaagaaaagtgtggtttaattaaaactaacaagggtgccacatagaatcatatccttagaagattgatgagctag

SEQ ID NO: 301209 - DNA, 1901 bp, Cannabis indica
cctcctactaactagaggtcctatatcatcaagtagtttctgaattttttgccatgggacatgtgcttgcttgggtttcaatctaatcatcctttttctatggatcatattggagtttgttagttgccctttatgcagattcaccataaaatcggatccatgcttttggatgcagatctccactaccggatcaggactccagaaagggagcagccagccagcctagggaaatggccaaaggttggctctcttatatgtactgtgtttaatttttcttaggacatctaagaccaagttttttcatttcaaaattcctcatctaaaaaagcccaaagcccacaagttgctgctgctctgagtctgaactgaatatttgtttatttattttaattataagatatacaaatagtaatactagagagagagagggtttatcttttaggggccatgaagcagtgtcggctcagtgtgtggattgggtttgtgttttattaataatgtcacactactgagcattattttgtttattcttactttcctggaaagtagtgggcactctgagtctgagatggcaaacaatagtacttatattttatttaatttgaaaattttaagctttgggtgtgctgaaaaaaaataaaaaataatattatatttattaagtaggttgtctttactgcttaatactaataatagttgggtatttaagctttaattgtgtttattgcttgcctattgaagtatattgacattacctaattgtaggggtgttttgtttgtatgccccaaatggtggctgcctattattctttggcatcaggtaatataatcagtaaacttgtctggttattagtcctctctctctctctctctctccctccatctagcttctttgttataataagctttagtccttttatttatttctatttatatatacatatattatgaaatgaatggtagttagaagggagttactaccatataaaattattattttggttcctttgtcttgctcaatttgtctttaaacgttactacaagtacagtctggtgtcctggatttcctctttgtatcagaaagagtgtattggttaatgctttgaattaatgatatttctagctctcggccccgagctctttgctcttaggtggtgttctctgaggcgctattttctcgaagaaaaagaaccaaaataaacgagaccaagtaagcctattagggaaaaaaatctgcaagctttgacaaagagcaattatctgaataggctgatgtggtgttgtagttatatgcctttgtggaacagttgcataaagagagaagttatttcagcagacattttggtaagaatcaatatgagatgtatttaaaatccaatctacaatgccaaagccccatcactaacatttagcccatctattctaacccttatggctttgggcaaaagggtacccaaaaaagagatttggatggttgtcattgtcaattgtcattctcctcctacactacacctaccaaatttacaatagctgctctgctgctatgtttgatgctagtatggatttgagacccctttattttcttctactactaatcacactctccattgaacttctttttacactagcagctccaataagcatgcttgcttaacataactttccattttaaaacaacttatgcaaagcatggccatccaaacaatgtgaagattgcctactcatattgatcttctttaacccaaagtacaagattttgaagttgcctatatcacaataatgagggaaatctgtcaacctaataatgtgaaatagtgatttcagcacaaaaaaaaaaaaacaaaaaaaaacataacgacaatttcctcaacagtaattaactaaacaataaaactaataat

SEQ ID NO: 301210 - DNA, 4165 bp, Cannabis indica
tttttttttttttttgataaagattgagagaggagcaagaatcacaaacacaagaaattggtggtttcttttaaggccagccagtcagtcagccaagtctctacactcaattaattttttagctaaaaaagtgtgttaattccatctgttgtggactgtacatttcattttcttcttattcaactttgaaatcccagaaacaattcaacttttctggggacaaaatacaaaaaagaaagagaaaaaaataaacaaataaatatctgaaattgaatacaaaatgaatcacatcagagagagaggttcattctttctggggaaagaaaaaaaactcatttacaattttttttagacaaacatggttttgacttttgagtgggctctggctatgactttgatctatactttcactagaacatgtaacatgtcatatacatatatatatttatatataactgtaactatagattaaaaaacaatgatgatatgagaaaaaaaaattaaaaaagatgcaatccgaaactgctgaagcattgtactcctggcaacgatatttcgatttgcagtggctgtgttaaggaccaaaatggatgaagcttcctgctgaataactatacatgaatggccagcaactgctgctgctgctaaggttaatagttttggggtcaagatatggtacctttcatgtgtcttctacaaaaattctgaagatgaaatcacgaaagcgtttggcatattgttttggatcgacggcagagattgatgttggatcatattggaacgatttgtatgcatgctcaagcttcttgctaatatcatagtcttgtagtatgtctattataccgaaaaacaggatgatgtcgtataattctcctgttggttctccaaccagttgagtctcgtaatcagttcttctcgctgtcctttcagctcgtgctggcatgctaatacctaacctaaccgaagccaacctaaagatcaacgagaaaaagagcgataataggtgagatataagactgacattgtgttcctgtgctaatgtgagttttggattggaacttttagttttaactattgttaaatcacgaaatataccgagtagggtctgaaataagctgatcaatatcggctctggacgtgcaagggttagcttgattgtcaagatcaccaaaccctgcaaggaaagttcacacatatttcatatcttgagaaaagtttcatattgaaaaacagagaaaaaaaaatggaaagagatttactagatgccaagaaataaccaggaggagtattgattccagcagcttgctcttcgggtgtgagcggttcttgatatgaagcttcttgaaagtgaagtccaaccaataagctgtaatccataatcctttcttgctcaagaaaatcacaatctctatctacttgcctgcatcaagaaatattaaatttacaaactacttgattatgaactatggatcaatgagagtgcataatgctgaaaaagaattgaaagagaagctcaccgacaaaagtcttgaaaccaaacattgtgtaggcggaatatgtaattgagatcaagatctttgagagttgttgttgcatcaatttctgcctctggtttatcggtcaagcgtccgtgagaagaaccttttaaatcaaagcgcctatgaatgtgatactcagagcaaaagagattccccattatgacaaatcgcacctggaatttcagtaagttcatgaattagatgaatttttacttaagtgccaccaattagactttccatgcctcaaacaaattaccttcttctgagtagctccggttaattttacacaatgaaggccataaaatttggtgacaagggtattctcgaaagcacggacatgtttatagtaagcaggaagcatccgtaagagaacctgagagcagcatttagcaaatttgtattagaagtatgaagctgtgataattcaaatcaaatatgttcaaagagaattcgaagaagcatgaaagtaaactcacttttacttctgctttcttcatcgtctttatcatgtagcgatcatcgttagttaggtaaaagaagctgccactttttccaggagacgaaagctctcgaagggcatcatttccacatatagatagcatataatcagctggatccaccttaaacagtttcctcagagacctgaaagcatataatggcaccatttacatctttgtattttcattatatgcaaatatgttctactagtttgattatgtcaaagctaaaaggttcatcaaaaggacaaaaaaagatgattttgcggttgtgggacatgttttagctgacctgaaaaccacaggacaataatctttccatctgaagtcacatgattggtgtggtggagtgtatttggatccttctggtggaaatttggtccacactttttccttaggatcgaatgcggaagaccgcagatcaagggatgttgttggagcaggccttccaactgaatgcctgtactatggcactaaaatcaattacatgtgatgaagactttgctgaagtatacacagacaggttcaaacaacatattctctatggaaaccaatctaatcctacttagttaaatgttgttaaaatgtatgacttgatatgagaaaacattacataattccttagtacctgattcccaactgaagattgagcatgagttcataattcttgtggcctttagctatagtcaacccttgtttcttcactggctgtaagctgaatggcttctgtttgtagcctctgcaactctgcagctcagaatttccatacccttcaattccatcagaactatcagttggggattctctacaatagttactcactctcccatcaactgaggtcctcctaggcttcccacttgaatcatttcctctcctgaaaatgggctgtttttgcaagaaatcactttcatttgcagaccaaggaatcactttctgtgaagggaaaactgggattttttcacaagaacttatcttaaaatcattcaaatactccatgtaaacctcatttggatcaaaatcagattcccctgaagatccagattggtaataatatgttccattctgttcttttgggtccttactccaagtgcccacatagaaattcccatcagcccacttgaatgttccattccctttaggcaaattctcttcccaagacccatcatacctatctccattactccaaaccattgtaccacaaccatcaatcaaaccattcctccattgtccaacataatgagtcccattcttccattgatatctcccatgaccatcttgtaaccctctattccaatcaccctcataataatccccattagaataactcttaatcccttgaccttgtttgaaattcctaacccaataacctctataagtatcacctaaggaacctgtataagtccctttaccatccataaaaccattcttgaattcaccttcataggtggcaccagaaggccaactaaacttgcctttcccagtagtttttcctttataccactcaccaacatacatacacccatctgtccacaaatacttaccatgaccatgaggaaggttatcagcccactgacctgtataaaagtcaccattggagataaccttctcagcatggaatatttcacctggatcatcatcagctggagctacagacattgttgtgaacaaactatttgtcctcttctttgctacaaccgcttgttgtgacttacggacttttgattcccaggccttcacaatgccgtactgttctttgctcattctatttttcaacattcattcctctctctctcttcattattcaccttcctccatgaaaacccagatcaaataacaaaaacccatttctcaaacaatgcagaatcttcaccagaaccaaaaaaataacaaaaccccatttctgaaacaaacccagaagcctggaaaagaaaaataaaaggaaaaatctatgctttgttgttttgtgtgttgttttttttttctttcactttgttttgggtaagtttctttagttttgtgaaatggggtatttcagattttggaaggaatagagaaaagaaaagaagaaaaaggaaaaggaagtgtatgaatgaaactgttggattgatgggaaggagagaaaaggttatt

SEQ ID NO: 301211 - DNA, 3662 bp, Cannabis indica
gtcatcattatccaaagttacacaatatatatagtaggctggcaagatttgattaaaatattcgtttttagggggcaaagtgtgagtatgttcatttatgatgtagttgtgaaacattaaaaaaaaaatcagcaattaatgttatgaaaatgttagaaaaagtcataacataatagcacacttattaatgaaagaatatatgaggtgtttaagagaataagttgtacaagtacaaccttaagccatgcattgcagtcattgtgggaactcaagtactttacaaaagaaaataaacaaacaaaaacattatgtcaggaatacataagtttgccatttaacaaaataaaaggtacaatcaataattttttttaaaacacagagtctaaatggtatttacccttgttattattattattgctattaaggtactttaagatgcttagtaccacaagaaatagtgtttgtgaatatcatagctttgttatttagatttccaagggcagttgtatctcatgtgtcccataaaaatactgcagcttagttgtgtctcatctgtcccacaataatattgcagcttataatttggttaaacatattattagaatatataatgaatcatgttagtttaaagaaattcttgcgccaattattaatatcttcttataaattgtcttgtcagaattttaatcaccgtaagatgtcctttaatatttttatttttagtatggctattaaacgctgtaaatttctcggaacttatgttattgtaattttaatcactcatattttagaacatttctccttttagtattactattaaacacattaaggtgaccaatttatgagtggttagtggttagcaatttttatatattacttataattataatatatgaaacccactaatatcattataacatgtccttctagtattgggtaccttaaaattttctcttttcctatagcataaaattgttaccattatattccttaaaagaaaaattcttaccattatttgatcaaacattgttttgaatgtactaatagcaaaactgatgacataaaaatgttgatgcaatactagtttagtattattattattattactactactttagatttattactcacttatattattgttgatccctttgtccttttaaattgctactaaaagaagattgttgtttggttccttaatcccatcttaaaggttaaaagcatgacttaataggttagggtagtttgaactcaaagcataaaatcaatagaatccaatacataatataaacacatatatacctttataaaccatgttgaatttaataatatattatgctacttctataattgattctaataataataattaaaaaaaccaagtagtttttttatttcatcaaattagtgccacatttgtgattcttgaaagcccttaacaaaataagtgagcaaatcctctcatatagtgttatttgctttatataagtttgtttaatttgtttcatctaaaccctacacacaaacacattggcagatcctatgaaggctttttaattttttaatttgttttttttaatcttaattacttcgtataataatacttaatagtacttgtcttcactaagtaatacttattcttaggggtgttcattggtaaaactttaatgttaattttcatatatacatataaatttgacgtataacaatataaaatttaattactcatctaaactaaatgaaaatactaattagttcgattggatgttggatgtattggatttttagacacctcatccaccatccgatccgatccaattgaatatttaaaaataacatccaatccgatccgatcacaattggatatccaatgtttggcggtcggttgtaattggatcgatcggttctcattagattggttcgatttatgcacacccctacttattctatttcacatgtaacttttctttttgccaattctctttgatataagctcatttatcaagtgcatgctcactttatatattatacatatgtcgattttgtctcgtaaaattattttatagtcttcatacaaattaagttgatctaacagttgaaagtcaaagtacatcaaatcgaacctatggtctccataaaaattgagttgatttaacggttaaaaatcaaagtacaacaaaccgagtctatagtacatttcattgtaatcaaagtacataaaaattatttagtttttagcaaacaattgtgaattcttatatcttgttattgtggtattttttggtgttttcaggtagtatttcaattttacaagctaataccttagcacttttagttggacttaattggactctttcgtgcagaattccaattaaagagatttgttcagatttgttgtctttggtcacagctattaacaaaggaagagtgttctttaataagatgggtgtgctgcttgaggatgtcatagttttattgtctaaacttccgggggcaattttgtcccatatgacttgggataagagttctgccgcgtatgatttagcaaagcatgtcattcggttagacaatgaactatcttaattcgagtaggtgccgtcgccgattgtggattgctgttttattaatcattaatacataaagaaaaaatgaatgaaagaaaataaaagacaaaatccattcccatataatgtataattatttaattttctaaatattttgggtgtaagatccaacataagatgtggaccttacgcaagcaagtaatttgatcagaaagtgatattcttcctttattgataagtaaataaatattgttactatttcaggtaactgcaaaaaacttttttatggtttcatttcactcaatacaaatatatacttacctactttaagttcatatacatagctactatacatcatttatttattcttttttttttaacaatctttttatctacaaggaataatcttctttttattactactagtttggcagtgaattgtttgtattcagtattttataattttgtaatttgtaaactccattttttttttgtataaaattataattacacccttaaacctgattttagtcaaaaatattaacaaaatattttgaaaaaaattaggtttggagacctaattttaattgtttgcattcaatagagtttaaaatacaaggtctcaacggtaaaaaataaaatactattttttttataaaaattactgattactttttattttgttaaatgacaaaataaaccctatattatctaaaatggtacaaataagactattagctcaattttaaacaattttttcaatataagaaacttgaaaacaatgtaaccaattttgtaataatgcctctagattggcttattattaaattttattttgatgaaaaatcaattcagaatactacattactacttagtactattttgaaaaatacaaggtttaatttatcatttaaaaaaataaagggtccaaaataacatttattcaaaaaacaaaaaaaaaacaaaggactaatggacagacaacattcttgattactaccccatccccatcttaccttttttgatttcagtaccataataaaaacaagagaaagaggatcaaactctatatataaatttatttaattttattaaaag

SEQ ID NO: 301212 - DNA, 2621 bp, Cannabis indica
taaagaggtcatttttattgagaagtcatgtgtataatgataaactaattaatgggtcatatgatatgatatcatatatgctgtggacaaaatttctgtctacatggaccacaaattgtagttattttttttttaataatcttgatatataaataattgagaattaaaatactttgtattttcttattgaataaaacgtgggatatctagattgggtatctctatttatgtatttaaaaatatgtttatttaaagatgtaacattagttaaataattccacgaaaaaacatttatcttttattaatgcaacttgaccatttaaacaataaaaaatgatgtctccattgcatcaaataaattaaaaattaagagaaaaatatgtgcttgtatgttgaaccaataaaattgaaattgtctatatttttgttagtgctttgcttgatgacaaaaatgaattattccactaagcctgcaaattttattctttttttatataataaatatactaattaccaattaataaaagacaaatgtgccttctaaattataatgatatagaatatcaaatgaaattaacctgaattaatagatacttttatgagtaattaaggtgtaatgatcacccaaaattaaatcaaacttttatctcttttagttttttttttccctttcattttaacaaactatgaattatatttaaactgttttgattataggaaattaaaaaaaggtgtttgaaaagaaggaaaaagaaagatcacatacctgatttttgaggcttaagacgagaagtaatagcaagaaaaactcgacgaacagggaaaaccatcttgttccagaaatccattaaactatctctcaccttcttcactttccttctacttttccttcttcttttctgctgataattccttccacctattctaactactatactccttaaccaggccagaactatagtacgtagtactactgattattagttatcgatttccttcgtgggaggaaaaccaatttccctcctccaaaggaaagagaaaactgagagagaaattaagaaagaagagatactagtaagagttagttgtatatatgatatatgaggtttgaaaggaaaagaaaaagaagaaaaggaaagttgtgttgttcactcaagtcatgtgtggagtatttattattattaaaatttgatgatcgatttctcaccgacacgtgaggctgctctccatacaaatgtcactgcttttttaattaggtggatctatcattttcactttacttataaatatatatatataattaatttgttacctgttctttggattattattgtatttaatattatatagaattgctgatattttgttattattatacagtttattaatttgtctagttgtggggttaataggtaagtagtttattagtcgatatttttcaatggaagttattatagaatatttgttatatggtaaaaaattgattatttggtaatggactaaaatattctaattaatgatcatcgtttaattatttaatattttacttactatttttatataatttttttttagatttttatgttttaagaattttttttatatttgttctatgaaataatactaaaataacaaaaaaaaattacataaaagtaaccgaaaaataacatcaaaacaataataaaaaaatcaacaataacttaacaaaaatataacataataaaaatacattaaaaaaccgtattttgtgtaaatataaaatcataaaaatcgtaaaaatattaaaaatgttacgattacagagactttgccaataagtctaattcaagaattgttatcaagaattgtctcttttgatacttattatttcttggtgttagttatttttgaggtagtattacaagccaaaatttgtgctcttttgctatcaaacaaatgaatgatattttttagtgagttgcaagtattgtttgaggttgctataactttattgtttatattttttagaataattttgtcccatgtgacttgtgatattctgcagctatatagctcataatttagcaaaacatgccttcagttaaatgataaactatcctgattcgatcgaggaggtgtcgctaccaattataaattacttatgtgttgtgattttgatcaccacgtttaaaaaataataatcccaacttgtgataatatttacccactaaacattcatttccttattgtttcaataatattataattatttaattccttcttcatcatcattttgcgttttgggacacggcggtgtttaataaaaaccaaaacaatagaattaaatagatcggtcaattctaaatcgatggctggatttgaaaacctaaccccaaaagtgaattcttagtattgaaaaaatttaccgtgtgctaattattgtatattttacttaaaacaatagtgcccttctcattattattggtggcatgcactaaaaaaatacttctctatgtatttgttagagaagtgctaattataacttcttattataattttttagtcaaactttactttcgaaatcatatgccgaatattttttcatagcaatattcgttatagttacaatatcatccctgtaa

SEQ ID NO: 301213 - DNA, 1254 bp, Cannabis indica
gggcataaaacccaacaaagacaccacgttcccagaagaccctttgggtttccctttatattcttactcacaaataaggaaactccaattttcagatcacaatagtgcatcgaatcaagattaaagaagaaacatcctacaacaaatgttatgcaattaatttagattaattacccacaatcagtgtgcgcgatgtttaccaaattaatcccaatcttatctacctagtcagcagatcgtcttctccatgggttggacttcatgagaaagcccacaggtattctttaatgttaactcctcagtagagggaaagggaaaacctaatgtaattctcaaactactttaaataccccattaatctcatatattaaggattaaattgtcttgtatacttcgctcaagcaaacttgaaaatatacattatgtgtatttcctaatgcatttacaagcaacatcttactgaataatattgactcgtggattcagactagttaacgccctaaacacgttaaaaactattttctttttttttgtactttctctgttgattatttattcttgagttcttattatttttattctatttccaaaaatcttggcaaacatttatgtgctttcattaagagctgaagaaagtagtgagaccacttgaagattacgttcgagtaatcatggccctcacccgaaccaagtctggcctttgtttcattggttctagtaccagagctggagattctagtgacccccaagaggtgactagtcatcacaaaagccatcaaggcgaggaccagaatctagatgctgtcatcgttgaggactcaaaatcaagagaaagtagttctgaggacattgaggttaataccaactacacaccagaggatatgaatgaagatgaacttgaggacaatactgggaagaaaagccaacctaatgagtcagatcccatggtcatcatggcgcgacaacttcaattggatgagagcaagttaactggcaggatcaattcaacgagttgctaatcggcaagatgacaaggatgaaggctgtgatgactgccatgaaaaaactatctccacacatactagctcctccagcaatagatgcacctaagaaagcaaatccaaaggaccctcgaactttaggtgtctgcaaagggcaaaggaattgctatggaagaattaaagaaggctccttctctgaaatagcctaagaagtctaaagctgctgaccaacctcaatagaagaggaaaggaa

SEQ ID NO: 301214 - DNA, 3074 bp, Cannabis indica
tatttatacaaaaatataactaaaagaatagaaaactaaatcaatgtaataaagaaaatacaaccaagtgatgataattattttgatgatttggacattcataaataatatttcataacagttattaattatatttttatatattttaaattttattccaatctatttctatttcaattttcatttatatttttagtttttatatttttattcctcccaactaaatgcaactttaatttcatttttccttaataaaatattgaaaataggaaatagaagttgaagttttcatatggtagttgagaagtttttgtagagtgaaactaagaaatagaaatggaaaaaataatggaagtttttattatatattataattataacacactacactagttacttcaagaaacgttatatattcccatgaaagctaatttgcagcaattatatatctgagtttgacaacatgtccatttcacaaacctcattccaactactatttaagaattatatattaagtctatatacatgtcaaacaaatgcaaagtaatttccagattcactagtctaccaaaaatgggcatcgatcaataaaggaaaaacaaaacaaaatgactcaatttctttttctatttatataattgtttcatttcatatatgtatatatataataataataataataataataataataataataataataataataataataataagagatcaagtattgataacatgtataataataggttcaattttgtaagaaagcaataaatgaaagtgtgatgaaataatgatatggttatatgtctttctccaagataatgatatgtccacagctcacccactcaggagaggtgggtttgtatagaaaacataaactgattcataccttgagaaatatttcatattgtaagggaaggaaagtaaaaaaataaaaaaagctaccaaactttcaaaactctgtatatataaaataaagttggtaactcatgaagaaatatagggtgacgaaaatgaaagccacctaaacaaaataaaacaaaaaatatatattactagattacttctcatctagtccatatagcaagagctcactctagctaggctccccaattaaacactgttttttcttcttcttcggcctctgtgtcttattatcataatcttccaatcccagctataacgctttcaacttcgatcggacgacacaacatttctttcaagttatctattttggctccccaactactcctccctcgtcaactcttccattaatttgcatgtgtaagtttcaaaccttttacatatatttagtcttacttaagaaaaaaaaaataatcttaactaccaccagtccacctcacgacgttccaaccgttttcttacaatatattatatatctttatatatctcgactctctcaaacaccccattgtttttttctttgattttagcctccattgatcggtagctatgaggaattgcctaagggttttacttcctctactgatttctggctttgtttggaccatctctgccgataataatgctgatcagggtcttcgtaccgagagaatttcaggtacgtacatattactacttattcttcaaatcgaatcaaataattaaagtattgtaatttattatgaagtacaaaatgcatgaaagaataatggagttttaccctctaaattttaacatgtaccaaatcatgtcccataaatttttttggcagttaaaaattcttcctgaactattaagatggatagatttaagaactttaacttaattaatttcattcaattgtactatttcagtaattgtttatgtactaaatcatgcttactaaattttaatatctaccaaattatgcccttcgaactttgatatatactaaatcatgttccttgaattttcattcaagttagattttttttactaaaattagacaaaagtccttaaatccaacaatctcaatagtttaagaggtatttttaacgacgttaaaagttaaagggcatactttagtacatgtcgaattaatttcagagtaaaattcctaattagcctaatacgtaatatatatacttgcaggaagtgctggtgatgtgttggaagataatccaattgggaagttgaaagtatatgtgtatgaattaccaagcaaatacaacaagaagattctccaaaaggaccaaagatgtctgaaccacatgtttgctgctgagattttcatgcacaggtttcttctgtctagcccagttaggacaatgaatccaaacgaagctgactggttctatactcctatttacaccacttgtgaccttacacctactggcttacctttaccatttaaggctccacggatgatgagaagtgcagttcaactcatctcatcaaattggccttattggaatcgaacagaaggagctgatcacttctttgtcgttccccatgattttggagcttgctttcattatcaggtgataataataattaagaaaatcatagccagattacggtaatagctatagacactctaaaatgttgtaaaaccaattatataattaatttgtaggaagagaaagcgattgaacgaggaatacttccattattgaagcgagctactttggttcaaacattcgggcaaaggaaccatgtgtgtttgaaagaaggttccattaccattcctccatatgctccacctcaaaagatgcaagcccatttgatcccaccggacactccacgctccatctttgtctatttccgtggtttgttctatgatgttaacaacgaccctgaaggaggttactatgctaggtacgtatatgtttacatatatttatattcccatgctctatgtctccactataagagtgtctttaatttcttatccctatttttatgagaatagcttgaagagcaagagtggtgtccaacacaacatgaaagcatcatatcatatcgttatcaaccagtctaatttaatgctccatttttatatgtcctcatgtctcaactcaaaagaaaaaaaaacaattgaactaaaatattctatttgttac

SEQ ID NO: 301215 - DNA, 2698 bp, Cannabis indica
ttaacaaaaaaaaaaaagttaattttgcaccgttggattgatctttccccatttcttaccaatccaacggttacaatagaatatgatacactgagtagaaagtagagaaagaccgaaaactggagtcaaaattgagtgtggctctgggatctgaaatctcacggatcaaacccaagaacaagctcaaatttccctcttccgcaactcgccgccgtctcttatggtaatcaacccatcacttttctgtacgcattttcattttcttcaattgttttgcttttcgattttaattttatataattttcttattgggatgaacgtgaaggctccaaaaccgatcacgagtccagtcccggaagtatggtacccaactctggcggtcgtaatgctcgccgtcggcctcgtcctcaccgctttctttttcatgtaagccacatccttctttaccaatgtattgagttttagctttccttcctcattattattattttgttcaaattatgattacggtgctgaattagggttttgaattcaatttcgcttatgttcccagatttttttttgtgtgtgtggtagatccgatcatctaatgtaggagagaattaatattttttggggggtctgaagactgaatgtccatttagtgatttgaagagcgttgcaggagaaatatctggatattggtttaacattaccaaattatgagtctttttatcgttaaaagaaagaaaaagtgggatttttttagcaaattttcggagaatgaaattagaacataattggaacagaatattgagaatggtaaattttctctttattaagtatcaacatgcagccatttgaaagagaactgcttaattgtttgttgaatgtttgaaatggagatctttcaaactctggttctgatagtaatcagttatataacatgctttgaatagagttaaatcgggggcattgggtactcacacttctcctactcccacaatatctgaggtttgagtctacctaggtagtcggtacatacatatattgctaagtttcgtgttcttcaaatattgtaaaatactagaactaggccaggatctagttttataatttttaactaatcataataataatctttgctagcaagaatcttgagaatattaccattcattgtgaataatcaaacccatatctcatgggaccaaacatgggcttcacttgcgtattgatttacacaacacaggtttttacctcatgagttttacacttctacacgtcttgtgcatcgtatttcttgtcatggtggtagtttcttgttgagctttgtatgtacataaaattagagggagtttctataagaaatttttaaattgctcttggcagaacttgatatacttacagctgtaaaatttagttttgataggtagaaaaaagtcttggggccacaatgtgagcaacaaaacatacttgtgcatgaaaaacctctcctattttgtaaggaatcccacacaaaaattgatagtgtttggaaccttttaaccactttcagctgcactctgaacatttttcaagtgttttgtgaaacaatctttgtggcacggctaaactagaagtatttcttgattgcagctatgaagcaacatcttctaggaaaacccgcagtcttgccaaggagctgacaacaggagcagtagcttctgtattcttggtaggcctacaatttctttttgcaattttattaagattctgaattactgatattgttgaatttaatctttctctcccttgtttcttttacctggtatgcagggtttcgggtccttgttcttactactctcttctggtgtttatgtctaaattttaagtggcaaaaatcgcaaaatttttttgagtcatgtaaggatttcttgaagaataatataaatgacatataacttatgttctgtttcctgaaatgagattgagaacctttaccttctttcacaggaaatgggttttcattcgtgtgacagtgattactttattatgcattgctataggaaatttctggtttattttttaaattctagtaacctatttccgaaacagtttactttcgcgagtttaagagttttttttttcaaagtttatagtagtgttttccagagttaagttagtaaaaacaccaaggaatatgtgatcttctttagttaaaggaacctaggaaaatattatttggtgaatcctttggttgtttattatcattaacctttaatctccagagtgctgtgctcctgtcggaatattaatatcaaatgaaaaactttacatataaaacacctattcggtaatatatatttatataaatttatatatatatagggaaatttgaaattatatgcatattagggattaaaattggtatcctaatctaaaactatatataatttgtaaaatgggataacttttacttaaacccaattttaccccctccatttctaaactctctctctctctctctctctagtcgttagtaattgccaccaccacgtacttcccactacgaacgaacgaacccaccgaacccacccacccgacggacggaaccactccactgagcacgcgacgacgtccctttcccttcgttatttttttaacttttttttactttattgtattatggtagaaattgttgttagttgtatagtagtttaggttaggtatatgtgctatt

SEQ ID NO: 301216 - DNA, 1155 bp, Cannabis indica
ctggtaaaattaattccaacatttttttaatctcaaactggaatatctggtatattcagcttgtaaccagtcgaaaaaagtaccttgaaccgatgtggaaatactaaattaatccagttgattctagcaagcttttgagaatgagcatgtaaccaaaacatgagaatgaacatttacatcaacatgtctagatttcaactgagttttagttggtaagcaatcagtgcatacgttttttaaaggatagttatgagatgaatacataggaaaatttattaatgttagggtaataaataaattttggttgtagcttgatgaataagttgtgtaattatgtatttatgctcttgactattgttataagtttttctaaagtgtgaaagttgttagtttgtgatatttttgcaaggtttaaatgttacaaacatgagttcaagcccattaggtatttcagccctagggccatgggtttgatttgtctttaattaagtatttgttagtaatagcatcttttgtttatagaataaatgatattttccaaatttacttggaaaagatgacgaggattcaataaccaaataaatagatggatttatttggtatttataaggggggtgttagataaagtcactacaaaatacagttacttttactaataattttttaattagaacattaattttttgtggctaagtatgacttttagtcataacaaaatgttatttgtcactaaaatataatatttaatacaagttattactagtttagttttagtcacatcaagtattgtgactaaaaatacatttagtcacaataaattgtaatttttgtgactaatacttttagctacagatcttttagtcacaacataagaataataatttataattagtgataatttttatttgtagtcataaattttgttatgactaaaaataaatttttttttgtagtgagtatctaaaatggtaaatattttactttttgcagtatattttttacggactatgattaactgtttttacaaacttttttaatgttctaattgcatttattatagtctcaaaaagtaacataaaaagaaggtacatttataagtacatacagatttaatttaggtggtgtttggtaatatttttaattaattttctgttt

SEQ ID NO: 301217 - DNA, 4235 bp, Cannabis indica
acaattgaaatcgaagtcctaatttttatcaactgtcaattttctttaattatttgcttctgactagttttcttatttttaaatatcttttctgaattttcatttaacgagatagaagtagaagtttaatgttaacgtacttaactataatccctgtgggatcgaccttactccttgtgagtttactacttgtaacgatacgtgcacttgcgtgtgcaaaatatcacaacaatgaacgatgataaagggaggaggcgacttgaaagatagtttctagggttttttttcatttgagaattaataaatgtgttaaaaacaaatgctaaagtgtattaattaatagctatcgtgtctttcactaatttctcaaaataaatatatttttaaaatattactaatagttgtatttttttttaatttcgattatgatatagtgaagcgccaagtgcgtcagcacacatttatccaatcacacttggcgtgtcactatatgttaatatttgtttttttaaaaaaatattagaaattatgggagtatttattgatgctcatatttttagtgacccaacttgtataacactatcactgaatttttagtctttttatgtgtgtcactataactcacccttaactctttactgacccgcacttttatgcggatcactaaagagtgtcactaaatagtcaatttgtagtagtgtgtcttgtattggtggtgtccttagatttatcattatgtaaaatggtgtcaaggagactatcactcacattcttctcaaaatgcatgacatctaagttgcgctttaaaatatttgtgctccaatactccatctcgtagaaaatacttttcttcctccatgttaccatcttccacaactcttctacgtttcacgatcctaaaatgttgatcatatcctacaatttgcagtttgagagcattgacttaatctaatatatcctcttaagtaaattctctctgagcaggtgttctttcaatatttctatcaaacttagagtcccttctcattgcatgattactttgaaagaaccttctatggccaacataagaggttgccctaattattggaatggaagttgtgttttcattacaagtaggacaagttttataaccttcaccactctatctagacaagctactacgagcagaaaaatcattcattgtctacaaaagtgctgcatgcattgtaaagatcgttttgctcgaataatctttggtgggtactccattattccacaactcatttatctcgtccatcaattttccagcgatcatttctcaatagtgaatccaaccatgaaaaattggatcaaccatcaacacttagcaggtagaaaggtatgaactgaaggaggattccctcaggggccacttgggaagagaatacgagaggatatccgagatcagttagtgtcccgaaagtagcactgcatggtacacttttgacaagattccaggaaatcaagtggcttgtcccccgtgtcagacattggaaagactcacaaaaaaaggagatcaccttatagggtggacgcccactattttgacattccttattccccacgatggcttatgcacacctaccaccatcaacaatacctccaagtacgaacattaaaaatcttaaattggggctctacctacccgacccaatagcctagattatattatattttacctcattagtgaattttttatacaaaagagaactcgaatggttttgggttcgcctagcccatcagcaatttgcgtataaacatggcattaactttttatgcaaagagttaggaattctaatgttaacattctagaaatataattgtaatctccatatagttaagtgtttaataatagtgactggtgtactaatactcattaatgccccaatcatgtaaaaattagtgtcaaattttcttcatcaaactttctttaattagcctaatatttatttaattcagtttttaaaatttcagtaaacatatatattgctgactattttatttttagttgtatgatcataatttcaatactatacaaatatttatatataaattatttataaataattcatcattatatattaaattattcaaattatatttaaaatcaaaatatttttacaaaattttttaaaacatattctctaataattaatatataatattaacatccagccacacaataattaattagcttgtattactttttttttagttaatttactgaaaattgatagatcaacaagaacacagtttctacaaaaatataaatttctaatcatttgcaaggttacatacaaaaattaaatggatcaaaactaattgaacaacattaacaaataattatgtcacccaattccctacaataaaaatgtcgttcttgatcgtccataagtggaccacaaaaataaaagctttgagaaataaactatatatctaaacatgctgaacacccatcaaatatatagtcatattgaatagtaataacctatcaagaattaatattttcttggtgaataagtttaatcttcattactaaactagaaaaccaaaaacaatactaatagtttatataaatggaagctagcagccataaccaacagacgtgtgtctttttgatttgctcattttactcctcgatatccactttccgaacttctttttcctctcatcagaacacgcaataagtaaaattacaaagaaaaaagagattgtgatgagatttatcattctcaacacatgatcaaacacatcctatcatggaaaatcccaacctaaacaagagttaatatatccaactcattatcatttacttactatatatttttcttttcaaaacttttcgagctgtaatcataaatagtgagaactgttcattattaataaatatatatgtagtagtaaaggaatgcttttctcatcatatggtactaatgctagcatgcatataaatagatatgaaccattaacattatctttcttacatacgtaccatgatcacttgatgaaacttgcaataacataactagattgttcattgattagttgggtatataaaaagccaaaacagctacagggcaactcctcttggcaaggcagatattataattgatttaacgactctattatgcaaggaaaacttcccatattaaatagaatcaaagtaatgcttgccacagaggggatgccctatgactggatttgcttagtgaactaacttgtgcttgcttggcattttccatgacttatcaccaacccttttataggccttcatacacattgtacgttgctaaaagaaagaagaaagagtaccaataatatcaatattgggggcatatgctgaacacacttgagaatatccatattcaaataattagtgctgattttgtttttctctgtttttttttttctgatttaattatcatgtctacatgactgggcttgaaaacgatctctcagaaatacgattccccacaatttgaactttaatgcatagatgaatgaagagaaagtgacacgagtagatgtggaataataaagctatagatacatatgcatgagtaaacaatgacgaggcatatcctaagtttatatctttctttttacattttgttattactcttagcttttcgttgtacaagggctagcggataccaaatccgcacgcaggtatcaatacgaactgccactcgaccaccagttctgatcgatttcataggtaccaatcagagtatgttttaacgtttagaaccacatatttatcaagaccaaacgaccaatagtgtcactatataagtaaaatcttcttccaggagaaaagggtctgcaaaactacactttgtaataagcttcctgttcagaatcaatacaacattaacttacctctatttttattgaacactttcactatgataaaattgggcattacagccggtttttaaggcctttttccattagttttggtaaaattcactatagatgttattttaggctacaatgtagggattaaaaataagggaaattttaaattatatacttaattataaaataacactattacaatgttggcctttagaggttgttttttcaccccagttataaaaagcgaagctaaagggtgtgaaaatacccatttttttcgaaattgacatttagaggtgattttttgataaaaaccgtaggtataaaattgcattataccatttagaggcggtagg

SEQ ID NO: 301218 - DNA, 2158 bp, Cannabis indica
cttctggtttatgcttactgataccacatatatataaaaagagagatcgagttgaatattataaaatcacaactcatcataccatcatcatcataacatatagctctttcgtgccatattttaagcaggtgtagtgaccaaaaaagggatcaataagttttttgtggaagtaccaatatagtagtgggatatggggagtgtagaagaggaaacactagttcagatggtgtatgattttatagaatcagactcaactacagcggtaccactattgaaatctcatcactactccaacgtctctgctcctcttaataatcagccccagtatttcactttacaggtatatccatctattaataattaattttctccggcctcttaaatcttatattatatatatgtggtttatacaagataattgttttctagtaataaattaacacataatttttattattatttaggagattcttgggcgtagaacaaaaagagaagttgagattgtggagagagtgttaaagtacatgagtgagaaaaaggaaggtgctaaattttctagtcagaagaaattccttgtaatgaggcttcaaatggatggttacaacgcttcactttgccatacttcttggcctacttctttcggttgtccagcaggtacatatatatatatataatattcccataattagttctaatttgtctctattattagtaacccccactttgtcttaaacttacaaaaacaaaactaaatcatgttaaatctattagctcttattcccttccaaagacctacccagctagctatagacatcatatatatatatataaagatacatgaacttgtaaccttttacaacacctacacctttcccctatatatattaagcagaagggtaaaaaaagcacataataatttccaaacaccacccattttaccccctttttggtctatgtttatatcaggccaccagcttatgaaaggttatgttggcgcgtgtgtggacgcgccctttgagtcaagcaagctttcacactaaatctaaatgaaaagaaaaatgataaggggaggtatgatattggtgtaaactgctaatcgtttacagtaacatgggtgtggtgttagacacaacaacaatgctttgaaaatgggggtttaaacttgaaaggattattaacaataaattaatttgaatcgcggtgtagttgtgactaataaattttttgttttaattcgaatttacaggtgattacgagtacattgagatatgtataaaggagggtgagaagtacatgaacaaaagaaatggtaaaagggagagagttttggtagacatagatttcaagtcacagttcgaattggcaaggcccacttcagcttacaaacagctcacaaacgcactacctcaaatctttgtggggagtgaggagaaactcatccagattatcacactcctctgctccgcagccaaacagtcccttagagagagaggactccatgtaccaccttggaggaccgccgcttacatgcagtccaaatggctatctccaggcaaacaacaaactatttctattgccaacgatacaaacttggccggtgataataataatagtaataacttcattaccaattgggcacccccaattgttgtaaaacccaccagcagaagagattctggtttgtctagtcaattttctaacatgagaataaattgttgctaattaattaatcaatataaataaactcatttaaaaaaaaaatcaatataaataaactcttttatttttttaaatatattaaatattatttagatggaaattaatctctttcttaatcctagctaggtttaggtctttttctttctttttcttttttggcccgctcaatgttttgccgagtaattggctatgattgtttagtttgcattgtcagcattgacggttagtatatgtgatgtgagtagttctacttttagaaattatatatgtaactattttctttaagcagtttgctaatatatcgttaattatatattgttttcatccccatcattctctaaattaagttcgaattatatatcatatatcgatatatatatatatatactagcaaaaattacgtgcgaggcacgtatattaaactttatgctagtttttt

SEQ ID NO: 301219 - DNA, 2090 bp, Cannabis indica
aaacctcctccataaatataatacactaaaatcgaaaatttaaggaatgaaatccaaaatattttcgtcaaaattaagttgcaaaatagaatttacaataataatttgcgtatttgtagatttgaaatggtcgtttgtttttttaatagttaaaattgttcttctgatttagtttgttttataaatagttttttttttggtaaaataattgaatcatgttcacatgtaatgcattaaaaatcttttttttttagcaagctacacacacctttagttgcttaattgtgaataagtttcatataaattaagctcaaatcaagttggatcctcactaatagatagcattttttttttccaatgcgtgctaaagattttttctaagtgagaaggattttatgtcactttttcacaaaaagaccttattgatgtatacatggtgtaaggatggagtttcttgtcttcttcttctccctaacacttgccgtgactcatttccatgtgccctttttgataaggatcttattttgtgtgacaaagacatacgaccccatatttgcttttggggttttcttgttagtttttagcattaaattagttccatcactcacttcttcaatcttcattcttaggatctttttcttgcactttaatttttttcccatttgttctttcaattcatacactagtcttagtaacttacaatgcaataggaactaggaagatctcaaaacccatttcatttcctctactcaatcctagctacttcccaagaagaatttcccacacactatatgatgtctcgaaaagcttttttgttacaattccccaaagagttaatgatgcacataacacgctttggaaggagttggggggacactattattgtatatttgtcttatgtatgtggtaaaattttgggttggtgtggtgatacttttttttctttttcttttgtgtgtgtattgatgaggaaattagatcatctttccctgtcaaaatatattttaaaagaagaaggaaaaaaaatagaaaaataaaaagaaagaaagagggttttaaaaatttgattagctttattcatacgagctctttcccatccttatgataatctatctttaatgaagtggtcctctatgttacccaattgggattttaatgctttggtgctagaaagcatcaataagctgttttattcatttttttttaaaaaaatggtatttatataaataaaagatccaaaagatgcttaagaaaagaataaatgagtgtcaaaactcaaagttagttgacaaagttgactaggagcttcattttttgatgtactaataaagattttatatagctgtcaccaacctaagctcaccttggtaggtctgcactcttcactttcctagtaagtgcctaactaatcaaagagttttattagagaagaaaataatagttaacaattaatatggtacttatgaagcttaagtattattagtgtatgaaggtttattattattttctttatagaaagagttaagtagtaagatggtgtcgttttcatattgtggttgtggggtctatgtgtgtcgtttaacttcttcattaattaatgggagcaatgcatttatgtgaggagcggctattattttcaatttgagcatttctattaggattcagtggtgtctagcactttcttgacatatcgcgttgtgattggctagcgatactctataaaaactattatattaaactatatgggactcgatacttagtttgaccaatagcgatactgacacataaaaaggtgctacacaccactagtgccctttagtatttctcattcaattttgatttgatttcttttatgagtacatacagacatgtcctccaagaaagggagtaaagtaaaggacaagaacaagacaagtcagatcagatcaatggaagaaattaaaatatttcttttcactttcattagcaaatctcttctatatattgggaaaatctactgtaagatatagcattccgaaagaaaataagccaatggaaattaacaacatatttgatattgttttctgttttttgtgtttagaaaatatttt

SEQ ID NO: 301220 - DNA, 1299 bp, Cannabis indica
tttttattattattttattagatataattaatatactaatataaatctaaatctatatatactatagtccgagtatcattaatactacgaaaagattgcaaggatacttgatacttcattaagtggtaactttcttgttcatatttttcatttttctgatttaatatgtatgcatgtagagatcctaagatgtggtgagatgataattgtattaaatatttgctgcatacttaatttaatactacaaaaataacaaatgatactggtactaattttattatgtgtatatattaaatattatatgatttttttgtattttatatgtatatatatgatagatatgtataccaatggatgatgatgtttattatgaacgtttgattgatgatggatcgttggaattgatttattttttctaaacaaatcgtaaaaaaataatagagtataagagtttttatgtgatttatttattaatctgaaaataattttacataaaaattttacaatgtaatgctcacgatcatgaagcttggattcatttcgaatccttgtcgtgtacgtcacacgcacggagcttgaacccctctaaaataatcttccatcaaattaccaaataaagtatagaattaaagtccttttacatcttataaatcatttctaaattacccaacatcaaaacaagcataatccaataatgatttctaaaggaaaaacatcgaatttcttaccaaatttccttatactagtacttgaaataagttccctctttgatcttcaaatactctattgctcacttttaatctctcctcaaaatatcaatagttgagaaaagaaaaagtaagagaagtattgatgatgggaatggagttgatgatagtttggatggtggtggtgtttcgggtaagatagaaagaatgagagaaagtaattgataaatttgattttaattcatgtatatcataataatgatatcaaaagaaagaaaataggcattgaggacaattttcaagtaataggtgtcaaaaggagaataaacaaaaagaattaattttttttattataatcttttttctaaactaaataaaatcctaattaattctaagaataaataagtaagtctaatacattccacttccacatcagtataatctaaatgcagtgacatttcgctacacatttgaatgatttcatatttgctcctaataaataaatataggctaattagtaatttttaccccgaactttgacatgtatcaaatcatgccccttgaattttttttgccgttaaaaattcaccct

SEQ ID NO: 301221 - DNA, 1642 bp, Cannabis indica
gggacatcgcctaattatcaaacaccaatatataaagacaagaaagtaagctgaagaaattacaaaacatatatctgaaagctatcggctatataacctgcagaaaaactgtaaaagctcccttgtcagtcaaaaagtacggaagctgacaccacacatgcctagaaacgtgagcaagcaaccaaattgtacacccacattaacagacagtcgactcaagattttacacatgtattcatccattactggtctgtaatctgtattaaagtaatatatatatcaagttaagaacgtctcaattagatgtcctttttttgccaaataactcaatttagacgtctcatcaccaatagtgagaactacaaaaaattcccaatagtaagaacaaatcaggctaagctactccttgattaaatagactgattatttagaccatttgttccttttagaaatgttacttgtttgttgttttaaaccttggtttagcaagtcaaattcctatttttccaaattgtaataatttttcccagatcatttaacagctttgtaagttcttctcaattgtgattgaaaaaataaaaaagaaaagaaggcaccgattacataatcatcaataatttctttaatgaaagtaaaggcgggaaatgagaactcacaccagtaagttggctgctaaatattcaacattgatgtgaatcatcctttcttatccactgattgaagtgtgccctctgaatcaccagccacaatctctacttcctcatccacttccgtatctcttgatccctcttcatcatcaagccttgctggttcagatccaatgcctggattacaagacacattacatgggttagttttttatttatttgttttgctggaaactacatgggttagttgatggttaaaaatatccgcaattagtttaccaaataactattcattacatggaaaagaaaatatacactacaactagaatattgatagaggtatatgacgagaacctttcacttgtgtgctcataggaacaaaaacaacttactgtacatcattcagactgctaaaatagtttaattatccatagcaaataacagcatattacatccatgtgagataggttagcagggaatgacagccaaaatgcagttctacaaaagaagcaccataatcttggagatccattgctcacttttttgaggttaatttctttctgccaaacgattaaaattacaccaaaatataatataataatatatatacactattgtttccaaactgatcttttacaatggtcgctcaataaattatttagctaattttactatcttttatagtcatttggtcaatgtctctttgaggtatagactcactatttcatcaatgaatgcgacccttaaatatccatgaagatttcttcattttattttcctctcgtgactccttgtcaactatataagttgattgaattttaggtttatggtaggaaaggaattacattagttcttaacaatcatgttagaatttgaggaataagatgaatgaggttccatcccaaaatcaattggcaatgggaggagtagccctttcatcttatatatcacaatttatttccacacattagctgtgggactaactcttaataaat

SEQ ID NO: 301222 - DNA, 2703 bp, Cannabis indica
atttccctaatattatttataaaacgcaatggcattagccatccatatacagtcattgtacccctacaaattttttttgattgcttttgaaagtaaactattaaatggaaaactaggtttggctgtcaaagcttgtgcttttgactttggagtctagtaaaaactctttcataaagaagtatttgttaagacatgagttctcactctgcctcaggtggtctatcaatacagagtagtatagtcagctcaatgacagctcaaccatcctcaccactctaaattcctcaaactattttatgagaatttgtgccaataatttccttgattgttttttgtctattgtattttgccatctatcctcataataatagctctttccttgtgtaaaccttctattaataaaatgtaatatctcagtcgctatttgagggcaaacaccatcaactgcccaatctcaaaatccacctaatccaaatgcaggtactactgcaaacattaatggagcttcactctccagtaatctaggaatcaccacaaacagatcaccagactaaacgaactatgtcacaaacttcatccaacctttcaacaccctaaatcagccattcgttctgaaactcgacaaaaacaactacacgctttggaaaacgattgcttccaccatcattagaggtcatagactagacggttttgtcaatggaatacgactttgtcctactgagtttctatgaactaacatggatgcaggtgacaaaggaacaaaggttgcagtccaaattatgagcactggattgtcagtgattagctcttcatggggtggctatatagttcaatgactaaagctatagcaacggaggtaatagggtgcactacctctgcctcactctagatagccctgaaaaatttttatggagctcattcaaaatcgaaatattgatgataccaaaactgccattcaaactgttagaaaaggtaactccaccatggttgagtacctttggcaaaagaaagcacgggctaatagcttagctcttgcaagggatccttaccctgaaaaccatctaataactgatgtgttatctactttagatgctgactatcttcctcttgtgttaaaaattgaggctcgtactagtactacatggcagcaattgtaggaattgctactcaatttggatatcaagattgaatgtcttcaaaatttgaatgtcacactcaaatctacgatttcccctacaaaaaatatagctaacacatctcctcatactggtcgaggaagaggacaaagatcaccttagaatacaccatttggtctaggaaattactccaataatagtcgtggtggtaacaatcaacgttgaagtcgtgcaatgttcaataacagcgacaattctaggccaacttgccaagtttggccattctatggtagtgtgctacaataggtacgataatacctacatggcaacagactctcacaataaccaaacataaggaaaatcaagcccatctgcttttattacggctctaaaagttgtggacagtgatgtgtagtatgtgtgtagtatgctgacaatggtgtcagcaactatttaacatctaataggagcaacatgaaccagaaatatgattatggtgctaaggataagttggttgttggtgatggtcatcctttggccattactcacatttgatctagcatattacctactaatgaaccacacaaatcccttgttcaaaaagatgttttacttgtgcgtgatatatctaaaaatattataagtatatctcgattaacaacagataatgatatacttatagaatcggagtcccacatttattttgagaaggacaagtgcactaggaagctgctgctccaaggaattcttagaaatggtttgtaccaattcaagtccattcccatcaactccatatgccagttgaatcaatccagtcctaccactaattctaaatcagcttatgtttactctaccaatgttgtttaggagtctaattttctttccaagaatgacgtatggcatcaacattggcggtatccctctaccagggtcttaaggcatgtcttaaactctagcaatgtatcaatttttgttagtgaaaaagagacttttgtaatgcatgtcaatatggaaaatctcatgctttacctattaaattgtccaatagtagagctacaaaaatgctagaacttgcccattcaaatttgtggggacttgccccaatcaattgcaacactaatttcaaattctatgtttatttcattgatgattataggcgatttacatggatatgtcctttaaaaaaaattagattcctgaaaggctttcactcaattcaaaatcatcgctaaaaataagtttgaaaaaaaaaaaaagaataaaatttatcagaattgattggggtggagagtttcaaagttttgacaagtttccaatcacacatgggattcattttcatcactcatgtcctcacacgttagctcaaaatggtagaattaaaaaaaaaaaaaaaatttagctcttaaaattttgggttagttctttctaaatatctttttacctcataaacagattagcaactcccattttgcatgataaattaccatttaaagtgtatcataagaaacaagattatcacttattgagaactttaggtgtagcctgtttttcttgcttaagaccatat

SEQ ID NO: 301223 - DNA, 1595 bp, Cannabis indica
tcaaactattttgtattcggaattctaatttaatgaggttgcaatttcaatgtacaaaaaaaaaattaaaaaattaaaaatataactaagtatactaacaatgtatataacaataatttagtaattaaaaaaagtgaataatctaattattttttttatagatttgaatcatataaatatcttttaatcaattagtaaaatgttatatgaatctaattatttctaacgttgaaaaaattatcaaaatgacttggataaaaagaaacaaattaagaaaaacatgtatttcaagtaaataattgaaaataaataaataaataaaaggaattagacggcaagaagaatagaaaaatgaattaaaataataaagcgttgacattcaagaattcaatggtcgttactcgttgccgtgcgattcactactttttccctctctttccctacaattgccatttgccaaacactttttcctgctccctcccatgcaatgcattacatatttaatttcatttatatataaatacactcatctacaacacttaatccaactctgttttctcaagtaaaaaattaaaaagaaaaaataataccacaaacgaaaagctgtcacaaactctctctctctcttccttaaacccttcataagcaattaagccaaaaaagaaaaaataaccaaacttcattcatcactcattttcttccaaatggcctctttttcttcttcttcttcttctttattgaaaactattttcctgatcacaatccttgtcattgctctgttctccggttccagctctgcactcgtccggggaaaacattcacggtgggaagagagggttcgacagaatccggcatcgactgcaacatgctccgaccgaagaacatgacagcttttcggtttcgagggcagacattcaatttcttccccaaaggagctccgattcctccctcgggtccctccaagaggcataactctgtacctgagaattgagtaggccaacacttctctggttatttagatctttatttatatcatttttttgtttttttgttttttttattttgatagatttgtatttggtatacaattgatcattacagagttaatttagttcttgggattttgtataaagccattgatgaggatcatatcataaaaaaaaagatgatccttttctccttttgggctttgtaatttttggctatatactgtatagaaactatagtcttttcttttgttattattattattattaacatgtttgtattcaattcaatatgaactaaaagtatagaaactatagtcttttctttcgttattattattattaacatgtttgtattcaattcaatatgaactaaacgtataagaaactgttattatcatacatataacgctttatagaaaatatcaaatccaatattttgttgttaatttgttgttcttttcgtaaatctaccttttcattcttctttttttttctggggtctgatatcattttctagtagcagtttaatttggtgtcactctctcaaatattgacttggtgtgaaaaaccgccttcttaattttctttttttctttttcttttatt

SEQ ID NO: 301224 - DNA, 3084 bp, Cannabis indica
taacaagtaatcgagctagtatttgctatttatggaaaagattctcttgtggattctttatatgaattcagcttttcattcctaaattatggaatgcagggtatcatattgcacttgttttcttttagccacttgtttagtggaacctacaccgaagcttcactacactacactacactttctgcttctcttttacttaaaagcgggaaatctatagttttcaaaattttgtaatttgtataatcaaccacttttacctattattatttttcttccacagcctacccctccctacctaatcaatagtcatagcaaaagtaccaattgtacaagccctctcttcttttctgtgtaatatgaacttaagttgacaatcttcatagttgactaaacaagtcaaaactcttctctttctctccaatagtttcttttgttagttgttgttactacaattgacaattcatattcacacccgaagaactcttttgtttattttatttttttgcttttgaaatgtaaagaattaaacacaaaaaggaaaagataaacaaatgaaaagctctcttctcattgctcatttcataaagacaattaaaagaaagaaaaagaagaaaaaaaaaggcctgtaatttacacaaattaaagcactgtgttctacctattaattgttgatcctaaagtgggaaacaaagcctttagctagagaagttttctttattttttatcttctctaaagcaaaaggcagaggatcatccatctttatgaaatctttgtcaacagtaggattcttcatcttcaactagttgagcattgttagatcgatgcatcctaacactgctaatgctattccttgcagccagtatttcattaagcgaaagccttttcttaggcgtggttgcttccggcctttgctttggggcactgtgagacctcaatttggcattgaatgactttgtgtttgtcatatagttgggatagtttgaatacggccggaagtagctgtccccacaaacgctcttggccggggtggccggggtgttagaccataagggattagctaaccgaggagtgctgtgagctgttgagaaccggcactcttgaccattgaagtaccactcgaaatcctgaaggtgttggcattcaggaatagatattcgaccaggagcaggacagagcagtggtgatgatattggttggtaaggcatgtcctccccacagctacattctgataatgctgtactaaatctacgagacgatcttgacttcggtttgaatgtgtcgatctcaactattttcgggctttcttcaaatccattgacagacgcttcataggtcgcggatagcctcttgctgtggaattcacatcttaattcatcaaatcgttcctgtaaggtggaaatgaagaaaatatcagtttaagtaagacattaagattcagtaatggatatattcaaagtgaaatgggactcacaatggactttctggaatgaaattcagggaacaatctgttctccttgttgaatgaacgacgagctcgttgagttctgactgcagtctgggctcttattagagcttgcatactatggagagtggcagcagttcgttttcggaccagaaagcctctaacaagagcttgtatcttaactagtccctttagagctcgcagagcctttcgagcctaaaatttaagaagcaaacatattcagattcaatagaacagtaacttagaatctgcacaaaccaagtttttccatactacattggaagtagagatattttaaaattaaaatctcagattcagaagattgaacagaatgagaataaaaattgaaaaagaatgcaggatcaataactgaagaaaccaatatactgtttcattggaccttaaaacacgtttgtactgttttattaagatttacaatatcaaacaattttcaaaagcctttgacaaaagacattaaagtaagcaacaagtaaagttatagacaaaaaaaaaaccttttgctacatttgttgttgcttccaacattactaacctccattaccccaatcataaaacaagcagactaaaataccataatgattaaacagaaaagtaataaaaaaaaacataccagatatcccctgaaaacggtttgaatcttaaccgctgccaacttatctctcttcccattatgcttagcaccgccctgactggtcagcctcacaacagccacagccgcctgtgctgcagcaacggcagcatcagcagcggcggcggtggctgcagccacggcaattgcgtgcttgttctgttccttttcagagtctgcaatgtaggatctgagccaggcagcgtccgaaggtgacaaattgggcgaaatatttggctgaacattcccatttgcgcttgttcttctttctgacttagcaccaaagctccacctcttcttctctttccggtcactgacagcaaccgcatccgccgttgttggagtctcaacattattctccttgtctttcttcatacccaataaccctttaagccatctagtagctttccccatggcagatatagttttctggtctctgtagaatttggagtttaaatatagcttgaaagagagagtaccctttttaagtcaatgagtcaaatatgaagttttatttggaaacaaacagtcatttttagtcaaaatactattgaaccacccactgtgttactgtgaaatgtgaagtaagaagtaaaagacagcaagtgaagaagtgaattgaggaaaataaccccagtgagtgactgagaagcttaacataagtagctacctttctcttacaaacaatagtgagagagagagagagagagcactgtcaaaatgtatatatttaaatatttatattgtttagaaaactgaatccagagaccccaggtggagcttattgagcagaaatgttctgaaagggcttttggaatctttacaggttgcaagcagagaagtgtggagcaaaagattaacaaacaaaaagcatcaataaccttaacaaaaaaataaaatcggatataaaaagataggattttttaaaaaaaaaattaaaagaaaaagaaa

SEQ ID NO: 301225 - DNA, 1755 bp, Cannabis indica
tcacaagctgcctcgagatagactcgtacgttgcaagagtgtctttgatatcattacatgcttgaatgttcgatctgcaaaaaaggatgctatcatcagcaaatagcatgtgggaaatttttggggtagttctggcaatttttattgcaacaaccctttcctcagcttttgcctatctaagaagagtggaaaggcctttagaacaaaggagaaaaaggtaaggagatatgtgatcccctttcctaatgccacgggtaggaataacttggccaaatacatggccattgatattaaatttatatgaagctatggtaagaaagttcataatcagagaagtgaacttggctggaaaacctgatttcagcatgaccttgttaagaaaagaccattccactctatcaaatactttggccatgtcaagcttaatcgccatccaagcaatttttcttattttatgccctttgatggcatgtaagagctcttgagccataaatatgttgtcaaactttagtctccctttggaaaaggcactttggtttggagaaatcaagaagttaagaacttttttcattctattagccaaaatttttgaaatatttttatagataatggtgcaaaggctaataggcctataatctcgaagggtagatgtgttcttcatttttgggataagagtaatgagtgttgtgttaaagtaggaaatatcaactccatgatttaggaaacgcatcactgcatcagtgacaacatagccaacgacattctagttcttttggaaaaactggttattgaagccattaactctagtggcatttggaacaaggcttgccttacttcgttgggggagaaagtctgatcaaggaatcaacactagtcagggttgagttaggcattaacaccatgaatggcccaatcgatagtaatatcacgaggatttcatgatgtgaagagatcaatgtagtacatcttaatttcataaagaatgtcaatattaaccacttttgaaccattatcaaggataaaatgattaattctattagtgcttctcctattcgaattaaatctatggaagaattgggtgttcttgtccccagcatagagccaattaactctagagtattgcttccaataagattcttccttggcaagaaggctatttaattaaaattgaagctttctaatcttaaggaaggaagcctcataatgatcaagaaaggctctagccttttcaaggttcttatgagcttgggcaattttctttggaaacccaaagaaagacttatgattccagtgagataagtggtcagcgcatgcttcttggatggaaacaaggtcttgaatgggagaactagagctaatagaaggattccaagctttaagaataacctcatcccagtttgctttagttagctagacattctcaaagagaaaacacctgttttttggggcctgactaaggttagggggaggggcatcagacttcaacaaaatggctatggtcagagccaaagaagtctaaatggctaagggaaacattaggataaagaacagaccagtgattgttggccagagcccaaactaatttttcctgaatatttttaaggctagcatgtttattgttctaggtcagcccttgaaagtcaagggcttcaacctgaaatttgtcaataaactccctaaaggaattagaaggaccattactattattaccattgtttttatcatcccaagtcaaaaaactattaaaatctccca

SEQ ID NO: 301226 - DNA, 1929 bp, Cannabis indica
gactagtggcgaaaaatattctgagatgggtccgggccttactcaagagacccaaagaggacgacgtgcttaggcatcttgcagatgcagaagagtggaagcagtttgtcagacaccattcatccttcgcacttgaacctagaaatttgaggttgggtttggccactgatgggttcaatctatttggtaacatgagcaactcttacagcatgtagccagtgatcttagtccccccctttgaagtgaatgaaagcggagtcattgatgttgtctttactcattccaaggcgtaccgccctaggaaaggtatggatattttcatgagaccattgattgatgaattaaaagagttgtgggagataggtgtccaagctcgagatgcttacaacgggactgtatttatattgcgtgttgctattttctgaactattaatgacttccctgtgtatgcattgatgtctggttggagcaccaaagggtacaaggcgtgccccacttgtaacgaatacactccttccattggattgcacaacaagattgattatgttgggcatagacggtttcttgaaatggacgacccaaggcagagaagtaaaaaatacgatggggaatttgagaaaagaccacctcctccagaattatcaggggttgatgttttagcttagctagagtatatacaattttgtttgcctagtgaacacaaacaatttggtggagtcaagcataaatgttctgttgatgagctaaattgatcaaagaagagtatattccttgacataatgattcacttagtgatgcatttacctaaagaaccgatacttgggggaccattgcagtataggtagatgtatccaatcgaacgagccatgtctttgtacaaataatatgtcgaaaatcgttctcgactagaaagatctatttgtgaagcttatgtggttaacgagacattaagtttttattctatgcggtcaagattatattattgtattattatttatgattttttttgagagatgaaattttaatttaaatcatattatatttagagcatttagttctttcaatattttaaaacttctccatttagatcacatttgatgtaactgctcttataaaaaccgatagcacaaccattaatggtctaacataagaagtcgaaaattagagatgaaataatgcaccgattgagagatatttttaaattttcttagtatattttcaattgatgtgaagtttgtttttaattttatttcattcatcaaaaataattataatcgagcacattatttaacattattaagatttaatttcaagattaatgatgtatctttgagggttgtccttaattatattatatactgatataccaggcaattaatcaaataaaaacatttatctactaaccaaactcattattgcaacacaaactgccaagattttatcataatacaaatctttttatattacttgtctgttttacaaagcaaatctgagctggagagttaagcatctcaatttttactattaagagaaacagaatctggtatgtagtctttttcttttctttaattaagagaagaaaaataattaataacaccaaaccaggaaccctctctaatcccacacacacaaaaaaaaaccttcataaattatatataaatatatatatatatataaatatatagataaagtttgatatttaaaacattgattgatttatataaataataatatagattataattttttccttgttattattatttcttacactgctctcactacagcttggaatcttggttccttgggaaggaacttctgcttagcataaactgacatgtagtcaccaaacacaaactttggataaatctgatccaggtgtttgtgatcttgatctgcagatttctccaccaataataattcaggtgc

SEQ ID NO: 301227 - DNA, 2263 bp, Cannabis indica
ggtaaaataatttctaacaatacgatctatatttttctgtagcacggcatggcacgacctgttttttgaaaggcacgcataaatatagtcgagccagcacgacacgcacgaacttacaacactaacttcatctacactaatcaaggcattgaattaggagatgtgacactacttttagggtgttttagtacttctaacttaaactatgagtttaaaaatccgtaattactttatgacccaaaagactcctaattcctacttacgcccatatatatataacaattggtgacattacacctacttgaagaaaactattgtgttgcttaaacaaaccaataaattatataattttttataataatatttagggttaataatatttttgactctttattttgtaaaaattaccaaatggactttttattttattaaatgacaaaatagaccttatatttttttaaaataatactaaattgtaccatgaactgatttgttttgtcaaaataaaatttaacaataactaaatctagagatgttatgacaaaatcgacaattatgttttctgcatctattcgaattcgagttagaaattatcttcaagttgattatattaaaaaaaaactgtcaaaacttaagcttagggtcctagttgtactattttgaaaaatatcgagtcatcaattttatcatttaataaaacagatagcctgatcaataacttttacaaaatacaaagtctaaataattttaaccctaatatttataaatggcctcttgaataactatgtaattaatcaaaattgcaaaaataccaatctaaacgaaaataccacttttaaaaaatcttagctatctattgtacatgcccccctaacaatcttttccccttgcttgtttgtctctattttcccttatctccctcttttctcttctcttctctttcgttttgtttcactatcaaaccaattgtctctatcttgtttttcactttaatttgatgttggcttgtccatttgttctttggtttggattaaggatttgatttttgagactttgattattacaaatgtttcttcaacaagctagctagcaagatactaaaattttagtatcttatcatcttgtgccctattaatagagattttactttacatatatacataggattaagaaccacactctatataattgtaatgggttcatacacatctcccacaaatacacaagttcaaagcatttgacttagacataatatatattgtcttacaaaagccacatgtgaagaagagcatagtattgacctcctttttcactttgcacaaacctctagcaatgcatgaacatggaccagccgacacccactactctctctactaattatctcattttcaacaataaaattgcactaagtcacctcaaacacaatactctcaacttgttcaaatcaaattgcaaccaaagtctatccctataaataccataaagagattacagaataaatatatatatgagctcaactgctcaagctagggcaaactttacttaaaacaaagagaaccacagtttaaggtagtgagttttttttttctttattatattattattatttttattttcacaagtaaataaggtgttacttttctaaatctctaatttaatttgattttttctaatgaattagacatcttagttttgatttagtctacatgttataatatctttttgtttatttttataataaactttgattatatttgtttcctatttattttgtttgttttcactattagttttgataaaattatgtggttgtatatcgcttaatatttttatatttcattcatgtgaaatgattttgaatcacctcatcataagtcgtgttatttgcttgcttaaagatacatatgattttgataccatgacaataatcatgaggtttcatatcttaaaatcaattaataatgagtggagtagtccatgatcttatatatagtatttttatatttaattcatgtgagataatgttgtctaataaattttgtgtttgttatttaatttgctagaattaactattagtgataagaaatctatctattttttcttattaaagttaatatatattttgtaatttgtaggatcctattgaaaatctctttaatgtgctaacaatgattgatgaatacgtgaaaggtatgtttagttgtgtacttgtgggcaggtataattgaatgtgtatttagggatttttttttttttaaaaaaa

SEQ ID NO: 301228 - DNA, 3108 bp, Cannabis indica
cataaaacccaacaatgatttggtatatgtcaaagttcagggggcaaaaatcctaattagtctaaataaaatgccaactctagttattggcaatattagtcctaatgaatgcctatttcaccaacaacctgattacaagattcaaagccctttggctatgcatgtttccctcatttgaggccctactctcatcacaagatggaatacatatctgaggaatgcctctttcttggttattctcccaaacacaagggttatttgtgtgaaaatcataatgtcaaaatctttgtgtctcgagatgtggtgttcaatgaatctcatttccctaccataaccaacaacaacaactcatcacaggtacattctcaagattcaacttctgttctaactgctcaattttttactcagtttagtccaaattatgctcctactaatgtaactcctcctattgttcccaagtcccatgattctatccaataacctgctaattcttcaaactcaaactcacactacaacaaccttaatatagcaccatctcagtctttgtccccttcagatgctcccagcaccacacctactatgtctccagcaattcaatctcctcatgatagtgctacatcaacatctattcatactaccaataacaatcctgctgtagcttcaacatctgagattcctcaagctgctgcacctcaaaggacacatacaatgactacaagatctcaacatggtatctataaacccaaggcctatattgccataaaatatagacttcctaaatttcttctccctagagagcctaagtctgtaaaggttgcccttagtgatccttcttggaatccagccatgaataaagaatttatagctctcaaaacaaatggtacatggacacttgtaccctatgagcctcatatgcatcttacagacaataaatgggtacatagaattaaacttagctctgatggctgtgttgatcgattcaaatcaagactagttgctaagagatttcttcaagctcctggtattgattatgctgagacattcaaccctgcggttaaatctgtctcggtgaggatggtgctcactttaggtgtcactttcaattgaatgtcacaaattcctttctaaatggtgttcttcaagagacagtatacatggtgcaacctaaatgctttgaagattccactaaacgagatcatgtttgtcatttacacaaagaaatatatggtctaaaacaagctccctgagcttggaatgacaaaattaaaaccactttagttaattggggactcaatgcatcaaaagttgattcctcactgaatttgattattttattggtgtatggagatgatattcttatcacaggtccaaatactaatctcatcaccaaattaatcactgatctcaaccactcttttgatttaaaagaccttggtggaattcattattttcttggagttgaagttcacagaacctcagaaggactttatttgtctcaaagtaaatacgtaacagacttgcttgtcaaagtccatcttgagggagctaagccttgttccaatcctactagcactgctcacaagctttcactgcatgaagggacaccatttgaggatcaaaccctgtatagaagtaccttaagtgcattacaatatctcacacttacaaggcctgatgttgcctatattattaataaactttctcagtttattcatgctcctacaagtgtgcactgggaagcctgcaaacgactcctaaggtacttgaaagacactttacatgaaggattattgcctaaaccagctcctagactatctcttcaagtctattttgatgttgattgggcaagttgcctagttgatagacgatctataggtggatatgagtctttcttggctcaaatagtcagcagaaaaataacaagttgttgctcgatcctctactgagtcagaatttagagcactgaccaatgttgcagctgagatcaactggatctctcactgctttctgagctccattttcaactccaagacactccaattatttgagtcaataatcaaggtgcaactgctcttaagctaccgatcccatttttcatgcacgctgtaaacatattgagatcgatctacattttgtaagagatcaaattctgaggaatgaaatcactaccagacatatccctagcattgaccaggttgttgacatccttacaaagcctataccaaaggaacattttcattatctcaagagcaaactcaaagtgatttgtacccatttccgtttgaggggagatgatagccaataaaagtatagttagttttattggttagccttttcttgtgtgttatgacttgtaacagaattcttaactatattttgattgtaaaaaccttataaataaaacattttctgctccgaatgttcaagcaagcattctcaattctgaggtttatctttcatctctctctgtttttcatttcctatactctgttttgagtttctgtttcacttttagccataatttgttcaaactatgtctatatggatggagaaaagaattttttgtttagcaatatttttcaaatgttagaaaaatttaaatattttaaatgtttatttatagtaaagtaaataattataaaagtgaatatatgttgtggtgataacataagatttaaatcttgtctgttttagtaaattatattagattgtgtgaattaaatgtatatgttgcagagatataacatatttaaagaatttttatttcatagtttttaaggctctagattatgaaaatgttgtactttttttttattaaagaagttattttacgggattattctagaaaaaaaaatagccaaaaaaatatggagaaaaagttaggtaaatgatttggtactttagggaagtaactgttaactttactatacacgattatattgttactagtagatattgatactcgcgatctcgagctatataattaacgacagcgaatgaggcagtgccacttaagggttgggaggtggtgtttgtgaattcttattcttgctagatgagagagagagagagagagagagagagagagagagagagagagagagagag

SEQ ID NO: 301229 - DNA, 1878 bp, Cannabis indica
ttttttttttttttgttagatagtatctaataataactatcgtcactcttttttaggggacaatgccttcgagcaataagagaccatctcgtctgccaatgtggaaaggagttaagtttgcatatttaatcattgcaatgtgcttgtttccccttgcaattgttgaatattgggcttatggaaatttggtgagttaccctcttttcaaaacaaaaagtaataacgaataaacatattaatgaatcatggacatgaatgaaaacaacgaactaatcatatggaatgtttgttatatggcagatacattcctccaatgaaggggtgttaacagctttgtatgaattccacaaaagagatggatcaaaattagttatggggatgacaagtgtattggttgtaattaacagcctaagttcctttcaaatctatgcaatgccggtgtttgacaatttggagttcagattcactagcgcaatgaacagaccgtgccctcgttggctacgttcagcgtttagggttttctttgggtgcctagcttctttcatagccatcgcgattccatttttggcaagtttggcagggttgattggaggtatagcgctgcccatcactttggcttatccaagtttcatgtggattctccttcgacgaccccaaaaatacagtgcaatatggttgctcaattggtttttgggtgttctgggaatggtgctcagcgttttggttgttaccggagcagtatggagtcttgtcaccaagggaatggaagttaacttttttaagcctgagtaatatatgagaaagaaaataatgggcaaaatagaagagcaaatgaacaatagtaagtaatcattatctctgcaagtgttttctattaaaccttgattgagctatcaagacatatctatcggattgatatatactaaaatgtaaactatgtacctgatgttaattgtgtacagataaataaaacatgacttgtgcttggctttcaaacgttcttgaggtcagtttatttatactctgttatcattcccagcacaactcacaacatcctaatgcgacttactagccaataatattgaaaagaaaactctttgatgacttttttccattggctcttgtctccaattagataacattccttaaattaaaccttgcacaggatattggggtaaaaggacaaaatgaaaaatattatgttaaaccccctttatatattcattcacaaaaagaaagaaaaaaaaacaataactactatattgctcttccatccaataaaaacatttcaattcactgttgccatcatattctgaagaattaacaatgatctggtgagcaggatcactcaattgtatctatgaactaggagagcatgggacaagaattatcatgctttacaaatcaaaatgggggataagtgtgtgtgtgtgtgttacatagacaaaggaagaagcattcttcgtctcttttttctagccaatctcacttgctttgtgattttaatgcacaaaagcaaaagcaatgtgatgcaaaccaagataaaggcaagacgtaagtgcctatagtataaagaaacagctgaaaataccaagaaagctataatgaccagctcccatattacaaaaatcacaacatctaccctgcatccagaaatggggggagaagaaaaagtttcagaacaatatcagaaatgaaatgatgttatccagaagataaattaaaaccaactaaaacgagaagtagcaaaaaaatttctgatgcagtaaagaaaaggtttctaattaattagactattttcataataataataataaactccaaggtggcatttggttggaacttggaagtaatgaaatgaaatggaatggaaagaaa

SEQ ID NO: 301230 - DNA, 4216 bp, Cannabis indica
aacaacaaataacaagagtacaacgtaaaaataatagaccgtatttatgtaaataaattaaaaaccgtaaaatataaatttcacgtattttgtatttttttttgtatttttatattttttttttaaaatatctctttttagtttcaaacttttggccttttttaaaggctctaaaattttattttgccttaagctccaaatagcttaagaccgatcctaagtcgtacaaaatacaatatgtaacaccctattagattacgacgtgttattgtatttttcttaagtattgtgcacgtctttgctaattaaaggatttaatgaaaaacatagataattaaaagtttcttaaataatataacatttacaataaatataatttttataagtccaagatcccgttaaaatacgcataattctacaaaatactcgcgttacaaaagttgtctttgtatgactattaaaaaaggtgagcctaaactgtccaaaagactctgaacactccagctctaatcatcttgatatgtacaatcttcacccttagctttagactcatcttggttcgattttaactcttacctacacatacacataataactgtgagtcgacaaactcagtaagaaaagcataatcataaacatatatccagatcgtaattaggtgcccatacacttattcacgatctgataactgggtcaggaacgttctcgacaaagtatgactaactgcgaatccaacctatactcagcactctagttgtactgatgtgatagcagttaattcatactatctggaggtctagcatatatatgttggtatctctgtgcaactctatgtacacttcactgataccttaatatgctaatatgatggccattgatttgcctaacatttatttattagtacctcggtgaacctctatgtacacatcattgataccctgacatgttattatgacagcaattaacatgcacactaaacatgtatacatatatgcaaatcattccactaatcttattttgattccgaatgcaagcgtgccggtaactctgagtggaaattgttgctcgatgatttaaggccctaagtcataatttacgtaaaactagtaagtgaccagctaaatcactatcagggacttagacttgaaactaaaggtttccttatcgataaatagtgtgactaaacctacacatcgagaaaatactaaaaaatgagatttcaggaaaagtaccccaaaaaacagtaggccgtttttttttttttttgaattttctgcctggaataatagtaggccgttttaccaaaaacgatttgccgtttttacaacaagttttccccaaaatcccaaaactaccacaaatcgacttcaaaccttcccaaactttctagaacacctaatttaagtccaataatcatatttcgaccatcaattccaaccataaagccctgaatcaaaaattattattgttgagctaagtttgagctcaaaaactcaaacctagctcaaaccttgccaacaacaaacaatctgcccaacaccagctcaaacaaacttaatttaatccccataactcaattctaacaacaaccaaactcaacagaacctacagcttaaaactacataatcaaacctaactttttcacttgaaaattgaagagacaaaggagaaggaacttaccttaaccgtggataacaaaacccttgaattcctatgctggaatccttattgtttggtctgaaattggtgaggaaaatctgatttttccttggtttcttggtttggtagaacaagaagagagagagagtgaacaaggttgattaatctagttttgttttctaaatacatttctaacttatccctagataaatatacctttattaaactaaaataatcagcaaaagattaactaatcaattccaccaaagtccataaaggacaagattcaccttttgggcaaatttccaaaattgctctttttttcaagcttaagtcatttcgaggcttaaggttaaaataatccaaaaccataatcccggattatcctgacattcctaatgtttaactatactgccctgctaactaaaagatactacaccgtatctaaatgactctattggccaattcgtcgcattccactgttaccgggcataaaacatgaaaatcataaaatttcatatataatatatataatgcatctagaattcaaatatatttccgtaattgaaaaaatattttcctaaagcctatttctggcaataaaccctaatttctactaagagacataatcatataataataattaaattcttaattatttgctaattttcatgatttaatcaatgcaatcattacacgatagtaacaaatatttacaccgatgttgaagatctacgacaaaccggtgatggggtcaagtgtttttcttagggcaaatcctatttttgtaactttaggaggttatagtatagtataatttctaaatttgtttttacaccatatttacatttccccttaaataataacaaagagataaaaaagaattgacattataatagtgtttatttatactaattaccctattataaattatattatgtgggggacataatacatattgaaatgattgtaacatatgaaacactagttgattttgccaatgttacttacctgtgtagcttgagatcaaaaagggtggtaaacaatctaaatccaaatctgtctcttcatctgtagaatccaaatccaaattcattttcgggccatcatccaaccgactactcaaccgccttttcttcaagatcgagtctgacttctgcatcaagtttatgtacctttttctaatcttcaatattggatgtctctcaatagcagaagggtcacaataagcctctttaaggattgcagtacatgtcttgttcttcaatgataagtaaaacatataaggatgtctttcaaatgctttgtgcattttttgaggcaatcccatatgtttcttgagacacagaatcttcctcctctcagctgaatgttcaacaaagagactaagcaactcgtgtagcaatcccacgagtcgtttttcagcaatgtcactatcgggagccaaatgtgagatgtcctcgtatggtgacacgtaaggaagcttctgaaactcgtttaaccagcccttgatcttcaccttcaacctcaacccttttgaagggaaaagccgaaactcaattggctccattgaatctccagtgtaaaccccttgtttcattgcgaaactctgaacagatgacaagaccttctccccattatcaacggccaaaccctttaaaccatcttccatatccacaaacctgaaagtctcatcaagattcttttcggggtttcttagaaaatcatcgggcaaacccaaataccactgcattccctggattatcttcaaaggcaaaaccttccctgtactcatcaatatcagtctcttcaacctctccctcaagtccttcctacactcctcataaacccttttctcttctctgtcaacctcagcagcttcaggggttagtttgaaccaaggaagattgtattgggggccggtaaactcctcaaagatcgaagggtatcgcctcaaaaaccttgcaactttcatgggaacctctaactcgactcctcttttggacacgacagagattgggatgcaaccattagggtcttcggcaatacagttcttgagtgaaacaataggtttaagaattttggacttgtgaatgtgatcaatgttgtcatagtaatgatctttcttccatttcatatacacatctacataattgcagtgctgggagtatttgtaaggaggatttcggggttgatagaggaccgaaaagattggcttttcagagtgggatagcacccttttaagggtggttctgaaaccagagttggtgatgaacattactcgaaacaagttgcttgtaaggcttacttacctgatgattttgctcaatattccatgcctgaaaaccaggggaaaactcgtcttgtgtaaatgataatataaagtattgacaagaataaaacacaaaaaaagtaccaacaaaaagcaacatcaaagtgataagtttatcaactatggttccttgagttgagtctgatatcatttataaaaagacaaaaatggagaacaatatatgtcaaaaccaatcagaaacaagttcattatagtttcactcat

SEQ ID NO: 301231 - DNA, 4073 bp, Cannabis indica
aaccttctaccatgaatgttgtcaatatacagtatttttttaagctaattagactaacaaattacaataacccctaaacacaatccaatacatcatgataattataggagggtgaaattaccaaggtaaatgcaagcacttacatttccaatgcgacatataagaaacagtaacgttttatcatattactatattacataacaaagggaacaaagattccccccaaaaaaaaaaaaaaaagacatcaactctaaatttattttgtgtactctagagtgatagaaggagagattaaatccttgtttggcaagagagaaaggagggatacattttccctccaatccttaaaaaatcaatccctccaaatttgggagtatagaaaaagaaaaaataaaattccaaaatacaatacccttgaaaaaagataatcaatatttatgttcaaaataacaattttgtaattttaccaataatttttttcactgtccttcccacatcacacctaataccaaacaacacaaaggaaatcaacaatcctctccatccttcctactctccatccatcctactctcttttcccaccaaacaaagccttagtaacttaacagaggtagacaaacaattctacaaaaagcttaagcttcaaagaataatcaaaaattcgattctatatggtaagaaccgaatactccaaagtcaataaaaccagaaaaacagtagagaattatagaaaatattgaatgtatgagaaaagtcaattataaactataggagcccttaggccattttgatacaaatagagttttactcaatacattgcatacccactaactccttaacacccttatatatactatcccaaatctcacccgtaactactctcaatacactgagtcatacaccttcgtttcctatgctctagcacatccagtaatatggggtctaacaataccggctgcccgaatctcaacttgtctcaaggtgaatgagagccaaactcgaccatcgcaggcttgacccgacctctgtcaaaaaaccaggtcagaaaagtgaccttctctccattccagctattgagaagagccacaggagcagtttaccaaggaagaacaaggctaggctgatcgagaaatataggggagggagagaaacaccaccacgtagttaggtgaccgcactcgaaaaaccagtcaaatatagtcatatttcagcagtcagtatgacgaacacgtgactgttgaagtatggcagcaaggcgaggaatctacaaaaatgtgatacagaaacccaatcaataaaacagtggacatttgagttcaacgagttcaactttgctccacttttcctagttgttgtccgttgatagtgaacaaagtacaaatacgtcacttgggtagtcacctccatcatgtcgaagacaaacaatgatggacttctcctactagctgctgctacttctcctactccggcgacgtctccaactgctggtttttctccaccgacgtaggctttgatgatggacttggtaagctgacttcctaatataaccttcgctccttcctcagagaacatattcaattgaaaacctaattggacgttttaatgtccaccatttccatttttgtatctcatcttccttctttttttattttttttaagaagaagagaaaagaacctcttgtcttaagacagatctctccccattatgtattgaaatcctcacttgtggcggaggaaaaccatgtctacaaaaaccaagacaacaaggccttataacagttagcactctacaatacttgaccaaaataagctagccaaaaaaaactaataataccactacaacaatgatttccaatctctacatgaatctaaaaaggacaagtcctcaaaatcctcttctgaactttcagccccttcaaaaattctggtatttctttccaaccacacagcccaaattgttgctaagattgtcgttctccacaattttgttgtatgtttgctgccaattaatttagtaacaatcatttgtggtacataacttggcataacccatcgaattcctctatcaaattgagtcataatcgtcgaataaatttacactacaagaacagatgttccagatcttccccgttgcctttccagcagatgcaccaaccaggggaaatgtagaggaaaggcttcctcttttgcatcctatcatgggcgttcactttgtttaaagacacaagccaaccaaacacttaaacttttgatggtacaaagcttttccataaaatcctcgtccaaaacagacctctaacagtcgggtttgatgtaaaccaacaaaaggttgatttacaagaaaacaaacccctaacggatccagcttccaaattcgactatcttccaaaatattcagtaccttcacatgttccaccttttgcagtaacgaaataaggcttgagacctcccgatctagtaagtttcttctaaacttgaagttctaactctctacccacccacctgccagcccctcgtcaacaatcagctcttttatagttgcattccttgtcttaaccactggtaagaaagggaagaccaatccatagagaatcaccaagccaaacatcttcccgaaaacaaatactatctcctcttccaattatgaagtgtactagtccaagatattcatcatacagatatgaaatatccctccacgggcctttaggagatagacgacattcgtatttagtgtcccaaaaacttatcaaccttaccatatcgacttaccaccaccttgtgccatagtgaatttggctctaaaggaaatctccacagccatttcataagcatacctttatttctcatctccaatctcccaatacccaatcttccctatcttgtggcctgaaaacctcatcccaagccactaaatgttcaccacttgctaacttgctaccttctcaaacgaaatctcccatcatcttctttaatgctttagttactgcatttggcgctttaaataaggatagaaaataaatggggatagaagataagactgactaaataagaatcaacctaccccctttagataaaaagatacatttcaatccatcgagtcttttagcacatttattcagcattggttccaaaaactccattttctaggcgaacccccaaagagcatacctaaatattgcattggccatcttcctacttcacacccaatcctaaacacaagccttgacactttcctcccatccatacatattcccagcaattgacttttactcatattaacattaagtccagagatagcacaaaaggcttccactaaccgcaccaacttctgcaatgaggttctcatcattaacaaagaataaggtatcatctacaaaatgaagatggctaacttgaactttctttttcctaccacaaatccaaaagatattgcctgaattgacagccttatccagcatcctcccaagcacatccgcaaccaaagtaaacagaaaagaagaaagtggatcaccttttatctaaggccccaagaaccacttaacttccccctcatcttccgtctctttgcaagtctgatgttgaagcttcagttgttcttcaactaacagagctttggaaaccacattggtaagtgtcctaggcttatattcaaccaccttcttcaccatctccctcggaagatttccagagaaaatatcccgaagaatgtgcctggaatacccactagttgtgttgcaatgtgattgaaccgattcttaaactccaccaagcttgtatatctgagagccataaaccagccaaatggcttgtcctcgattaacttcagcaattgaaaagcatgattcgaaactccaaccaaagcttgatcagatcttgctcctctaccatatgaaaccatagcctagcaacacccactaaacattcttgagcaaccagtatcttttctttctcaagaatccgattaacacggaaatagtcttcgatgcaatggacccaaccaaacagagcctctccgtcaaataacgataaagaatgaagagaaataatatttttattatatttcttttctgtgt

SEQ ID NO: 301232 - DNA, 3922 bp, Cannabis indica
tagtccagatttctgagtcaacaacttcttcagtacaggctatatattcagccattgtagtagatagagttgcagtggattataggcttttttttccaactcattatgcaaccatttaattgaaaaacaaaactagattgagatcttctcgagcctacatctctcacataatttgaatccgcaaatctcattactcttgatttgtcttggcctactccatattgattgttccttataaatacctcattatccacttcactgccttccaatgttcagtccttggttttcccatgtatctgctcaccatgctgacaccataacacaagtctggtctggtacataccatgaggtacatgatgctaccaacaacacttgtgtaagacatcttttccatctattttattaattcatcattcttaggggcatgtgagctagacaatttgaattgttttgctgttggtgtgtatacaggtttagagtttgaggagccaaacctatctaaaatcttagttatgtagttgctctaattcaactttaatgttcttttggctctgtcgctggtaattttgatccccaaaattcttctagcatgaccaagatccttcatttagaattctctactcatcaccctcttaactttagttgatctcttctgaattctcgctagcaattaccacgtcatccacaaaaatcaaaaggtagacaattgagtttgagcttctgatgcatacaaaactatcatatttgcttcttttgaaaccagagttaatgacaaagtcatagatctcttgtaccaatgccttggtgactgttttaatccatagagaattttcttaagcaaaaagacatgatcttcttttcccttttcctcaaagcctctaggtggtttcattaggatctactcttcgaaattcccatgcaggaatgctattttgacatccagctactcaagttccatgtcttcagttgcaattaaactaagtaacatccttattgatgtgtgtttcaccagaagagaaaagatctcattgtaatcaatcccttctgtctgtgtgaatcctcttgccaccaatctagctttgaaccttggctccttgatcctaaggattcactccttgtttctatagactcatttacagataataacttcccctgggcttcatttctaatcaaaatctaagtcttatttttcttcaaagactttacttcatctcccattgcttaattccacttagtttcataatcataacttatggcttcttcataggacatcagttcatctactcccataactgctatgttaagagcataatgagccacatctacaaaatgaaacctatcaggtggtttgattgctcttctcttcatatctcttaccaactgatagtcatgagcaccatcttccatctccacttcttcttcttcttcttcttcttcttcttcttcaatttctacctcatcttcattcaaagttgtttatgaatcagtggtacctttttggttgttttgatcttgcatctcaacctcaaactttaaatcttctttagtatgagtgccttcatcctctgagctattcttcaatgtgtccttgtagaatttatcttcttcaaaagtcacatccctgctaacaaagtatttttgatgttctcctggctcaatttacaccttctagatatcctagaaaaatacatttctttactctatgttctattttgccctaattaaggtgtgcataagccacacatccaaatattcttaggtggtcataccgtgcattgtgtccaaaccacatttcttttggatttttgaatccaattgctgatgaagggcattattttataaggtagcatgttctaaccacttcttctacccaaaagtcctttggcattccgaggattcattcacatggctaattttgggatcttgctttgataccacttgttaagactgttagacaccatatatttcaacttttggtatgatattgtctgctttggacctaagtcctcacagttttgttcttgggcaccatcctaagaatacattattcacagaagtctacctcttgtatctaatcctttgcaaatacacctttcttgctgagaaccttgagtcctccatagcttatgtgaccgtcttttgtgccaaactatggtttttgttactacatctcttgatactacatttgcttgatcttgtagtgtatttccttgcagaacataaattccatttactataaacccttccataatgatattttctcccttaatcactctcagtttcccatcttctactctgaccagataaccatcttgatcaaacattgatactcatatcaaatttcttttgatcttaggtacatatctgacttgatccagtttagtaattcttcaatcatccatttttaatctaattgagccaaccccaattatcttgcaagacttgttatctcatagtttgaaagctccacttgtaattttttaataagaacagaattgatcttgatcaaggcaaatgtgataagagtacgctgaatcaagaacccaactttgttgaatacttgtcttggataccactattacattggcactgtcataaccactatcctcttcatctaacacaatgtctgcatttccacttttcttcatattgtagtccttcaagactgtaaaatctcttcggagatggttgaaagaattgcaaatgtagcacctctcttgaatttcgatacaggttttccattttctgttgagttctgtcctttcttctccttcttggagtgttttccccttaccagcaaaccatctctagtgctttcctccttcatctctcactttctcttattctctttagatattactactgagtgaacttcctctaatgtcaaagaatccttaccatacatcatggcatccacaaagtgtttaaaattctttgtgggaagataatttagaactatgatggcctggtcctcatcttctactttgatcctaatgttctctaaatataggatcacctagttaaaatcatctaaatgatcttcaacatccttccctgacatcattttgaaagaatacatcttttgtttcagaaataacttgtttgccaaatattttttcatgtacaaactctccaacttggtccatactccagctgtcgcgcttaagacttctctaagaactctattccctagaatcaagattttagcactatgtgctttatcaagaacctcagtcttctcattttagaaaatcctttaggtaagttcttttctcctagaatggctgattgcaacccctattgaaccaaaagagctctcatcttgactctccacaaaccaaagtcattctttcttgcaaacttctccatatcatacttggcattccccattcctctctattgctcaatcgaactcttcaatctttcaactttagatcaagactttccttcaaagtttaagattcaccttcaaagaatcaagattaaccttcaaatagtccaactctgataccaaattttgataatttccaataatctcgatcactagggacactcataagaacatactgtagaacaaacacacgtacacactacatagaagtgcactcacagaactcgaaaacacacaagtactttaaatggtgtttaacacttacgaattcttgaagctcttggaggatttcattaatcttagcaattgtgttacataagggatcaaaatagaatgacattagtcaagtctattttttacaactaaagaacgagttttaactaacccctagtgtagcagtcatcattgataactagctagttttaactgaattacctgtcaacagaaataacacctctaatgataatacctttgtgttggaaatattttatcaggatctagatttactaacaagtatgtttcattaacatc

SEQ ID NO: 301233 - DNA, 1508 bp, Cannabis indica
gttattcatgtttacatgatttttccaaaaacttgtaggattaagagactccaatacgaagcatcaaagtaaaattaagagactccaataccagtaaatggagacatacaattgagtaatatggcagagagagcccttgtcagctaagcagtcacatttgataaatgggttgaaagtgccatcatcgaaactggaggtgtcatctatggcagcaccactacatgggtccccacttgtattccattgtagggtgttagcccttatcctccattgattaaagatagaattcaaaattatctcttcatgtaaaataaaaaccaaattattagaacatataattctacaagtcaaaataaaaaaaaaaaaaagtgtgataaagattaatctatttcttcattaacttttattattactattgccatagttttctttagtcagaggtagctttttcttcaatggcaatagtaattaataaggttaggtgttaattttgtgataattttgtaattaataagctaatttgtttgcaaagaaaccccttaccattaacaaagagaagaaattacccaaaacatgacaaacacttgtaattgcataaaaagggtaagacatacctaatgtttgaaaattggtcagatatttcaaattggcaagaaaaagcataatagaatcacaaacagattacagtttaaaaacagagcagctcattgagatcataatttcctccatacaactatggcataaacaacaaacgtaagaaattctaagctaatagtgagacaaggagaactgtttttgcttcttgtactttcctataaaaatttaatcaatcaaatcacaaaagaacccaagtttaaaaaacttcaccttttacatagattctagacatgtggatagacattggttctgcgaaagtgggcatcagcactagtattattatataaatacgttatagtaaattgagtactatggttgtagaagaagacacaagtgtaacatctgacctggccagggagtattgaaatttcaaaacaaggattctgtttatacataattcatccagctgaatattaaaccttatctaacttatacttatcttataaataaaaatcattaaggatataacctttaagaaaagtaacattgatgcataagtttcgagaatttgcataaaactatcattaagattatgaacgagcccttgatacatgagatgactccacgtgaattccgataatgtctcatgaatcatgattatttgacatacgagttacaaaagaaaaagttaatgattgcaaaacatttacaattatcacatgacaatcagttataagttttcatattagtataagggcaacgtgacaataaaatactgagatggatatcacttttcttcagacaagcaatgcagagcaagtaattaatttaagaaatcctttaccagtaagaactaaaacaacattttaatctggacaactcatactaggaagacaatggatctaaaaata

SEQ ID NO: 301234 - DNA, 3938 bp, Cannabis indica
tcagtagtacttacatgatgttttgaacttagtatttttagtttttttttttttcataattgttatgttgtaattttttaggatatctataaattttatttatttttgaataatttacaatactgaaaataaaattcaaacacttatttattatcatgtgtgtataagaaaaaataattgcacatgaaacaaaatatgtatttgaatcttaactttagtatagtaagctattaaattcattttgaaaatttattaataatcctaaataactataatcaacaggctcataaaaaaaagtaaacttaaaagttcttcttaaagccaaaatagataggaaatttactaaaataccggctaattcttaccccccaaaaaatgaatggctataataataattgtaggactattatacttacgctaaaaccactcttgtaataataatcaatgtatgttcatggtagcaagacgaaatcccaaattgccactgaaagaaaataatcatatatatatatacaccaaaatattagaatatttttcttttgtgttattgtaaaatggttaatttattaaaaaattataaaataccaaggtacttaccgtgacccaaacaaagaaagctaactcgaaagaattctgaaaataatacaataaaaacttgtcagctagatatgtgtatatattaacacatttttttttaaaaaaaacaatatataataattaaaattaaaattaaaattaattaccataaataaggttaaatgcaagagggtcaagacgaatttgggttgagcaaaccagaaaagattatcatttggttgtaccaaaggacttcccatgattacattatccttttcatcaagtctatgagccatccttgccacaatcactccaagcttagcaccaagtacaaccacaatctatatataaagtacactaattccattaatacaatcttaattattaattaaaccataattaaataaccccaagtaataaattatgctaaaatttgggagaaacttacaagtagtgggataaatgaaacccagagatatacatgccaacctgttaataataataattaattaagtttacattaataattattattattagtagttttaaatttgggaaaactaataaattaaatttaagaagttgaagtgtatactgaccgtgtacatccacaagcatgaaaacgacgactaaaagccacatgggagggctaatcaattcacaacgcaaaaataaaaattaattagtaataagcaaagtaattaacagtaccatatttataaacatgatgcaacaatattataggctaaattaatttaataaatatatatacatatttctacaaatattacaatacattcttaattcaaaaactacttgataattatgattcatcctaggtttttcgatgattttatatagaatttagaagatcttttttctttatttttcaccagaagcttaattatattattattttgatatatatatatataaacacatatagggtcataggacaaaaaaaataatattttggggcgtaaaaaaaaatataattttaaatttgaaaaaaagtttttaaactaagtggaccctaaacacagacccgagcgtgcaaacatcaaaaatgtgtaataaaaaaattcaaatataaaaagaagggtgggcttccaataaggtggctagctatagctagctagaactagaagcatattgcatagtgtttaaagtagtagcatgcatgcatagtgtttagatttacattttattttatttatttatttttcgtgcatatacatataatataggaatatatattggataatgaagtatatatattggaaattaattagggagtgtaacctgatgccaactacaactttgaaatcatcctcaagagatctttctatgtacttttggaaattaaatgaattgttggttgtactggtcaaatgagcctgcaccataatttaattatataattaataaataaaatgcaggtaattaatttataataataatataatataattagatatatagtagtgatgattaccgaaatgaatccatggcgtagagttaggtaatcaacttttgcaactgaattaaagaactgtcgaaagaagcatatctgcatcaaaatcaatcaacccaccaattattacgaatatctatatatgcaagtaattaattaattaagctaagcatcattattattaattaattaattaattattatgatgatgacttacaatccataaaagcatagatgaagtaggtgtgcatgaactcatatgtcttcttgcaaatgttgtctgtctagtatacctaaatcgaaatggatctaaataataacaaagtaaattcaaattatcatcattaataattaattgcttttttacaattcacatttttaaaacaaaaataatattatctaattaatttaagacaaagtctatttaaatatacaattccacacgtccttctttacttcttattggtcccaaatccaatattagtaataataattaaggttcataatatttgacattttcttttcttgacttagtttttttttttttttgagagagaaaaggatttaggaattaagctgtacgtaattcggttggtattaataataaatgctctaacttatacaactcaacaaattaatttttatccaaaaaaaaaaaactcaaaaaaaactaattattttcaaatattgatcagtagtgattgtttttcaataactatattatttaagtattttattattcgaaacatttagatttttttaaaatttttatgagaaatcttttgtaactatatatattatcatgactaaaaacaatacctataaatactacgtacaataatatattataacttaattttgtatacataaaagttacatattctttaaccttttttttacatatctaatagttatacttaaaaaactttttttttatgtaataattaattaattaattaatagttttgtgttaattagttaattattgttaccgttagcaacttgatattccactgtctgagtttctttttcccaagcctcccaccgtctcatctgtatatatatatatcaacatgctcattaattaattaactaattaataaagtacttattatctaaaaaaaaataattacagagttttgggaaaggttactgataattattagtgatgatttgaactctaattaaagatgtgaactggtaaaatattagtctaattaaatattgaatctcatactatataaaaaaataatttttaaaaaatatcactaaccaatcataaagcactatctataatctattcaaagtgttagacaccaataattctcaaaaaacaatactctttaaaaatctttctcaaacattattgatcggataggatggtagtagtgaaagttgacaataacgaccaaactagatattgttgaagatattaactgagttttcagtgccatttataactttgggtccatatataaaattttatatatattatctctattacttcacaccaaactaattaaatataattcacgtgtattgtactatatatataatgtatgtatactggcccgaccctgaggatagacgaaccaagcgtgcgttttgggcccccaaacgctcagggcttcgaaattgtaaaaaaaaaaaatattaatatctaaataaagtgttaaataagaagaaaatttaacaaaaattgtaatgtgtagttatgagggattgaacttttaaggcccaaaatttaatttcgccttaaaccccatatatcttaagaccgaccctgtatatatatatatataatatatacatgtcatgtacctatacataattataatacataattaacaatacattatatctaagcaattaataataataattaaga

SEQ ID NO: 301235 - DNA, 2534 bp, Cannabis indica
atttttgagagaattcaatggagcaaaagagagacttaagattttcaaggcagatttaatggtggaagggagtttcgacgaggccatacaaggcgtcgatggtgtctaccacacagcctcgcctgtgctcgttccctatgatgataatattaaagtataatgatactttttacttttattcctgaatcatataacttgtgatgctgctcgttaaaataattttttatttgtcaggcaaatttggtggatccatgtattaaagggacaaggaatgtgctaagttcatgtgcaaaagcaaatagtgtgaaaagaatagtgcttacttcttcttgctcatcgataagatatcgatatgatgttggagaggtctcacctctcaatgagtcccattggagtgacccagaatattgcaagaactataatgtaagaatatattaattgttcaattattgagacttaattgatactaatttttgtacattaattattaatattgggacaaattatgcagctttggtatgcatatgctaagacaacagctgagaaagatgcttggaaatttgctgaagagactggaaaagatcttgttgttgtgaacccttcttttgtggttggtccattgctagcaccacaacccacaagtactttgtttctcatacttgctataatcaaaggttagagatcaattttctaaacaataattatagaacattgttattatgtcataaaacaatggaagcaatgtatggttattgtcaaattttagccaatcaaaactttaaaataaataaataaataggggtcacaaagtcatttaatttcacaaaatttttactcttctcctccacgtcacccatacttggccttacaccttgacaagcaccctctctaactgatcctattgagcttgtcattagacactagtggtgttcgtgtcttacgaatggttaacagtcttttatttgaacattgctataaggtactaatgaaacttgctcgaagtgatgtcttatgattgattaccaatattctataaagtcatttacattaaatcatgtgagactagatacttaattgcactaatagcgatatgacactttaaatgattaggcccgatcctaagcataggcgagctaggcctcggcctaaggcccacctagctcagagagtccaagaaaaagtttcttttttaaattttttttggaaaataacaacacaatttttttttatgatccactatattttaaagtcgatcctggtcctgtgagttccttttagcgtttttcaataaaataatagtatgccacctcacaagtgtgttctctaacattttctcataattatataaccaaaactaataagttagtgtattttttttccaaccaaatgtgatgaattgattagtttttgatttggtaacaaaaatattatcacaaaggtgaaagaggtgaatacccaaatacaacagttggatttgtgcacatagatgatgtggttggtgctcatattttggctatggagaatagcaaggcatcaggaaggcttatctgctcaactgatgtagctcattggtctcagattattgagatgcttagagcaaaatacccatcttacccttttgaaaacaagtaagaaatcaattatataataatgttattaacaaaagtaaacatagtgtattaagtgttaatcatgaattaattaatgtgcagtgtagtagccaagaaggagatagtaatccacatagcatggacacaagaaaaatcagtgaattgggttttcctggttttaaaacacttgaacaaatgtttgatgattgcatcaaaagctttcaagacaagggttttctttgaattaataatatatactactagttatggctatctatccttaattaataattaataatgttacttttttttttatttaccaaattgttctatgctattttgtacggcttatatgcttgccttggtggtgttgaactgagattgtttttatgttggtaatttcaataaagtttaaatatttagagtaaaaaataattaattatagtgaaagaattaagagcatttattcattcttagccaaatttttattatatgatgcatgttagaattgtgagatttacgtgggtctctttcaaaactaattaggaatcagaaaaattcatttaaatagagaaaccctacatcattaagggtgggtcccacgagggtcattccctacaaaaaatgtgcatctgtagtgcttttttgtaacttcaaaaaatattttgttcttattaagaaaaattagttgctgccgaagtgacatattccaactatggctcgtatttttcaatggtgttcaaaaataacttgtttgcattctgcgagatgttagttgagacatttatcattgttattgccttttacggcaattataagactagtctttaggaattccgagagtggtcgctcctaacttactttctttaatctttcatactcacaagtatgtgggtcaatgagttgtaagctcttaaagaattc

SEQ ID NO: 301236 - DNA, 5976 bp, Cannabis indica
gaaagcgactctgtaactccagaagaaaccagattaacaaacagtgcagaaaaggaaaaacacacaaggtttttgtacgtggtttcaacaatccttttagattgttactagtccacagggccacgcccagagataagattcattagataggtctcaaaaatacaaagtaattgacttatgcataaatagactccctcttattatttgtcgcaagcttgatgtattcaaccttctaaccaaaccttgttgaaacttcaagatctcgaactcccttcgatctccttaaagagtgcttgcttcctcgcgatgcaagacttgaaaagcaatcccctgaaagctttgtgagacattctcccgacggtagcactggtttttttattctttgtagacttgacttaaagagtaagagtcaaacaagatcttctctacaaaacaaagactctcttttctaaagatatgagtgaaaatcaaagatacaaaagaggtacttaacctagctgcaataaggtatatttataatcaatatacaccttattgaaagcttacacacggtctgaacaagaccccagcccactagaagatttcctaaaaaaaatcttcaatcagcctaggaatttttatttctgtacctacagaactgtgagcaatacaaataggtattttaggcgtgtgagtatcccctacttctcgcatggcaaagaagaagagggttattcaaaagcctgcatccacaatcacggagatcattgaaactaaagaggaacttccttcaatccatgaagataggttcgaactgatcagttgtgaagtgtttcatgattctagcgaaatcttggagaattaaatagggctggaacctgttatgagcagcgcagtttgatcccccaaatcaaacagttaggccgatgaggttgagaagaacgagtttcaagctaatgcgagtgaaatatggagccaattcaaggccaatcaggttcctaatccttctactagactctcttttacttaaccgataaaagtagaagatcaattagttgctaagttagacttagatgagatagaaattgaggcttcatactggaagaatgctattgtttgtataggcataggagctaatcctccgttcaaagtctttgaaggatttgttaagagagtttggggtaatatgggtatcgagaaggtggtccgaatgcattctagattcactttggttaagttcaaagatgaggtcacatgagacttagtcctagaggtaggtgttatccatttcgacaaaaagccagttattctgcgtccttggtctgtaaaaatggattcagctccaatgatcaacttagttcctatgtggattcggctaaatggtcttggtctccaatattgggggaagaagaatctaagtgctcttgtaagcacaataggtaagcctattatgattgacaagctcacccaagaacgttcaatggtgaaattcgctcgaattcttgttgacatggtgatttcagatgaaccacctaaaatgatttcctttatcaatgaaaggaaacaacttgttgaacatctagtggaatacaaatggctcccttcaaagctcttggcttgtgggaatctaggtcatactgtggccaattgtaacaaggagaagccaaaggtttggaagaagaaacaatctggggacaataagtttaatcaggaagacaagaaggagatgcaaaaccaggaaacaaagattggttatgagaagagttcgaatagtggcactgatgctgttgccgaaactgggaaagaaaaactagatcaagaagttaaaatttatctggaggaaacaggcagtatagattcagacaaggcaaactggattactcaaaaaaaaaaaaagagggcagaaaataatttcgaggtctatagtggaagcacccaaaatagcaaacggttatgcagctcttcaaggttatttgaaactaaggtgaagcatgagaaaactcatgagattattgctaataattttcctaattggaatttctactcaagcaatgtgacctctggaagaattctgattatttggcaagataaatttgttcaggtggagattttagatgaggacactcagctagtgcattgtagagttaaaatttgtggtcaaaaggtttctcttctggctacggttgtctatggcagcaactcaatggacgagaggaaaactctatggcacaaacttggaggttatgggctgttacatgagccttggatcatatttggagactttaatgctatgttctcgttccaagacaaaaatggtggtagactggtgcaagcaaaggacattttggacgctcaaacttgatttgcaaatggtcaggtggaggaattcaaatgttcgggtgctttctatacttggaataataaacatgaggcaggtgaaaggatccactcaaaacttgatagagttttcatcaatgataaatggttgaatgcttttcctaatgctgaagcttgctttaaatgggagactgtttcttatcatagtttttgtataattcagaataatgagctgaacaaggttcgggttaaacccttcagattttgtaaccattggccttcctatcctaactacagaatggctgtcatctctagttggaatatgcctactgctggcagcagtcttgacaaaattgttaagaaacattataggattaaatacactctaaaaaagttcagtaaacaagaagtgggggatgttgcaaaggagtacaagctttctaaagaggactattgccggattcaagaggaacctgctgcccaactagctgacactgatctttaaagtgttgttgatctcaaacagagggattttcttacagcccagaataggttatcccttcttatttctcagcaaagtaaagtaaagtggttaaagtttaatgatgagaactctactatttttatgctgccaagaggaaaaggaagttggataataggataacaacctactctaaggatgattcgattatagatgactttgaggaagttgttaaacactttgttggtcattttgagaagtttattggaagtaaaagctttgctatttccagcattgatcaaaactgtattactcaagggaatttcctaaatgtgtaacagcaagttagactaatcagacccttcactatagaggatgttaagaaagctattttcagtatccactatgctaaatgtcctgaattggatggctttggctcttgcttttttaaagacatgtggggtgagatagctaatgaatttctagagctgttcttgatttctttgccaatggttacatgccaaaggatctgaatgaaactgtcatttccttaatgcccagagttactgatccaagcacagcgaaagactatagacctattacatgttgcagcaccatatataagtgtatctctaaaatgatctgttctaggctctcaaaagttcttcctattcttgtccaaggcaaccaaggtgctttcatcaagaatagacttcttgctcataatatcgtgatcttttaggatctcctaaagggttacacaagaaagaaaatatcagagaaatgcatcatgaagatagacctaagcaaagcatatgacactgttgactggcaattcgttgaagttctgctgagacatctttgtttccctgctagattcatcagttggattgtgacttgcctgaagggaaatcattaccacattttaatgaatggaagaatacaaggcaattttaaggggaaaaaaggtctcctggaaggagaccctatgtctcctcttctctttgtcttgataatggagtacctttccaggcatctcagcttctactcagagtctaaggactttggatttcatccattatgcaaaaacttttgcttgactaatctttgttttacagatgacctcattttatttagcaaaggcaacttgaaatcggtgagaattgttcaagaagcctttactaaattttgtaatgctacagggttatctgcaaataaagctaagtctcagatattttttggtgaagtcaaagatgacgttaaattgaagattcttgacttggtccaaatggaggagggttattttcctctaaagtatctaggggtgaatcttcatcctacaaaatggaaggcttcggactatggtgtgatccttgataaaatcaacaagaatcttaattgctgggctagtaggaatctgactttcgcaagaagagctcaattgatccactcggtgctgcttggtataaggaattactggatgagtatctttataattcctcaaaagataattgctgccatagaaaagagttgccatgacttcttatgggggaagaaggggaacagaagcaaattggatctagcttattggtaaaaagtttgcgatcccaaaaagttaggtggaattggatttctagaaggataaaagtggaacaaccaagtttctttgggatatttcaagcaaacaagataacctattggtgaaatgggtgaactcaatctacctaaaaggtcaatccatctggagctatccctcaaaacttgatacaagttggtattttaagaaattactaaatctcagcgtggctacaaatgaaactcagctgaaccttgctgtcaaaggtgggaattttagtactacaagattctataatcaccacgtgatagagaatagagtcgactatgctggatggattcgggacagacttctgattccaaaacacaggtttgtctattggaaacttcttaatttgtagtttttaacccctgacaagctgaatagaatcactcctattcaagacattaaatgccctgtttgtgagctaaaggaggaatctcatgaccatgtaatttttgattgtttgttctcaaaataggtgattgataacttcaattactaatttgtgtaacaggttctacttggctcggcatgatctccaaaatagggtgatcaatgcagtggctgctgccactttttgtctgatatggcagaatagaaataactgtctcttcaacttgttttgttcttctcctagcaggattagcaagcaagtgaagaaaatgatgaagcttagaattttatgtttggtcccctttaattgctgtaaaaagaatagttatgtcctttatgtaatctcgaactagtagccaggtctggttttgtggtgcctgttgttgttcggcttgtgtggttcacaggtgtttttcctcaggttgtcttgtatctacatctgttttttgaataaaattattcctcttgttcaaaaaaaaaaaaaggaatcgtgagcagtaagtgcgactttcattttatagaaaaggaaattttagctacggttttctcctcaagaaatctgatcaaacaaaatgggaaactcacaaaagatcagaatataacagctggttaaatagaaaagaaatgagtaaccaaacttactatttttaccttattttccataaataggaaagctagacaactttccttacaaaattaaattgattaatataaaaattatatgcacaaaatatggaaactaatttaaatactccagcagaaattaataataaataataaaatatgtttttcaattaaatatgtcaaaaatagaattaataatctcattccactactacaaaattgggctttagaggcggtttttaagggtttcagcgtcggtattggcgaaattcgctaccgacgctgttccgggtgacgctaaagggttaaaaacaaccgacgccatagaacccctatggcgtcggttatttcataataaccgacgccatagggtcttcctatggttttttttcagcttccaattttgtattttagcataatttatatatatattattttattattaatataattaaattaagtataaattatatataataaccataaatacaaattaaattgaaaaattgaataaatacacatctacattactctaagtgtttgt

SEQ ID NO: 301237 - DNA, 2757 bp, Cannabis indica
aattcttgaagaaacaattaacggtgtcaatcgcgagatttgaatttggagaagttcaatggaacaggagactttgcgctgtgtagagaaagtttgaaagggatcctagtgcaccaaaaggtctccaaaggattgtcttcacttggtactttggcaatcttcacaccttctttctttagaacttctcttatgaaatgaagttttatatctatgtgtttggtacgttcatggtgcacacaattcttgtttaattgaattgcactttgatgatcacaatgcacggtgataaccttctagttgagttttaactcttccatcaacctagtcaaccaaagtgcctccttgattacttccgtcaagaccatatactcagcttcagttgtcgacaacgccaccacattttgaaggtttgctttcaactatgtgttgtaccaaacatgttaaacacataaccaattaatgactttcttgtatcaatacaccttgcataattagagtccacataactattgataacatcaaagtcttcactctatttgttcatgccaaacaccaatcccttgtcaacaaatctctttaagtatcttaagacccactttagggcctcccaatgctcatttctagggtaacctatgaatctactcaccatactaagtgtgtatgttatgtctagtttagtgcagaccatgacatacatgacggagccaactgcactagccaacagaacctttgacatctcgaacctcccagtttcatctttaggcatctaagtagtactcagtttgaagtgttgtgcaagtggagtgcttattgcctttgagttactcatttcaaaggtatccaaaacttttttgatgtagttcttctaattcaagtacagtagtctctttcccctttcccttattatgtccatgcctatgattctacttgttggacccaaatccttcattttaaactgattcttcaactggagtttcaagtatttgatctcctgcatactcttgttggcaattatatggtcatctacatacaacaatagatacagtgcatctccatttctttctttgaaatatatgtagagttcaaattaacttctctacaaacctatcttggtcatataatcatcaaatatcctatcccattgtctaagagattgtttcaaactttacaggaactttcttaacaagcacaccacgtgttcctttccaacctcctcaaatccttcatgttgtttcattagaattctttcttctggattttcgtacaagaaggtagttttgacatctaattgttctagctcaagatttcggcaagctacaagagccaacataattttaattgatttgtgcttaacaacagaagaaaatacctcactatagtcaactccttccacttgagagaacctttgaggaaccaaccttgctttataccgtgcctcttgcacatctggaatgccttccttccatctgtacacccatttgcagccgatgaccttaccatcttccaacattggtattaagtcacaagtatgattatttttcaaggagtacatctcctccgacatagctccattccatttcttttggtctttgcttttcattgcttgtgcatagctggtaggctcttcctacacaatctgattagcaacatgaaatgtgaatgctattaaatcaacatgttcatatctatctagagcttttacttctccccataccctgtccctagccaatttataacttttcagatcatcatttctagaaatcatcttctgaatcatcacttcatgatttgtaggtgtttcaacctccagtcttgctggaggctccacctcaagctcagttacatgtgcttcaatttccttttggtcagatatggcatgacttcaagcatggttgtcaataaatcccataattgattcattaaaggtcacatacttgctaattacatattttctcattttgagttccagcaccaaagtctataccctttgaatcctttcggataccccaagaaaatacattttaaggctcttgcctcaagcttatcttgccttatgtgtgcatagcaaacacatccaaataccttcaagtgttcataacttattggctttcgtgatcacacctcatttagtgtcttgaaattcggtgttgttgaaggacatttattaatcaaataagttgttgtagacacagattctgcccagaacattttaagcaaaccaacattcaatagcatgcacctcaccctttccagaatagtcctattaaacctttctgcaaggccattctgccaaggagtctttctcatagacctgtgcctaaatattccttcattcttacagaacacatgaaactcatttcaacaatactctaaaccattgtcagttctaagcctcttcactttctttcccgtttgattctcgatcattatcctccagtgtttaaatttttcaaacaccttagtcttattttccaaaataaacacccatgattttctcgaaaaatcatcaactatagacagaaagtacctgcttccccaacgtgatgctgttcttgaggttccccatggatcactatggatatagtccaatgttcccttggtactcttgccagttccgatttgaccctacaagacttaccaagaacacattattcacagaaatctaaatgttcaagctttacctttctgagtaatctttgcttattcagttcatacaaccctctttcacttacatggccaagtctcttgtgccatatt

SEQ ID NO: 301238 - DNA, 2982 bp, Cannabis indica
gtctcaagattatgatttgcaaagagaaagagatcatgattttgaacgagcaaagggtagtttcttggaccgagatcgagttcaagatagagacctggtagataatgacagagaggattgggagaaagatcgtgatttcaacttttataggaaaagggatattgatagagccaatggccatgatacatttgtggaaatagatgcttttttgaaattgaatgggtaaggtatctcttggttgattctacggtccaaaattttgatctgtaacaagctattagttggtcaatacttttcttaagcatatgtttgcatatcttcactaatctcttgcagaaaatgtcctttggtgttatattttactttatgcaattgtgaagcaatcattttctttgttgctgttggctttttttacacaaagtttttagagagtcttgtgcagtgcagtgatctgcttttactatagtttttatattcaacttcctggcagtttgtcgtactatcttctagacacgtagctaagaaaacgttttgggagatcactttttacccactcttatacaacatactctggaagatatttcagttttagatggggaaatcatttgggtaggatctttttgtttttagtttgtcttgcaatgttgacaagtggattataatacatgtttttttcccaatgtttgagtgtaaatagagattataaaatagtggtctatgtggctgtcttgtttttcagatcaacaatttctgttatatgcagatatctgaatcctctttgaattcaaataagtactttatcatataaaagttcttggtactctatctttatacggagtgagaggacaaaaactcatatactttaatgcattggcattagaatttacatttgttcatccctatgatatcattttttttctccaggtcaactgaagctgatcgacacaataaagaatttgtaagtgatataaatgatgaccaagtaagtaaacattctgattttcttgttaagtaggcagttgcatccatgtatttgtttagggtgctctctcttcttcttttttcaaaattcttaccttatcagctagaagaacaactgtatagatccagtcaaaggcttgaagaactaaacgaagaggtttgtgttttattctgatttgtagaagaatattatgattgcacattgtttgcttacaatagaaagaggtcttaattattttcaaaagtttgctgatgaccattggatgatatgtggtagttttcttatcttcactacaaaaggaaaaaacttgagcgagggcactttcatggttcagtaaatgcatagtcaaaactttgctgctaagaattcagtggaaacacacacacacacacacattgttatttttatctcagatttgtttttgtggatctaaggttctttacttttcagattctgcagttagaagataacttagaagagaaagaaaaatctgttttgtacttgcagcaaaagtctaaggtaaatcgtatccttgttgcttgagttatatcactttacttttttgatttagtgttttcaccacttctgttttctcataatgagcaaggtgactttcatttccctgtaatatttttatgattaatgcagaaattggaagatgcgttgatcaatgtaaagaaaacctcatcacacaataagacacagttgaccaaggtatttcaaatatttatcaatataaagctggagaaattctacccagacaatgattggattcagcgctgatttttctttgattttctgcagcttcacaaatgttttcggctagtacaagattatactgaaagacttaaaaccagggaaaaacaacttcaggttggtcatctctcagagtcctcatgtaccatatatgatactacttttttcttagttgcatgctttattcgtagctaggacttaccagagataatgcatacaattgatcttttactcacgtttatcagtatgccattttgcatacatactagtttcgtagtacttattcatctttcttaaacctctgtttttctggtaataatactgtcgttcctgtaacatgacattgacttgcatacatatacattctatccttgctcgagaacctactatttatatcatatatgcttggtcttaagactcttaacactctcatattgctcccataaaaatgctgccgctcttctacttgaagcagtctcttgttgatgaggtgaagacaggaggcctatgtgctggaatcacagcgaatggaaatgcctgagtcatgctcagtttacaaggcttgtaatttgaacaacatttcattttttggttttcttggggcatccatcacatttgctgcggtgcttagtagttgtatcttctgatatatagtaggtatatatatatatacacttaaacatgagagtttataagtgttagatttattaaacaagtgaagctttttgaaatgtacagcaagttgtttttccccagtggtttatttgaaaccttttttggatagttgaagtgaaatcatatagctaataaaatatatactatattattattaatcactccagccctatgctgcagcctatagagtatagaggtctcatatcattcttgtcatgttgtagaagaacgcagtagaaaattcatctttattttaagggttatttgtttgtgtattctttcaactttctggggctcatattaacaaatttaacaaattatctacgaagtttgaaaaataaaaattgactcaattctatttcaattcgtccctcgttgcacctacctaacccccatgaccctctctcattaaaattgcctatgaaagcatctttatcatgtactattaagcaagactgttagttaggaatacagttagtagagttagttacagtttgtacactttatttaactgaattctaatttaaaagctattactctcttgattcagttgataatactctctctct

SEQ ID NO: 301239 - DNA, 3008 bp, Cannabis indica
tttttttaatttacggtttgaatgcaataaagatttttatacaatttttttttgttacagtttaggttacagctctaagctatagttgcaataggaaaatctatgtaaaatttaataaagaaaatgttttaaaatgtaaaaattaaaaaagcctcgataaattaagtaatatgtatgagttaagaaaaaaaaaaggggaaaatgataaaaacaaaaaaaaacatctgtcttgagaagcagaagatcctgccacagagggtgatggacccctcaaaacgcacgtgagtggcggtaacgcacgtggactatgaaaacgcagtatgtgggtgggccatagaaccagctccagctccacggtataaagccgttggacctacttaagccaatcagatatggtgatgacgtggtaccgagagagtaataactggtgatcagaggttcattaatatgaaactaggaagtcttttctttcttttaattaatatatacgaaaggctattgggcttttaggtgaatatatatttgaaattttataggcaaataaaaaagtaaaaaaaaagaagaaagaataaagacaacgacaaagtttgtagctttcagaagggagctgacatagaaagaagaaaaagacaaaagaggtcgaaccaaccaaccgtattcatgtttttcgttccatttaaaataaaaacttaaaaagtttttatatatataatttggtttcttgtaatgccattgccacctagctaatcgaatgaccgacccaccgagttgtggatgaagcctcattatgctcctattcctcttattcattagtttcacgtacttttgacttcgaaaaggaggagagaaaaagtagaatttattgtgatcactactaccttaggtagtcgctaggcaatactaacaatgaagaaacggctggaaatcatatatatatacattacatgaatgtattctgtaaatatatatatatactactagctttgtatgttaataattatcataaaaggtcaaatttcaaactattttatatgtatagagtgggggtgggtctaagagaaaagtattattggctgagaaagcatgcatgagtgccacttgtttatgtggggtcatgcattgcatgcagggtaaatgccacctgtacactctctggtcatattccccatacacagtgcactattattctacggttttcatcatcatagctgcaaacaaacaaacacaccttcttttgccatcttccttacactagtaccactgaactgatattgatcagtttttctaaaatatttttgttctaattcatttcaagaaaaataggaaaacagaaaagatcgaagcagttgtgtataccttcaagtgcattttagatatacagattaagtgaatgacgttattattaatgaccaacaagacgatatgtgaagaaatgcatgatttgtatgtaacatatatatacatatatacataattacaaaatcgtgagtatcactagccagaacaaaacccagctggtaagagatcacgatcacactaataaaaaaaggtgacttattagtttatttatatacacgattatattacatatatattaaaaactattgcatgcatgatggatgatatattcacaagcttatattctaaacacacgttaaatttagtttttatggtacgttgtgataaccgatcgatcgataatatgtaattcaagaatattgtataataatatgaaaaatgaatatcaaattaaattttgcctataaaatattctgtatatatatttatatatgtttaccagagcttgcattggagatcttgcggtagccatgaaaagctccacgttccatttcgatggatctctctgccgagctagataaaaataccaagatgggtttatgtgtttctctgtaaaaagttcgattttgaaaatgcagtaacaaaaggcactaagttggttaataatggcaagagtcaaacttatagaaagtgaaaaagcacaactaatgtggcagccattagtgagttggacgaggaacccggcgtttgccggtacttattagctttccctgatggacagcactgtctcataatccacatggactttgatattaccggcagtcgtaggttactttgctccctcgtacttgtacaacgtaagtgggcttatttttattaatcttttagcccaagaggcccatctatttttatatcaacaattttgggaaatttacatagtataataacttttgtcatttttctacaaaaaaaatactgttaggcggagttttttacttttttactatattttttttataagttttatactgcagtatactgtgttaagttttattggtattctactggtattttttagttgttctactgttgttttgagttgttttactttgtattttactggtgttttataaaaacacagtatttttgaaagaatttatgtgatagtatttttgtaaaaattaactcaaattccaatatttttgtaaatttcccacaattttttcatgaaaattagctgctactcacttttttgaataaaaatgagctgataggcacttttctttttgcgtcagttaattttcaagtttgagttcattttagatgacaaaaacaaaaggaaaaacagaaaaaaagaaaaaactagaactgaaatgttatcttccttttcctatgctttttcttgttttgtattttttttttttgctagaaatagcttgttgaattgtatatacagtaaactgtgctaaattattaaatattttttttatattattttgtagttaagtttattgtctttttcattaaaaagtaaaataaaattaaattcaaaaaaaatcatatattaatgcacaataataacattaggtaataaataaaaatcaaaatttggaaaaaaaaaacaataaaatattattttttgtagaaaaatatttaatatagtggaactttttgtgtgtcactatatctctaaaaatattaataaaaag

SEQ ID NO: 301240 - DNA, 1814 bp, Cannabis indica
ttcttcttctttctcttcttattttgtacgattattctcttaaaatttagttattcatgttcggagatgttggctcgattttccctcgcattgaacccccgatagtgaaaacctaatctggtactggcatcttcccatttctgacctgaaaggtcagagtgaaggtttggaaatgtacgttttctacttatattgctttttgatgtggttcgtttcttcgtttggctgcactgggcatatgaatcaattataaattttgtgtctggttctattatctatactgcagctagggttttatacatgaagattcttgaatttttcttgtgggatttatttattttgataaatttaaaggaaatgggaaaaaagttgaatatgatattttactgcttacttgttcattttcttattaaatcgaggaaaaaatggttattacctggttaatttgaatgttattgctgcacagacgaatagttcagaatggctgatcatcgcaatggaaatggccaacctcctaacgggaaggccactggggctgcgtactctattgatctagtcaaattcagtgagcgattgaagactctttattcacattggaatgaacacaaatctgacatgtggggttcttctgatgtgcttgcaatagctactccgccagcatctgaggatctgcggtatctgaagtcctcagcattgaacatttggcttctgggatatgaatttcctgatacaattatggtcttcatgaagaagcagattcattttttgtgcagccagaagaaggtatctttgctcgatgttgtgaaaaaacctgcaaaggagagtcttggtattgatgttgtgatgcacgtgaaggcaaaaaatgatgatggaagtgggctcatggaagctatatttggtgccatccgagctcaatccaaggatgagggcggcaacgtggttggacacatagctagagaagttcccgagggaaatcttttggaaatgtgggctgacaagttgaaaaatgctaatttccagcttagtgatatagcaaatggattatccgatctgtttgcttgtaaagacaaggaagagcttgtgaatgttaagaaagctgccttcttgactagtaatgttatgaataacattgtagttccgaagcttgagaacgtcattgacgaggaaaagaaagtcacccattctcttttgatgaatgagacagagaaggctatattggagccttctaaagctagtgcgaagcttaaggcagagaatgttgacatctgttaccctcctatatttcaaagtggtggagagtttgatttgaggcctagtgctgcaagcaatgacgagcttctttactatgactcggctagtgttatcatatgtgctattggatcccggtataagagttactgctccaatgttgcgaggacattcttgattgatgccaacccgcttcaaagtaaggcatatgcggttcttcttaaggcacacgatgcagctatcagcgagttgaaaccagggaataaaatcagtgctgcttatcaagcagctttctcaattgttgagaaggatgctcctgaattagttccaaatttgacaaaatctgctgggacaggcattggccttgaatttcgtgagtctgggttgaatcttaatgcaaaaaatgacagggtagtgaaaactggcatgatctttaatgtgtcacttggttttcagaatttacaggttcaaaccactaaccccaaaaaacagaatttttcgttgttgcttgctgacactgttattgtcgacaaggataagaccgaagtagtgaccagtaaaagttc

SEQ ID NO: 301241 - DNA, 642 bp, Cannabis indica
tttttttttttttggctcttttcaacttgagagaggccttagacagagtgaccccatgtctccttatcttttcttgttgtgtgttgaaggcctgactgcttttgttagcttactccttgggatttcttgtggtactttggggccgactccctcatttactgtttgttgatgattcttttttctttttggaagcctcagtgattggtgtgtgatcgatttaaattgttattgacttggcatggttctgcttctaatcaaagtattaattttgagaagtctgttgttataaagaagatatgatagctatccttggtgtgattggtgtagagtgtcatgaaaaatatttgggtctttcttgtttttctgttaagaacaagtctagattgtttaatttgatgtgggatcgtatttgaaaaaagcttaatggttggaaggctaagtttttttccatagcgagttgtggaattcttattaagactattattaaatctatcccaacttacaagatgtctcttttcaaactttctaaggattttgtggttaacattcatggcatgtgtgctagattttggtggagtggtgatgatatcaaacagaagatgcaatggtgtacgtggaaaatgttagaatttattttaccag

SEQ ID NO: 301242 - DNA, 1200 bp, Cannabis indica
tagttaatttttatttttgttttttttgcgatgaatggagtatgttaattaattaagctatataccatcctttctcataagagaatacatatgtatgttgttttctttatttgagaactacatgttatgattagtttcatatttgagaagtatgaactcagtaattgtatgtgtgtatgtagtatgtactattggacttgtgcgtgtaagcttttcttttcagcaggagtataaatatagagttagtttggtacaccctattgtattattgtattgttaaatatcgtgttatattgtattatatattatataagtattatttaatacaataatattatttgctaaacttgatacacaaatatacgtagttgtaatacaataataaataatataaaggttgatatattaactaccaaaaattaatttctatattctagttgattaacaattagttaatttcaaaaaatgtagaaccacaaactagataataaaaattaaatctaaaagagataacaaaattaataaaaaagtaaatggatgaaaactaggggcttttaatctcatcacctatccaccataacattttataacacaatttcaatatttccttcttatagcgaatttatgaaagatatctatattcgagttaggacatatataaatttcaacttatatttttctttttgataaatttaaacatatagaatttattaagtataaaaatcataaatactacacaaaccatacagttacgctaaacaattatagcatattcaattctcactttttaaattttgaataaaaaaacttaaatcatgtaaatagtaattaagcatatacaagcattaaacataaattacataaatcataataatgaaaaataaaattaaataaattgcattaatctataattagagaatagagaagagaagaaattggatgtgagatttagacatcaaacacagaaaatagataagagaagaaaaagtagttttaggtcttcaatattgattaatcctttgtaatgttccccgcttcaagcctctattgggccttcccccacggactcatggctcttatacacgaatacgtcattatggctgcttcctggactaaaaactgaccctacaaacaaataagagtgtttcccacatactttgtccttactcgcacgctccttgagaaaacttctcaggaggt

SEQ ID NO: 301243 - DNA, 1083 bp, Cannabis indica
ttttttctaaacactttaccgatttttacccctgtcacatcaatatactctccatgtgactcccttatatcagggtattttgggtacaatacatatgttttaattaaatataaaattagaggtagttttgattaattgataaataaaagaggtatttctcaatatacccctaacaaaaaaggcactgaagaaaccataatttgaagctaatttgttgtaaatttcttacttaccatccttcaatgaagcctctatcccctttcttttttgtacgagtacaacacttagtcttcacatgatctgttttgtcattaatataaaccaacttagtcaaaacaataaagattttctaaactaataaaagagccaaaaacaataatgaaaacctgaattagggtgtgattttcttctcatctaaatcatgtggcactgacttttgttctccattcatagccattttgggtttagaaaactatattacaaatttatttcactcaatttttctttgtgtctaagtttatttatatagtgatacaaataaatggaataaattaatgacctttctttttatcttctccatttgtctaagaataagaatctgagtttgaaaatctaagacaccttttttagctagcttgcatttacatgagaaaattcttgatttagctttagatagagaattattatatgttgaagaatattattattattatatgagttggaaaagagttctttcttgtgtgctaagaaaaaaaatgagtatgagattgtgaaagaaagaaagaaagaagaatgtaatttgtcaaaaagttttgagtgtgaaatttcatccatctttgtagaagaatatatactttgtttcctttgtggaaaagtatatcttttttattagtagacaaaatccttgggaatatataggtagtatttggataattcttgaatttaaattcaatttaataaaatttttctccattaaaataaaatggagggaaatttttaaaaatatccttattttatatttaatttataattttacggtttaaaaattttaattacaaaaatacacttataaagttttaaaat

SEQ ID NO: 301244 - DNA, 2362 bp, Cannabis indica
actatttaaaatcgtcaggaaaaatttagtattctcgacggtttaaaatcatagtaaacaaaataggcgatgtttttttaataaaatgcgatttttaatggacccttatacccgacggtttaaaactgtcgggtatagtataggcgacggtttaaaactgtttcctatagtataggtgacgattttaaaccgtcgcctataaaggtccattaaaaaatcgtcacctacttctcgccacatttcccacgtgcccacttactttttttctatttcccacatgcccacctatttcttctcacctatttcttctccatttcccataccctaaaatgaaaatcttaactctccaaaaccccacccacgcctttgcaccatcgcagtcctctctcgccggcttcctccctctctcgatctccctttcttctcgtctctctcacccatcgatctccacccacccctcctccaatcggtctccgtctactctctgtcgcatacgtcggtatattactttttttatttattatatatattttgttattgtataaattaacgtgttttaaggttagttgttactgtaataaaattaaaaagttgtttctttttaatttagataaaattataaaactaatgcagaaaaattggagagaatacagattttttctgctattaatggtagaaaactctgtatttttttttatgttttttttacattcgcaacggctttaaaatcgtcgcctataacaaggtataaggaacgatttttcaccgtgccctacactataagtaacttaaattagcctaaaatgtaacaaaaaatatgaacgaaaattaatttaaaagtaatctaggtacttactttaagtatatttaaggagtatattactttgggtgattctacaatgcacccccttaaaagggatgtattgatgcacccctagttgtttcgtcatctagaaaaaaaaaattagtctaattttttttatatattcacgtacgttatagctatttaagatatcttacaaaattttgagaaattctgaataatttacaatatagaaaataatgttcaaacagtctatagtcaggcgtgcaacacactgcttgaaagcaattttcggcgtgttaaacttttctaaatttcttaaaattttgtaggatgtcttaaataactataatttacatgaccatgagaaaaaatttgtgtaaaaaattatttcggatactaaaacagagagagatgtatcggtgtatctttttaggaggtgcattatagaatttccctattatttttattcaaaacaataaatatttttactttagatgaataaaatgatttgaacaaatgatttagtgcttatgtgttgtaactaaatattgattaacatgctatgttcaatttcacatatggttaattaaattaaatatttcacactgatcaaaatatgcatgtgtatataaatacagaaaagtgtattacggtgaatacaagtgcagtggaccaggagccaacttggccggtagagttcgatgggctcgaatgctgacagatgaagaggctaaacctttcattgggacctactacgtccaaggggacaattggcttattccatcttaattgccttgccttcatttttttttttatttatatttatatatcttaattatcatatttataccgctgattaatctcataaataatgtcttgactattcattattactacctcaaactagaatttggggaaatgtacggtgacactattatgtcggaaacaaaaatgtttcctcagtttttatataatatttattcctttattattgtttggacaaaatttgtgtagtgtgaattacttatatagtatgaatttttatgttaagatcataagatgaatgacatgtttactcatttacagtgtagtatatctataacatgaatagaagaattgatgttcacaaacaaacaaaacaaaaaagaagacttgtttttatcttttgtgctttctttctttttctctttctttattttttattttttataatttttatgtattttatttatttattattttttttttaacttttatgatattttttaattgtaatttttatttaattaataatttttatattatatttatttgttattttttatttaattttttaattttttgtttttttttattgttttaggtccaactaaggaaatcacatagtgcaggttattttttttccttacactttcgatcatttttggcaattttagagaccatgtgtcatagaagtcttatatctcagtcccttaattgggtcatcaataacaataattttttattttttatttcttttcttttttaaaaaaaaaa

SEQ ID NO: 301245 - DNA, 1240 bp, Cannabis indica
catgtcatcattttatttgtcacgtcaaaacttgataaaatgactaatttataatagtattgtgaatagttcaatgagcatttttaacgggctgaaaagttaaggagacacaataatgtataggtcataatttgaggacaaaaatcccgaatagccaataaataatatataatatttttaatttttatgtaatataataattttgtacatttaaatttttaaattaaattttatttttacgttaggagatttttcgtctcgtctccaataaaaaataagcgaaaatacatgggattaaaatccttaacaagaatagaaacagaaaaacactcccctcaattccttactccgtggacattcttacataccatataaataaataaacaataaacaaacattttcttacatatatatataattaatgttagattaataataatttactctaaaatttgtccttttcatagatcatataatcatataataatttgaaaaataacttttaaccaccaaacattttattttctattctaaatttcacaaagtacatagtttttgtaaggtaattattacattattatattaatctttgtctagcatagcatattaaatttaaacatatatataattgtgatttgcttgtgtaaaaaatggggtccacacatagagtaaaccaggctaaaagcaagcaaagcacatcacctaacatgtatataaatatatgtgtttgcaatttccagctagagctagctttttctagctcatatatcaaaataattattggtacatattttgacaaaaaaattacttaatatcaattacaagtttaacatttgttataattaataacattagattaggaaggaaaaaacaatgtcttttaataattatcacatattatgttatgattgatattcaaacctttttatgtttagttgttagtttttaataattgtactaacatgatcatgataatctaaacaactaatcaaaactcatatgattgtgattataatttctctaattaaagaagagaaaatgcacaaaaaggagataccattttggttaaagtgttacaatgtttgatatatcataattatggattagaactagtggtgttttgggtgtttgctagctttaattaggttataatatatatgggttaaagtcaagctaagacaaatgtgttcatgctcatatatatataaaatatacaaatatatatagaagatatgtggat

SEQ ID NO: 301246 - DNA, 1118 bp, Cannabis indica
acattttggttggtgtacatgtttgaacaaggacctcatatgatattgtcatgtttccaaaagaaacttccttgacagaacccaatttaaacattttatgctttcagtttgttcctaattgtaataatcctactatcctagcttccaaaacattctaataactatcgaaaacaagaagaaaagtattactagaagcttcaatttggattttgtcaactacaactacattttgtcaacatcactttgatcaaaacttcaatttttgttgatcacacttcaaaaataagtctaccctatttatgagatgatattctttcccagaaagattgttttgaaatttaaaataataacatcaataattctttttttaaaaaaaaaaaaaaagtaaaaaagttatcttgctttttaagtttgttgatttgtacggattttgttcgtttttgtcaaacttgctaagatgaacagcatttatggtaggccatcttattaatcatatgtatgaaattttaaatgttggtgtgctatagagtcaaaccttttataataatttgaccaagtagatcaacattattatcactagtaacatgtaatttcaataataatttgaattattggtattggaggtaataaattatgtataaatatattgattatcagttaattgttataaaaattgtagatggtcttacaacatgaacatgatagttgcacttgtagacattttaaacatatacaagtcttgcaacgcatctcatgatgccaggtcgattgaggagttaatggagtttgtgattttttttttttttttttttggttttgatgggcattcctctcatgtttggttaagtactactttacatgaattaaacgagcaaagatgcctttaaaaacaggactaaaggcaaggtttcgcccctagtagactaatagtatgcttgtttgttttgtaaagaaaattcacaaaatggtgtagaatttatattttcttatgtttataatttatcttctggtatatttgttatttgctgttccttctcccacaagtaggtttaatactatttttttttttttttttttgtatattgaaaataagcatttatagattaaaataaaagtta

SEQ ID NO: 301247 - DNA, 2063 bp, Cannabis indica
aaaaaaaaacatttttttttattgggaggtgaatttccagttgacagaacaaacttgcatcctaacctcaaattaatctaaatcaattccttggctatttatttccttcaattacctaaattttatggtgtatgggttgttggacttgtattaatccttacgagaactaatcaccttgtcttatgcaacaacatacttgggttctttatgtaatttgtgcatgttcatgatggttttgtgcgattatatggttaagatgcatatttcttttgtcgctggagcttgtgatgataaagttgctttttctataggtgttattccaaaatgattcacctgctacgttactggcacgggtgatgggaatcataggccccattgaacaaggcatgttagtgaaaggtcgagacacatacaaatattttaccaaaaatcacatgctttatgaacggaatcaggtaatatcattatcatattcatactctttaatttcctttttctttcattaagacatttagtattccagctttatttctattgtattagtatgaaatataaaactttcaactgtttcattatattgatattggtgagaagcaacaatttggagtctccaaattgtagcaaatacatggggcgtagattggcatgcattatctttaaataactattttgtcaggtttagcagtcaaagtactaggtcaaaatgaagccaggaagtggagcatagatacatggcatttttatttttagttttatcttgtatattctttgagaaatgatgaaaagtgatgtatccatgtatattattcaggaaacgagtaggctggaatacttgataccaaaaaagacatccttgaggcatcgacttccgatgggggatcaaggcttcattgaatttgttgctcatctgcttgaggtaaatccgaagaagcgtccatctgcattggaggctttgaaacatccatggttatcttatccttatgaacccatatcagcatagcatgaaaggaggagattatttatttattgtgattagatgcaacatcagatttcctggggtttcggtttgggtttcttaccaagaaaaggaaagggccataaacatttgattgcttgcttgcctgccgtaactcactatcatctaggtgagtttaaaagagatttgccccttcacgttgaaaggtgtgtttagctttgtggtgatgtaccctttttccccccttcctgtcacaaagttgtactcccattttaaccataattaatcagaaaatgtaatcttgcacgtgctgtattacttactaggttcttcactttgttttgggtcttctagccttagtggagacaggggaaatcttaaaatatcctgttgtacatggttgtgataattcttttaggtaatttagttatattaattttgtgaaatatctgcctaattcaagttttggctgggctcctgataatgcccttttgcattattttattgcatcagactaatgtgccattttatgcttgtgctatttatagcttttcatgtaattttatcttttctatttgatttcgttaaagcaaagtcctagaaataggggctttgatgtagttgagacaattggaatttaaaagcttttggtctctatcttcgttaaacactttttttcccgcttattcgtccacaaaatttgtagtattcctaatgtttttacacttattttttttagtttctctagctatataattcgttcggtaggaatattacttgttcaactattaatggacgagtttttgtttacctaatgtttgtaaaattgtatttttttgtttaattttgtcagactctgtcattgtcttaaacaggacacatagaaatatgtaatatcagttacttccaaatgtgcttttaataaattcaaaacagagtgtattgacgaaactggaagaaaattatagttttacaaacattaagtacttatgttgctaaaaataagagattatttcacaaaaacataaaaataataaaaaaaattacaaaaataaagtttcacagaattttaaaaatttttacgatt

SEQ ID NO: 301248 - DNA, 3695 bp, Cannabis indica
attaacataaataactgctaatttccaaattaactaagcgggctttacatggcatgcctctgacacaatccccataaatctggtgaccttttctcctctaccagacacaaggcaaaaagggggtcacctatattagggagccacattactttgacattccttttttttttttccaatgatagtgcacgtccatgtctgtcgctatcagcagtacaatatcgtacgacagattgcttttaagagttgggcctcacttacctaacgcaatagctcaaaagaatgcatgattaatatattttaattagcctatcagtagattttttgttacaataaacccgagtgtggcccggatccgccggacccataagcatgactgcctataaataagacattttatcttttatgtagggttcacgacctgaatatatatgttagagctatagaaattgtacagctaaagctaaaggcatataaaaatgtttcatggagtaaggctccacgtaaaaagttgtgttctcttattctctaatctattgtttttgcttaatctttcttaattaatatctcgtttcaaaaacactcattaaataattatatatgaaaaacaaaaagttcaatgtaaagtaactaattcaatcggcatatatatatttgtgaattggaatatggtttcgaagtaaagaattataggattaggtttgatacagcatataaaatctgcatttaagaatgatttaatagagtatgagccaaataatacaaatttatttgattaacatccttgcgtaataggtataacagcaataaagcttcaaaaaacaaaaaggattattattatatatatagaccagctagagaaagcaacttttaatttgttttgaagatatatatgtgctaaaattgagaaccccagcaaatgcactacccggctagttccatggcccaagaaattgcatcacgtgataactggatatttattactcatgaactttaaattagtatagttttcatgtacacgcaatgtaatgtaagtaaactatgataatattaataaactaaagcattttgagtttaagaaacgtgattaatgcgtactataatatggggagaaaaagttaggtagaatagttaacttcagataatttaactatatatataacaactatatcattcagacttgatatatcttatgaaagtaaacctagtagaagtagactagtaataatataagcaaaatacaacaatgaaacactattacttgtgcttgtgtagtattattactgcattgtttcttctagtaaatgttagctcctacgcagtagcagcaggagaatgtggaaaagatgctggcggtgctctttgtgctgagggcttttgctgtagtaactacggatactgtggtcaaaccgacgactattgtgcccctgataagtgccaaagccaatgcccaactccttctccacccccgccaccatcaccaccgtctccgccacctcctcccttcacaccaccacctccggcgtctcccgaagatattagcaacatcattactccatcaatattcgaggagatgcttacctatagaaatgaccctcgatgcaaaagcaatggcttctacgcctacgatgccttcataacagccgctagaaattttccaagctttggtactactggtactctagaaactcgtaagagagaactcgcggcattccttgcccaaacttctcacgagaccacaggtaaccattttcattactgacccttgtgttccttatgttcttaaagaaatatatgtagtttttttcaatttgctgattatgtctctttacgaattgtatatatacaggaggatggtcaaccgcagaaggaggaccatatgcttggggatattgctttatcagcgaagtaggtcagcctggttcttattgcgtacctagcacagaatggccttgtgttcctggcaaaaaatactatggtcgtggacccattcaaatcagttagtaagtgaccattgtctactatctgctgggagaattaataatatgatcagtgcttttcacatgaatatataatgcacatgtcataccttttttaacacttgttcatttgtgatgatatataaccagtaattacaactacggacccgctggtcaagcacttggattggaactattaagcaacccagatctagttgcaacagacgcagttgtttcattcaagacagctatatggttttggatgactccacagtataataagccatcttgtcacgacgttattgttggcgagtggataccgacaccggctgacgtggcagctaatcgacttccgggctatggtgtcatcactaacataatcaacggaggtctggagtgcggccatggtgaagatgacagggttaaagataggattggtttctatgaaaggtactgcggtatacttggagtaagcactggggaaaacgtggactgttactatcaacactctttcggttttagactcatgaatgcaagatcatttggagtgatcaaaatgtcggtcgacgaataggggtagtgtattaatagtgtataatgtttttttgtaatgagttgtacacgtacgtacttgtatatatagctatatttatcatatacggtacgtacacttaataaggtgaggatataaattaataataagcaactcaactacttttgtggttattctattatgaagatacgatctgctctaattcttttttttgtttttgcaaagtaatctgctctaattctgtgcacaaacgttttactcttccttttcatgtgttcctgttgctcaaaactttttgcaaaaatttcactcatatccaagtactatttgtcttctagtgcacaattttttattaaatgtaggtatatacaattacattaagtagattttttgaaatgtatattaattacattgattttgtagagtctcatgcttaacttttctataactaattaaaaacaatatctcatttttaccatcatatgaccagaggttgttgcattggttcagagagtgttgaaatgaaaggtcaagaagcatcagaattgaaggaaaaaaaaatattctgccttattaggatcaataccaaatattaccgttgcaaatatttgctgtgcaattttgtactatttttgacccttgttagttgtcccaattgaggaatattagtctgttatagcctagccaataggattgatttccttaactaggagtaaatcttagagcagaaagtgccccatgattcaagccaatggagaccccaacctcaacagaaaagtcctctatcaaccccacaaatgacccacgagtgaccataacagcctcttctgaactttatgcaccttcctctatccctacacaaactgttatgtcatcacctttccaaagccttgcacttcttgcaattaaacttgacagaaaaaattacctattttcgaagtcacaagctagttcttcctaccctattggggccgtttggtatgcaggtttcattacataggaataggtgtaacattacttggaaagtgatcaaggaaatgataaatctatctaggatagcaacattaccgtgtttggttgactttggaatggaatgtgataacttttttttgacaataatatttttttttttgtaaaatactaatgactcaataatattttttttt

SEQ ID NO: 301249 - DNA, 2078 bp, Cannabis indica
ataagatgccacatcaagtccaccaaactactcctatatatatatatatatatatatatatattttgatattgatttgaaatttatcctatctatttcattatgtttgcatatggagacttcgttaaattttgaaacttattataaattgttatattcataccttaaaccatgatatctcttttcgaatctgtagtgttcctccaagtttatgatcgagtttacttggaggtggcaatgttgcagccatgtgtaatatgttgttattatcatcatcttgatatgttatgatgacatccttaactgagccaatctcatgtattaaattgaatatttttgagtgtcgattcaagacagcaatatggaatatggttctatttttctcatccacatcccataccaaatctggttgtgcgtgaataagctcagccaaaaacttaaagttgcctaattcagccgcctcgaataataagcttgatggtttgttaattagattgtttaccttcgactctggtaaacgtactaaaatttcattccaaaggcttctaacaagttgaagggcttgatttttcagactctttctgaatgaaggaaccagacctgaaataacatatatatatataaccagacctgaaataacatatagttgtacatgtttacttaactatttatgaatatgtatctatatatctatataaatctaatatttggtgtttttctaataaaatgagtatctctaaaatgaatatttattattttttattgaaagacatacttgaggtgatgtcgctggagctcttccatgtccatagtctaggagtttggtaacaaaggatataggtttttctagctaaaatatgcaatgcagtatcattattcacatctcgagctattgctagttcactgtcatcttcaagcattttcaatgcaagacctgtttagtatattaatcacagtaaggggtattagatttgtttagtatattgagaagtgttacacgtatatttgtgtgatagtgtgtgttaaattattattatatattttgtaagatatatgttcccttaccgtacaaatcagaattgatacacgtgaagaaaattccaatccattcgccctgctcaagaatcttctttgtaataggatagagaaaccatgacattttattatggccaaacaaagtagccatgtaaagtggtgtcatgccttggccacctcgaataagtggcaaattcttatttttgttaataagaataatggcaatatctatgcttccgctgatagtagcatagcaaaacgcagtgtttcctttgcaatcctgcaaagctagatcgttttcttccatcaatttcaccaactccttcacaagttggacgtgttttgctccagccgcaatgtgaagaacagtttcttctgctcttgtgattgcggtacgtaacaatgcgctattattctttatgattttcagtacagttctagtgtcattcttcaagatagcatagtaaagacgaggaaccgtttcttgaaattcttgtcttgcttctcctacaaaagaaattttgaacatactcataactaacttgtattgtggttgtgaatatatataaatacataaatataatattatatataattaaaaaaattaatatatgcaaaaagcagtacccccttcgtccccttctctctctctacctatctctctttttctctctcttcaaaacacaagaaaaaaaacccacaaactaccataaccaccacactccggcgacctaccttcggccactgaccaggcccacgcgccggaccactcgaacctcctagtgtcggggacctcaacccccaagcggggccgctcctttcgccgccgttagcttgagattgcaagtcaaaggtttggtgattcaaacattaaacctattttccgatcacctccggcgtgtgtttgacgagacgttttcaccactaaactcagctcgtcgaggagaacaacctacactaaaccattttgcctcgttcgctactttttctagtgacatttttgtagctccaccctttccggcgacattgtgtaccgttttgaca

SEQ ID NO: 301250 - DNA, 2579 bp, Cannabis indica
caattactttatatttttgagatcaatctgaagaatcttatctctggacgtggtcccgtagactagtaacaatttgcatgaaattttgatacctcgtataaaaatcttgtgtatttttatgtttttgtacttttattctttactagttattcattctactgttacacaatcatattttgtagctacagattaccaatttatgtaccaaatttattaattgatgaattaaataataagttggtaattataaagtacgaaatttcaaaatctataatatatgagaataagaacatatatacatatataatatatagataacaaaaaagagagaaataaaattattcttcaaatgatttcagtcagatgagtattaatatatatatttactgcatcatcatctcaaaacaactcaagaactttaataaaaactatttactttggcaagagacttgtgctgataatatattatgaataatataaaataagggtaaatacaattttggactctgtgttttgtaaaagttatcggaccttctgttttgttaaatgacaaaatagaccctgtattttttaaaattgtacaaatagaaccctaagccgattttttatcataataaaacttaataataatatgatgtagagatattatgataaaattggttacatttaatgtatatgttcgtgttaaaaattgtcttaaagttagttatattaaaaaataaaatagttaaaaattgagtttagggtcttatttttattattttgaaaaatatagggtccattttgtcatttaacaaaatagaaggtctaattgataatttttgtaaaacacatagtttaaaataatatttacccataaaataaagaataagaaataagatgaagagaagaagaaacaatgaaagagaatttcctaaatacgttattttaatgagtgattccttaattatacaaaaatgtgagccacaaaatagaaagctaagaaaaagaatgctgataattaattggaagatttgcacatccacataaaaattatttataactattaatatatagttgataaaatacaatcttctcaaaattaattacatatacaaaccaaaaaaatacaccaaattatcacattaaattcgagcgagaataaatatatttaattttgtcatttaatccaaattagcaaattaagaattttacaataatatttaattagtagcctagtgaatttatatgaagagcccattttttcccctttaaaatattattttcttgtactactaaattaatttttttttaagaaatgtcactaataaaattgagtgagtgtttaaaactaacacctataattgagaattcttatcagttttaaacatacacatcaatttaaaatagctatagaaataaaattaaaatagtacatatcaatatgaatctacatgggctcaaaatcatagagtatacccaacagttttaacccatcaagtatagtataccgcacgattttgaatcgccgaaaattctcgtgataaaattaaacctccaaatctcatattcaaacatttatttctctcaaaccatcaaaatgacccattatttatatcattcacctctctttgagaccaaaagcttcctaaatccctgtccttttaacctccatttgtttgattttgaggctttgattcaggtatacaaggattcactctcgaagtaacttataattcatcttcatatctctctctctctctctctctctctcttcttttttttttttttttttttattcttgatggtttgagaataaatttgtattggtttagatttgtatgggatggatattaggtagtgtagtatgatgatgttgataagttgataagttggatgattggtgggacaaggaagagttatgtagtgttttaatttttatgtgtgtagtaagagaggagacaaggtagtaggctagtagtaaaagacttgctttggctactcaagcttggttacaatttggaagcttgatggggtatttatagttgctcaccccttacactttatggctagaattatttcttctagatccttcttttactagaaggaattatatccaaacaaatctaaatatttctagaatacaacataactagtatattctagatttaatctaatctagaattctcttaagttcttagataatttttctacaagtgtatagaaatttctagactaaattgtgtagaaatgtgtagcaaatttcatcactcctccttggtacacatttcggtaactccaatcatgtctcgcagtagctcgaacttgcctcttggtagtgcctttgtgaatatgtctgctacctgctcttcagtcttgcagtgcttgagctcgatttctttgtttgcttctgcttccctgatgaaatggtacttgatgcttatatgtttagttctactatgaaatactggatttttcgccattgctatagctgatttgctatcgcaatatatctttgtagcttctttctgtaattctcccatgtcttcaagtattcttttgagccatatagcttggcttgtagtcattgctgctgcaat

SEQ ID NO: 301251 - DNA, 1709 bp, Cannabis indica
tttttattttcttttctaagaaaaaagaatactgacaccaaatgaaagttaaaagcttctatcgcttattggaaaaatattcaaaagtccattaacaagtacaacaattgcactttcaagctccattaacaagtacaattttttttataattatggggcggtgcaagaagtttccttcttcttcccctccttctctccttaattttttcattcaattaattttgtgatacatgaatggtttaaatttaatttccatttataatgaaaatcaaattttaaagataccaatcttcttaaaatttgctggtttataaagaatagatctccaattttgaagtgtctgcagtggtgagtcgtttcttgtataaaacataaattcaaagactaacaataataaaatacgacaatgagaatagaaagtaaaccagacatcttcttttccatcaagattgtacatcgctgacctttacattcactgagaccgtcgacccgaattgcaattaatgaaaagaagcatgcattgatctgcatcgatctcattatacaaaatatcagatctaagagcacaatcaatctcaccatcttcaagctgctaaaggacatgaatccacgattcccctgtacagaggaagaaagcgagattaggctctgaatacttacaaggaatcgagatcttcgaaatattgagctcgagacgacccttgtgcgtgaacccaaattcgtttatagggacaatcatccgtacctcattttgtatctcagaaaatcgaattttaacaaaacagagtgagaaagccattgtaatagtaagaaagatggtgaattgggtgtcaccatgattgtctgattgagattgatgattttagaggctgattggctttatagtttaaaaactgttttctgttttcaattttcaaaaataattttttttgtctaacatattatattttatgtgaaaccatacccgaacctagacccggatgggttaatgtggtgctaaagtattaatttttttttttaagaaaagaatctaaaaacaatttttaaaaatttgtaccaaacactattaaatttttaaaatgacaaaaaattgttatctattttcacttttaaaaacacaatttgaaaaattgaaaactgaaagcacaaccaaacaagttctagtatttttgagagagaaacttcacgaatctcatatctttatgaatgggttattgaagagtttagtgaaaatttgatctttaacaaaatcaactcaaatctaattttggagactttttttagaataagaaaaggaaaatatatttctatccatacaagatataaattttttagtttggagttgtcacttcaagtttgtttgaaaattaaattgaaaaatcattggtaccaaatttaacttgtccccttgaagaaaaaaaaataacttgtagatatgtatagtgaatgtatccaatttaaatcgctaagggattgggagagatggtttgaagctttatcatcacctaaaatttaatattgatctcttccaaaccattgatcatcaacactaaacactcttgcaaaattaagagattgtttctttttttctttttatggaaggagcaagacccaatttcattcagcaaaattggagaaaaaaaaaatttcgttagaacgaagcaagttcactgtaatgaccgctttagtaatttggattagtaaaggca

SEQ ID NO: 301252 - DNA, 3922 bp, Cannabis indica
tactattttaaaaatacatgatctattttatcatttaacaaaatagaaggtttaattaataacttttacaaaatgcaaggtccaaaataatatttgtcctttataaaattgattaattttttttactatttaaatgtacataaaaatttcgtaagatgcaaataaaacatctttaaaaacttttgactaattagatttttttataccaaatcataacctttaaacttttgagattgtaaattttttcttaaattattgaaatttataaatttaaaaagtcttacaatgatgaatttcaaggggctcaaatttgtacatctcagagtttggaagtacaatttagtagatatcatagttcgggatacagttagtacatgtaattagatagaaattttttaattacacaatctcaaaagtttacgtagaatttttaacaacttgaaaaaaatgaaaattataatttagtacatttaaaatttaagagaaaaattattctatatttttaaaaattttacaatgtcttaaataattatagtatacacgactataaaaaaaatgaccttaaaaattaaaattaaatagtgatgtattagtattggtgcacctattttaagagggtacattgtaaaggtaacctattatatagaaggagcattcctattgaacaccagtagtaccaatcacattctataggtgagactctacgattgattaacgatattttttaaaagcaattttcttaaattatatggaaattgatccttaattataccaataacactataacatcgaaaagaattttaacactactaataatgtgttttaacaattatgaaaaatactaaaatgcacagtaacatttagcatcctactacaaattaatatctatattaatatatggaagaattatgttttatataatttgatataataattttttaaaaaaattgcaaactacatgtaaaaaaatatcagttatacccaataattatctaaagcaattctatatagagagagagagtgtttgtttgtgtaaatgagtgcaggtaagtatgacgcgtgtccgttagccagctgtatcccaaacataagataataaccgcttcactggaaaaggcagtttctcaatccccacaacgctcttcccatttcccaacgattcataacctgctttaccggtcacccttttcacattctctctcttattttctctcttaactatttataacaaccaaatcccccacctctctctaataaccctttcccccaaatcccattttctttatttcttctccattttcaaaatcacccaaattcaaatccccattttcaaaaacaccacaatcaataactcaaaactcaaaaatggccacgattaccagaaaagaaatggatcggatcaaaggtccatggagtcccgaagaagacgattctctacagaaactggtggagaaacacggtcccagaaactggtctctgataagcaaatcgatccctggtcggtccggtaagtcttgtcgattaagatggtgtaatcagctgagtccacaggtggaacacagagctttcaccgctgaagaagacgatactataatcagagcccacgctcgattcggtaacaaatgggctaccatagctagactcctcaatggaagaacagataacgctataaaaaatcactggaactcgactctgaaacgaaagtgttctacaatgttggaagagaccgacaatggtcatggccacgtcagcggtggtggtggaggaggaggaagagcaggagggtacgattgtaattatccacagcctttgaagagatcggttagtgccgggtcgggtattccggtttcaaccgggctttatatgaaccacccgggtagtccttctggatcagatgtgagcgattccagcgtacctacggtgggttgtactactctttcaccttcgcacgtgtttagacccgtgccgagaacaggtggcgttttggtcgaaacggcgtcgtcttctaacaacaacaacaacaacaacaatgatcctccaacttcgttgtctctttctcttccgggggttgttggattcgattcttgttctgaggttatgaacttgttgccggcaccggtgttggcgccggcgccggtgacggtggttggtggtggtggtggtggtgaaggtgagagtaatggggtttttgtaccgtttagtaaggaattattggtggttatgcaggagatgattaagaaggaagtgaagaattatatgtctggattggttgaacagaatggaggatgtgttccgccgccgccgtcatcgaccgccgtcgatgggtttaggaacgttgcagtgaagagaattggggttagcaagatcgagtagtagtttagggaagggggttggttagtagtggctgtttggataccgagaaaatggaaaagaaaatcatgaaaggagaaatctttggttggattttgaacagagttagttgtttagtagtataagggagaagagacaaattgcctgtttttttttttttaatttaatatttaggaaataattttggttaatgtacagagaaatggaaaagaaaaaaaaaagaaaatgagagaaagtgaaaaagaaaatgagagaaagatatggtgagttgagttaaagctcgaaattggagtttgagtaatggaaaagtaaagttcaaagaaaagggtataagaaaaagatgaactttgatgaagtttgatgatgagagaaagtgaaatttgagagttttttaggtttaaaaactccattaacttttgtttaatctatatctatctaatgatgatggatatggcctttgtttatttttttcatactgttttttattttttatattttttccagaagaactaaacttaaagaaaatcaaaaacactaatatgaaatttaaatccaacttttttttttctttttgacaataatgttttttttagctcaattctctaatttgatgataaaaatgttaaatgatttttgttttgatgataaacaaactaaagtctcaaatgcttttttctagttttgttttggctttaatacaactggcatctgatttttggtaaaaagttaaataagttatatatacaaacaaaaaaaactataaaatgacatgacccactttgattaaatggtcaaaatttaatttttgattctggtaggataagcattgaaatataccaaataataattgaaaatggagaatttcttgttataattggaaaagttgagaacgttatgtaactaactatcaacatgatttttcttaaaaactattattgttattattatttttgttcgtgattgtttgttgaaaagttgtaagtaaaaacattaaaacggttaaggtccccaactaagaggtagttgaagatataagatatggtgcagttgggggattaattttaaaccatgcaagttttgcttcaaatattttcttgttggaaaattattaatttataacagtttttctaactaacaacctttttttattgcaaaatgttaaaaggcagggtacccattgctcgtacactaagaaatgttaaagggtatatctgaatatggtatttcaattttactttaataaatattataaaaagtactagctaattatataagggtagcaaaacgggtttcaacatgacacataaacacgaattttataggttacgattgaaaaaattagacgcgggtcgaaaacgggtcgacacaatttaacacgaaataaaaacatgtcaaacacgatacgactcgcttaacacgaatttgacacggtttccttaaatataatataaaataataataataataatataattttataaaaatatatatttagtgattcgatgttaagttaaaaaattttaaattattttttttaacataaaattgaaaa

SEQ ID NO: 301253 - DNA, 6787 bp, Cannabis indica
gggcataaaacccaacacgcccctatttgaaagtgcttactttaacgtctttagctaagcgctcacttctttttatagctcagctaggttcaagtccactatgcacatccttataatgtcataagaagaagctagctttgtaccggtggaaacttcgaaattatctccaatatcatcaaagctttcaagtttttcataaaacaacgacttcatatcaacgtggaatagaatagggtcattttttggtcttcttctttctactttttaatcttagaccatcatccatcacatcaactctacaacaagtgtgaataattgctgcaaaaacattaaatgttacctcttcattttgcactcgcaacttcaattcttccttttatacatcaatcagcactttccatgtggctaagaatggcctccctaatataattgagatatttgcatcttcttccatgtcaagaataataaaatcagtagaaaagatgaatttaccaacctttaccaagacatcctcaatcactcccctaggatacttaacagaacgatctaccattcgtaaggagatagttgtagggtgagcttctcctaattttagctttcgaaaaactgatagaggcattaaattcacattagcccccaaatcacacaaggcttttgtttcaactgagcctcctatagagcatggaatattaaaactacctagatccttgaactttaggggtagtttcttttgcaagatagcactgcattcctcagtaagtgttatagtctcatagtcctccagtctccttttctttgataaaatttccttcataagcttcacataacttggcatctgttcaagtgcctcggtatgaaacgggatgaggtggcgactgaggttactgtgacagctgctaatgttgaagaagatcccgctggaaatgctaaggatttgaatcatggcacaggggactcatctattgatagagaaactttaattggccttgatcggagagtggtccaaggtggagataattcctttaaaattcaatacaataattatgtagctgagcattttatccctgatgttaatattgctcatgtggcaactttttaagagtcgtcttggtgataaggatgtggatgtttcctaggctaaggaaaaagttttaacaaaaaaggaaaaaggagctcatacaatttaggttggtatggcttattagtgttcaccctaaactgatttttagtcacaaatcttctggtcctctccctaattcaagccagaagaggaagaaattgaatgagacaaaggatgttggacaaaaccttcatgtggattctagtattcaaggaacttcacctaatcaaggctttgtgcctagaacgtgctttggtgaggaaagtttttgcaagaaacgctaacttgtgcctagaacgtgctttggtgaggaaagttttgcaagaaatgctaacttgtgcctagaacgtgctttggtgaggaaatttttgcaagaaatgctaacttggtgtattctgataaaggaaagaatagtggtaaacacatttgtcatgcctcctaggtggttactagtggtgttcctgatgctacctttaatccacagagagattgtcaagggcaggggctctctcattttaaaatggatggggatgtttctcaaaagtcggagactagaccagaggatttggagggaggtaattgggagctttctaatttgtcttatgcaaggtccccattggagtcacatgggctctcttaagaagcaggaatttttcgtggccaaggaggcaggccttatcatgccccccaaatcattatgaaaattcttacgtggaattaccgtggacatggaagttcgctggcaaaagaggctttccggacccttgtctctaaagaagatttgaatgccctctttcttatggaaactaagctagacggaagatggatcgatggagaatatagctgtggagattgcaaggattaattctccttgggttttgatgggagatctcaatatggttctaaagcttggaggtaatctggtggaagagactgattgttgtaaaggtttgtctaattttctcagtatctctagtggagtggaattggggtgcattggaaatcattttagggataagttgaaaaatacctcttttttgtatccattaatcaaaaataccctcatattatattttattaaaatatacccacttttgtgtgtgggttgcccaatatacccttatcctccacttaaatctagtatataattttcattaacttaaggggtataatagaaatatcatttataaaagtgagtatatttcaaaaaaatataaaaataaatgtaaaaattaaaacatataaagtaaagtgagtatacaatgtaatttccctatcattttacctagtccaacggccgacaattttttgatcacatcagggagcgtcttgatcgtgtggttggagatcgaatagaactccccctaatataattggatttccacatacagccctattcggcagtggcccaatgaggagagctattttgaactacacttcatacaatacagcagcaacaggtcaaaaatataaatgtatgacagcataaatctcaccaatatttatatgttagccactcttcttaatattgtacaataatggattataatattaaatagtacttagttgttgatgatggtgataacgatgacgattattaataacattggagaaagaaatgatcgcaatagcaataagcaaaatgacaagagaaaagacattgattgaacaagaatcccactacaaaatattattatacaaacatctcccaacacataagacaaaaacatctatctctttttcagaaaaattaaaaggaaaaaaaaaatcaagacttcgacataatacagaccacagattttgaaggtgggggagatctgcagtgatgatggcctgccattgccaaagtatattgtctactcaatgacacgtcacgctgggagaaaattagagaagttgggaagaacaaaacgagcatcaaaagagaaaacctgtacagccaacacaacccaactcattccccatgttatattattacttttctctctcttaaaagataccaaaatcccttattacagctatggaaattgaacccccacaacagtttcccatgtgcacacacccaaccacacagcctggactagtggactctttaattttagctcgttcatcttgcccggaccccattccctttttcttttttgacatgttttagcatgcaacttttgacatgtctttgctggatctattgtacttcatgtgactcttgacaagctgcccagctgctatagcagacatcaaagagagctcacctgctaacacagaaccggctacaatggtggccagtagcctagagtttgctcctggggaatctttgtttgaacctttcacaccaagcaagttcaggcatgcagattgagaagcaagttgagtcccacctcctactgtacccacctgaagataaaatatatacgaattaatgttagtgcatatctttaataattgattgtgtgttggaatggaaccactggctttacctcaattgaaggcattgtcacagagacatgaagatccttgccattgttgatagcttccatcatggttatgcaatgcgaactctctatgttttgtgctggatcttggccagtggctatgaatattgcagatactatgttgctggcgtgggcattgaatccaccgagagcaccggcaatggcagagccagcaaggttcttgagcatgttaagctctacaagagcatcaatgtttgtttttaaaaccttcttcaccacctcttcgttgatcactgcctcacaaacaactgatttgccgcgcccttcgatccagtttacagcagcaggtttcttgtccgaacaaaagtttcctgtggtgtatagtaggaaaacatgaaacagtactagagaatgacataggaagctgtcaattaacgcttaaaaaaaattaaaggacagagtttggtaataagatagtaatagaaaatgacctggatatggacttggtccttacatgtattaacatttattgacaaaaaaatagcaggtcaatgacattcaaaatcctaattccaaacatttctatattggggatggggataacattatcagcgatgaccacttgacaagtatacctgtacgaattattacactatacgtaaatagtacatgaaaactcgaccactgaaacttccaataggaacaaaagggaaactcaacaaaaattgcagtcgataatgccttcttcaccaacagaaaattttataactgtacataacttgaaaaaaagaacatcacccagaccagcagcaataataactcggggttgagataagggaaaatggctaattagtctaaagatataataatcctaaggaaaaaagactaaccagatatgccaataacatccatgtcatgaaagtcggtttgaaggaaatcaagaacattctgaactccttttgaaaccatgttcatccccatggcgtcacccgtgctgcaagtaaatctgacatacacattctttccagcaatcgcgcactgaataccttggagcctggcaaatctactagacctggagacgataaccaaacccaataagacaaaagattcaaatctaactgtattattgaaagactttgatgaatctgacatcggaaagaaacttcacttgagttttctattctttctttgtttacttttttcaatactttctttattacaaaaatttctattaaattagaagcgagatccaatcgatgcccttgttaaagattcaatcgccgtaacatgtatataaatatatatatatatatatatatataaatagaccgacctgttaaagaccatggaaagagtgtcgaaattttcagggtcctccaagaagaacttcaactcggaagctctcttggcggaactaaacctcacaaccggtgctctggtcatgccatccctcaacaacacgctgctagccccaccaacaaatggattgccttgcagcctctgttagtactcgcaatcaaacaaccctccgtagtcgccatcggcaccgaatactcgaacccatcgagcatcaacggacccgcgatccccaccggaatctgaacgtacccaacaggcatttcgcagcactgccccaaaatagattcgtaatcaaacccttccaagggcaaaccctggagcgaccttcgcgtcgtcctctgaagcgcttcacgtctaatcgccgcggctcttttacagtctccgatcttggactcgagcgagtatgaaggcactttcccctgcactaccgaatttataatctcctcgtcttcttcggatgacaatgttgcaagaacctgacgatccaagttgggggttcgaacgatgggacaaggcggtgggcagccactgtcgtcgactagaaaatcaggtgtagcatcgtccaggtcccaagcctcatgggaggcgcgtgcaatgaacgattgaacaaagtcaataccaaaaaatccaagcaagtatataaatgatgcgatgagagagacaatggcggcaatttccgagagcgtaacgacatgaagaggcgtagagtttcggatcttgtcacgccaccggtggaggagataataggcgacggagaagaaaagcgtgaagaagacagcgttggtcaagtacagaggaagagggagagcgtcggaagctttaggagagcggtgaatctggtcttcatcggttaccggagaagcctgtttccggtgaaggacttctccagaggacgtaagaagaggcttcgaaggccgccggcggctgtccatggcggagcaccggcggaagaaggagatgtttgttaggtgagatcagaaggggttttgggttgttagatgggagcgaagatttaggagagtaattaagggggtaatataatggaatggaggaaggaagaagagaagagcactcctattaggcatcatagtcccaacacgatctgaatgtgtactttcgttacttaccaattttttatattatttattaaattaaattatacaatatttgatgtcaatttgtctcaataataatatgtcatttctaagcacgtatttttttaatatttggagtaatttacgaataaaaatatttaaattttactcctaattttaaataaataactaagtttaatttttagaagtaataatactcaaattatatttttttatatttttggaaacctgtaggtacataaccgttaaagattaaatcattatccatgtgttatttttttattagtatatttaaattaatatttaaaaaaaaattaatgacttaaactaatcaaaaaatttcacgtattaatttacttaacacttaacagttaggtaactacaaaagttctagaattataacttagatatcatcaccgctcataataaaacttaagtatttatttgcaactgcgagttaaacttagatatttatgccgcaaattactttaatatttttgaagagagttatactattagagtatttttagaattaagaatgtgtggaaaaaaataaaataaaatattatatttttagatgatatgaagatttttaatacctttaaattataagagatattcttagaagtaaaagtatcaaaaataatataaaagattttattattaaataatgtaatagagaaataaaataatgttggaatttattttaccaggatcttagatctactcacaagtatgtt

SEQ ID NO: 301254 - DNA, 2666 bp, Cannabis indica
aaaaagattagaataaattaaggccacatatccaaaggtgaggtataaaaccaaccaagttatgatgagagcatttagtggtaggtggccactactctctagaactattatatacttgttatgatctaaaccaaacctcatgatcaatgacaaatattattgggtctggggcctgtgattctgttaggttatgaatgattcaaacaggtcatgggccaaatattgctacactaaatgggtcctttcctaaccataattctggtcagagccaccttgttgggacagacccgatccgacccacttaaccaagcctttattcatgcttactgtttcttctcagtgaaatattttatgggttttaattagtgctattagttcctttcaataaataaataattagtgctattagtatagttgccaatccttaaaactctcatctatattatgtgttaaaatttacgatcaaggttgtgggagttttacaagattttctaacatccactcaaaatgataattattttttgaaaataaaagtgattaaagtctgattaaattgcatagattttatctcaaaactaattgataataggaggatagcattttattgtcacacatcaataataattaataactaactctaataaatactatgttagaatttaaaatatatctcaaaatctcaaaaccaagtaactgtgcattttatatatcacattatgttttcataaattatgaatatgagactctttgagttgttgcactttactttcaattttctatgactcatttttaattttaaatataatacttttaaactaaccgatcaggaaaaaacgaagagtaattacatttgaaaatacaattttttaactaataggttctattttctgacagtcacattcattagcaatcacattagagttcactaataaaccaaatacaccactttgaatagtgatcataatcaattaatcatagtttactaagctataagattattttaactagataagttgatcatcagtaaaaactaaatgtatggctaggaagatttatattcattggctaaatactaatggaagaactgcactttttgtgctaatatcatatgcaagaaaattggcttatttatttatatagatcatcatagaataataaatttatgttattaatatttaaagttctgatgtatataattttcttaaaaggtcctttgaactctgctcgttcacaacttgatcttttggagcaactttcctctactactagcccatcaggtaaacttttaccagtttggatcttttattttgttaaataattcgaaatagtacatcaaacaaattttgtcaaaatatttttcaaaatgaccaaaataccctaacgatgaacaggttacgagagtgatggtaagactgggaagctaagcatccgcgatcaacttgtcgaacttgttcgggacagagatggtgatttcagcataccattgggtaagaatttgaagaaagtgagtgcaaagttcttaaccatttcacagaagagaaatatcaaaagacaaacttacatgaatgaagtttctcaaaggaatgactctgttttctttgccacaattggtgcctttgtaatccttccccctattataatattgggtattgctattgcaactggttatgtgcagctttttccttaattgtcaaaattttacatttaatatgtatataaggataagaattattaggttgttaatggttgttgttacattagtctaaaagtatcttaagtattttcaattcaatcatttaaggttagagaatattacataatcataaattttagaatcattatcttttttgactaatatttatttagagaaaatcttaaaaatgtcaaagattatatggttgagccttgaatatatttcaagaaatttaggggattgctatgattaccaaaattgaatttgaaaaaaatttgcactgcattgttaattattatctctcattacaaattttaactaataaaggttcaaaattttcattacacaatccaatatacaaacttcaaacacccccaacactggattgtaaaaaccaatgtgtcccacatgagaatattaataaacaaagaaagaaaaaaaaagaaacaagaaatggatttttggttagtaaatatataattaattaatatactttactatatactatactatattattaattctcaacaagactcaattctttttgtttttcttttggaggagcctcagccattggatttgtagtagtagtagtgcccaagattattccttgtttttgtatataactccatttgtcttgaaagaggtaaaaaaggcatatgaaacataattcaatagtgaaaagtgaggtccaaatccatactttttttgatgttttctcatgaaaggcttgtaaacctgaataaatgctaaacactcccaataatgacactgtagttccaagaatccaatgtgcaaaaaaccaaacactccttcccttagctcccctgtagagaaaaaaacccaacaattgtaaataatgtttcaaattaatagggaaatattgatttggccattctgagcactaaactgatttcaggtcgttaaaaattctccttgaattattgagattgttggatttaagaattttcgt

SEQ ID NO: 301255 - DNA, 1217 bp, Cannabis indica
aaataaaataatagtttcttttaggttggggaaggtatatttttaagctagcttaaaattgaccaagcttcctaaaatcgaagtagaaccggacttttctctttatcccattttttttttcacttttcttttttccttttcctatttaacactttttttaatttaattcaaaatttcaaattttactttgtaaccacctcataccttttccttttcttcttggatcaggaagcattttagtttatatttatttgttatcactttaccatgccataagaaaaattattacatcagtacattattattgacattggtcagtgaaaaaagaaaggttgaatttattattaggttattatcatagacacatcagaaacagaatatatgtcgaataataatatatgccaaaaaaaaggtaatcaccctacatcataattatgatcaggtgctttcaaacttattaggatgattttattgataattaataatttcttagatagagtaacatgaactttcaatttgattcaccaacatatattattaatgtactataaatatattatattttcttatatataaattaatatggttatatatgtgaacatatggaatccctttcatgattataaagttattatgtctttatggtctaaagatagatgcttgtctttgtatctacttgatcttctttaagctcttttatcatattggctacttctcttttaaagaaggaaatgttaaatttaattaaaacaaacgaatcaaacagaaagtgtcaaatatatctacttcattccagttcataaaagtaattatgctatatatagcttctcattgtttttttctttctacaatatataactttatcattttaattttttctttatttttaacaagaaagttataaagttgcatttcctttgcatagttcttacgttttgaatcgtacttaatgcaactttcttttttatttatacgatatatacattttatttatgagacttcctacgaaaaaattaattaatgacttatgttatatatagagtaacaacatactttgccatgagtggtatacgagtgtagactagtgaatcaagatgtccggtgttccatacattgttaaactaattaaaatttgacacgtcaattaattttttatttataaaaaattaaaatctctaatatagtcaacaaaagtaattaatatatttaatataaat

SEQ ID NO: 301256 - DNA, 2189 bp, Cannabis indica
ttcatctcaaaaccctaaagcaacaataaaaatttaatcacttgacataacacaaaacagtaaaacacacatatatatacatgtaaattaagaagaaaaatggagaagagcccagataattagcctgaacaaacatattaattaattacataccctttcccctagattttacggaagatgtcttataacgtatccctgaaaagagtatataaaaatatatgtatagggagtttatttaatttagggttcatgataagattagggttttttcatgccaccagaaacaggtgaaactgccacatgatctgatcttccttcatcaaggaggaaagttaagatcatgctggcagcttcaactattattgaaagcactagatatcatcaattttaaccaaaaaaaaactatatatatatgtatattttatctagggttatagttttcggagagagatatgggagaagaaaggatgaaatagggggtatatatagaggctctgaagtaataaaagaaattatattaaataatgagtagaactaaataacagctaattaaaaggtaaattagtattaacaataatttaaatccatttgtttccccttattgtagaggaaagaaagatgaaagaaaaaacgtaagaattaattaattaagtagcagttgtggtccccaaaagtgatgcaaattgaatattgtcacgccaaaggagacttagctaggcagtctctctctctctcatctcatgcagttttgacagagagattattgtaagttacatatatttacaaagaaagcattaatagctttttaactatatagatatataggttgggacaatgggacctcagactgaaatatattgagagggacaagctagtggtgggggacctttaatatatatatgtttgtgtatatatctatcatgatctctatctcaatctctagctatgaacaaaaggaaaaaccatttttatcagctaatttatttattaactatgggggaccattttgcatggtcttaattttgaaacgttttcatgaacagaaagcggaaaaaggtatccaataattaaactcaactaaaaaaatattaattactaaaattttctaatattatgtatacatagttctatatatatttacatccatcgcatcgatgtaattcatggtattttttttaataaagcatctttatttatttttgtccatataattgatcacatatggacatatatagtggccgtttctgggaaaattttccatttggccggtgaatttcttattgtttaccctttcatccgataaattaatgccagctgcatcatacatatatactcgttataaacatatgatattgacaagtgggaaatgacttgttagatattgatgaagttattaaaagcttttaatttggttaattagtatagtctccatattgattgtttatatatatatatatatgctgtataagacctggaatattatgtatgtatatatgtgtgtaatatatacaagctgctatctgggtacaaagcccttgtatactatggttatttgtgaactttataattaatataataaaactagcttatctttatgtaaattattattattttagccgtgctattattttaatttattcatcatacctcaaacaatatttaccttgaccttttttttctggaaagaaatatttacctttataattacttttgtaaataaataaaaacttatttgtgtgatccagcgggccagtatgagtgaattaataatatttcaagatccctagctacagcgcaaaatgtatagatttatatatagagtctagctgtttagtctagggttttatgtcctttattccatgtttataggttacgaatcctaggtataatgtgctaaactatatttgtttttgatatcaaaagaaccctaaatttttgagtgcctctcaaagcttataaagagatactttcattaaatagataccatttctctatacctatatttaaaaggcaattatattattgggtgtcattattgtccttggagtgttgtttattttgtatatgacaatctacagtttctaatgtgaaatttcattttctttcttaaaaatacatccatactaatttatacaaaataattcttttttttttacatattctctccttatttattttttttttaaaaa

SEQ ID NO: 301257 - DNA, 2481 bp, Cannabis indica
aattgccatgtgataatttacttaatatttaacaactaggtacctacaaaattccaaaaatataacttaagtattattgccgctaaaaattaaacttaagtatttatttgcaactgggagttaaacttaagtatttatgtcgcaaattaccctattttaaatttaaatcataaatacatataaaactgatattttaaaaagaacatctaatccttcatgtattactaactatactaacaaagagattcacactgttacaagatagtagcatatctactaaaacaaaattctcaagtacaaaaggcacaaacattaacactattccaaatccactacaaatgttgacttaataaatccaaaatcccttaaatcaccatctctcctgcaaccaaacataaaaataaacgtgaagatccaatcaatagggagaattagtagacatattggtgtttcgatttaaatgcaaccaaacaaaagaaataagacaaacgccaccttaatttccatggcaatcgtattagattaacaaccatattgaagcttaccgaatcactgttgttgctgttgattttgctgattttgagggtttggaggaggaggcattcccgggcggggcggtccaaacacaggaacgccaccaccaggaggaggcggcatcccaggacgaggaggcggtgcctgcattccgggcctgggtggagcaggtggtcctctcatcatctgaccaggaggaggaggtcccatgggccgttgcccaaactgaggtggtgggcctggaaactgcggtggcccaccaggcctaccaccaaactgtggcggcccacctgggggagggccacgtgccattggaggcggaccctgaccgggatagccaggcatctgaccaggcggccgaataacaggagcaggatacgacattggcggagcagcaaggttcgggacaggaggacgagatatctgtggctgcatcatgcctggagcagggccaccaacgccacgcactggaccagaaagtccaggctgggcttgagcaaggggtgcagtgggtacaccacggcctgcagcacgaccaattccaggcccagccaatgctgcagcattagcagctttagctcgggactcttcctgcggaggtgggccttctacagtcatggaaatgacctcttccccacggaggagaaccaaacctagggtgcggcgatcttcgcgttcctcgttggtcttctttcccttggccggaggaagcttgcgaaactcctcacagtcaccgaggacaaggttcatgtggcggtcgaaagccatgaacttgccaacaagctggcgaccatcctggatgctcaccctcatgcggtagttgatgtactggagcatcttagagctcttagacatcgacattgttgccgagtctgagtgagaatcaacaacgttttcgaaatcctgagaattgaactgagagtggacattaacattataacatttcaaactaaaattataaataaaacccattcacaaaaaccttacagcatattaccataaaaatccaataaagaaatttcatagatagaaacattatttcaacaactatactcactactcaaagaaacaaaatcagattatcatatccagcacttagtagaaactaacaacaattgttcacaaattctctaaacaggttattagttggtagctattcaatcaagtattgtcaattttggttgaaaacttcactaaacaggttattaataggtaaccattcaatgaagtattgttccacttacttgtttctataacacaaacacaataaccacaaaatgtgattcatatgagagaagcagaatttttgtaatcacattaaaccaaaatcataaaattatgaatgtttcttaggtttgaaatggaaaaaaattgagaacaaaatctccgaaccaaccagattagaacaaaatctcgtatatatacgaatcttagaactaaggatgccattgccaatgatgaattatattctaaatattgagaaaagtcgaacaaaccaacaaagtttcgatagtacatgcaacaatactgagaattctataaggatatcacagaaatctaagaggtgaaaatatgaattaccttggcgatggagagtggagaagagagagagaagagagagagaggttctctggtgtgagaagtaggttttcagtcttctgccactgccagtgatgaaaccctaattcagttgggcccatatattgggcttatcatattagacagatgatatttttgaaaattaattgggctgggcccttgagcgggactgataattacatagaacactattatgaaatgggaaattttatttacactccaaaactttttaaaggcacctcattttaataattttaatttaatataaaatttatatctttaattgtactaatttttttaatttttttattttaatttatatctaaaatatataaagtgtgcctatat

SEQ ID NO: 301258 - DNA, 1959 bp, Cannabis indica
tggtatagttctatgacctgaaaaatcataacttagatcaactcgaaatgtgatacactattcatctaatccaatacttgaaagaaaaagaaaataggtattttattgatatcaaagagaaattacagagttccaaacttttcgagatatctctctgagtaatttttactcaacaaagcaatccctcacctcttacaattgatcagctctctctttatactaagtctcccttaactgttttaacaccactatactacagctcacttaaatcctaatcagtaattacactaatattaaagtgtaacaaaatagaataaacaattaatgtgattcttgttccttttaagaaaaaggtgattaatgattagtttacctgacgaatagtgaagaagttgccaagggatttggacattttctccgagtcaatagtgacaaatccgttatgtatccagtaacttatattactttgtctgcatgcagcacagctctgagcaatttcattttcatggtgaggaaacacaaggtccattcctccaccgtgtatgtcaaacgagtaacccaggtatgcagcactcatggcactgcattcaatatgccaaccaggtcttccaggcccccaaggactctcccagaagggttctccttccttagcagactgcaagacatttgtgataacatttttttgaatttccacattagaaaagttattccactagtttgtacattgtaattatagtatagaaattcaaagattatttacttggattaccaatgaaatttacaatatgtatttatgcctacacttcaggtatttaccttccataatgcaaaatcagccggatttttcttccttgagtcaacagctacccgctcaccagctcggttatcttccaacttccgaccagataggcgtccatattctggaaacttgtctacgttgaagtagacatcaccctcaactgagtatgcatactcattatcaataatctgtgaataaagcaatgacaaataaattacaatcaaggccaaaatgatagaactctaaaccaaacttgaaatcattttctttctgcaaaaatggtacacaacaagacaatgcagctgataaaaaaatatcaattgcaaaagcacagtgacaaagcaaaaacaaactttatgtgatagatcatttaaagaatatgcaagatgcaagtggtaggaaggaacttcccagttattattgagcattagaaagaagaaaactacctgtttaatcatatctacaatctgggtcatgtgatccgacactcgtggttccacggaaggcggcaggcaatgaagatagaccatatcttgattgaactcttcacagtagcgtctactcaaattgattggatcctcccccaactcctttgctctagcaattatctacagaatttgacaaattttgcagactcagctatgctatcctgtcataccatatggaaactaattggtatttgacatggtatacagcccaaccttccgcaacacattgtacttttacagagctaagaacccaaatttacataattgacaacaaacccaacaaaaggctacttactttgtcatccacatcagtgaaattacgaacgtaacatacttggtatcccaaatgcttcaaatatctgcctaattccaaacaaagataacacaaatagcattctaattaatatctaaaagatacaaaagttgtcatgaaaaagatgaaagagaaggacctgtagagaacatcaaaagtgacatagacgcgagcatggccaatgtggctgagatcataagcagtgactccacagacatacatccctaccattccttccactttgggcctgaaaacctccttttttctgctcattgtgttgtacaaccataggtttgttgacaatggattctttgatgcaccttcttcggattcaccttgagttttcttagcaatcaatg

SEQ ID NO: 301259 - DNA, 3710 bp, Cannabis indica
ctgaagattagaattgtttggggctgcttagtttaagtgctttgattgtatatatacattcttgtaaaggtatgaactcctttttcttacgctgctaactcaggcactgttacctctatttgcagataaacaacgtgggaacaaatataaggaaaccgatggtggagttcacggctgaagagttttccactctcatggcaacaaatttcgaatcagttttccatttgtgccagcttgctcatccactacttaaagcatctgggaagggaagtgttgtgttcatgtcttccgtgtctggatttgtgtcattgaagtccatgtccgttcagggatcaaccaaaggtgctaacttgtttgattgaagtgttctttcatgtttacatgtgctgtcaacttgaatagttcataactaagctgcaatctttctgttcattttttcattcttaggggcaatcaatcagcttaccaaaaatttggcttgtgagtgggcaaaagacaacataagaatcaactctgtagcaccttggtatatcgaaacatcaatggtgaagcaggtatttttattcactctgctaatgtgatttttatttctgaactaaaggtgtttagagtcgatgatttggttattttgttgcttgctacaatgcttagcgctaacctgttaaagattttgcttcatatgaaaagtaaagcttctcttaccgcatctttaaacacctttaccttattgaactccaactgttcagaattctagagacagaattagttgatacccagaaagagctgaattgtttctaatcaaacaacacagtgccaacatataagttttactatctcatctgcccaatatcttagagcagcagactcagtttctttcaattgttacattttaaaacattgcaagttcttagttaggaatcttccaaaaaatttctttggttactcttgactttgcaatttcataggtactcaacaacaaagaatacttagaagaagtgtatgcaagaactcctcttagacgacttggaaatccagaagaggtgtcctctgtggtggcattcctttgcttacctgcatcttcctacattactgggcaagttatttgtgtcgatgggggaatgtccatcaacgggttttaccctacccatgactagaagtcctgaaattacaggcctttctgtgctcaatctttgtgtgctttctccctccctgaaaatccagtaggcaacaaacgtagttaagagttcaatgatggaagatattaggtatgaatctgagagataattattctttttgcttagagggacatttgttggcttttgaatagtcaattcaggtagtggaataataatactaagttgtttatggaaagtaaaagaattccaatttttgcagagcaaaaggaaaaaaaaaaagaaatcttttgattcaaagatcacttctgtaaattctataattagtccgagcacttggctaatcctttataatatgttaatagcttttcccaagctctgataaaagccatttttttttagtgtcgattataaaatggtgaaacatttagggcttgattggtttgagatttaaaaattgtatttttttaaaagagtgttttggaaataaaaatttgaattttgtatgcgaaaaattgtttctaaaattgtgatttattgtagtgtaattttgtgtttttgagttataaaaagttagatttgtgattggttgggaatctcaaaataaaaaagagagtttgaagagtttttagattcaatgatttgaaaacatagaaaacataaaattattgttttcattttaagcttaaaattcaaaatcatattcagatttagcttttgtaaataccaaaccaatcaagtattcttatgtagactcttactttttaagtgtttaaaaacataaaactgttttcaaatctcaaactaaggttgaagagtatgcacattagaattaggtttgaggagtggcaatgaacacacgtattattttcattggttgtatgcatgcaaattttctggatgaatttaaaagtgggaactttagaattttcattttaatctattttttagagtaataaaatcaacctaactttagcaaaataaatatcaacatttttggatagacttttcttgacccaccatttctcttaagacaaacatagaagtatcaacacctgagatttcgtattcaacctcttaagctttactacaacttgatcgttatttttgtttaaaatatcctagaacaggaattaggaatttagtagccaaaaacttgttggaaagagtggctacttatgcaggtacttaatatagcaatgaacaaagatggtgtctccatggaatgacttctcttgtaactggcagaacctaaagaattgggtacaagccttttcttcttcttattacttcattaatgtttcaatctgataatcttaggcctaatttgtcaaaagttcttttttggtttgtttgaatgttttgtaaaacttgtttagttttctttaactgtttaggtatgctatcattgaagaattagcaggacttgaggaaaactgtgtatactgtcaaggaaatggcacaaatagagtgcagcacatttctatacatttcctagtagtcccaaccatttagacaactcatgatttgggtaatgattgcattacaattttttgttaggaaaagatttcttttgctgatgtattgttttgttgccattgtatctagaatattcgtgtaaattagcaactacctatacaacgaaaaggcctcacctcagccaaattgagctgcgcaaaatattctctctctctttttttttctttttttaagttggtatcaaagcctttctttgacgcttgtcaactatggcggctctaagagacaagacaccagaggcctctgttgaaggtgacaatggtaccccaaaagtgacagcatctgcagtgcagcaaatggcttcgaatattgctgcaggaggtagctaagctcagacttagcactcaaacatggttgtgcccaattttggaagcatattgaaccatctctttgcattaaaactggattgcaacaacttcacactatggaaaaccatggtgtctgcaatagtgcgtgtacacaaactaaatggctatattaaaggtactctccttaggccacaagaatttctctatactaatgttgtgtccacaagtgaaatcaaccctacttttgagcagtggcttgtgaacgattagttgctcctcggatggttgtatggctctatgatagaaggaatcgcctcagaagttatgagatgtgattcagcggcccccttgtggtctgcattagaagccttgcatggagcacactcaaaattcaaaatggatgaatatagaaccaagattcaaacaacaaggaaaggatctcttacaatgccagattatctttgacaaaaaagacaatagcagatgctcttgctcttgcaggagatccttacctcgaaaagcttcttgttggtaacattctgtctggcctagatattgaatatcttcccattgctctacttattgaagcaaggccatccaccacctggtaactacaaggccattggatgggaccaaagcctagtcttaagcactttcatgtttggggatgtccagctgtaatatccagattaaaatagtatttttttttctctccttgggatattaattg

SEQ ID NO: 301260 - DNA, 4937 bp, Cannabis indica
gagatattttttgattatttttttaattaagttgttaaattaagcatagaaattcaaatttgtgatttcatcattcgttattagatcaaaattcgatagtttaatatttttaaaattaatatttattattaaatttgtttagtaaccatttatgggtaatacctattaagaagtgttccgtacatgattatacatgatcgcctcctttcatttatttctatttttttttctactctaaagattcttcatttcgtctcatgcaatttttcggagttcacccaaatgatgtgcacgcacttgagttaaggcaatcaaacacagagctcaaaatttttatataatataattttttgtaaaattttgttaaaaatatctaataatactcacactttagatatatataatacacaaaaaaaaaaaaattctttggcctattattactcaagttcaggtctgtgcgcacagtgcacggtacatagttcgatattataaactcattagtttcatcctattaactcgactaatctccaaaaaatctttaaaataaaaaattgataatgactctctaatttttttttttttttgttttatttaacttatcatactagttttattatatacggtctctgcatataattttgaatgtaattttgtcagaaagatagaaccatgcatagttaagaatagttgttagatctttctctgccttgtcttagaattagagagttagttaaattaattgttttctgttttaactaatcttttgtaaaagttgttatgtcaacttctttggttagtttttctaactaactcttgtatattgtttgtaatctcttccaataaatgcaaatctctcatgtcagttgcgattgagcttgatttattttcttttctctttctatgaaattctttccttccaaacatcaacatggtatcatcgatggtgaacaattctgaaaatcctactcataatcacactccaactcatcgtcaaccacaagctccaccaaatgacaatcaaccactacaatttcagataccgaacaatttgcttctgctcaacattcatctcgatcgtcacaattatgcccactggagatcccttattctcccctcaatccgtgcccatggcctcgaaggtattcttcttggtatcacacctcgaccacttgtcatcaatcctgccactcaagttccaaatctagcctttgaatattggaatcgatgtgatgcttcaatcatgttgtggctcatgaattccctatccgaagccatgattaggcatgtccttcactgtcaatctgctgtcaactctagcatacattcgctactctgtttgctactcagtccaaagtcagggagcttcaactttgaccccaaatccaaaccaccaagaaaggttctccaagcgtggatgaatatatcttgaaaatgaaaaatatggctgaatccctctctgcatttggatatcgtctttcagatcaagaattagttatgtatattcttggtggtgctggacccaaatacaaaatagttgtggtgtttttaacagctcgtgttgatgctttgaccctgggtgaagttcagtatatgttacagaatcaagaaatgcgaattgaacataatcagtctttttctcttgatcttccccaagcaaattttgctcaagttcaaaacaggggatcgtccaatggtaggggtcagtcatcctcacaaggaaactatcatggtcgtggtcaaccttcaaatcaaggcaatacaaatggtccctttcgtggtgcttcaaatggacgtggtcgaggaacttgtcttgtgtgtcaaatctgtggcaagattgggcatcttgcttacaaatgttatcacagatacgaccttgaacctgcaaatcaaacttcaaatctaggttctaacaacaatcatcccaagctctgctgtctgattccactccctcaactgatgacaatggctggtacgtatatcaatagtagagccacacatcatatgacttcagacgcgcaacatctttcaacaactacttattacaaaggcaaagccaagatcacagttcgtaatggatccactatccctatctctaaaattggttccacttcaattccaacaaatgtttctaataattcttcagtcttaaaaggcattctttatgcgcccctgccattaacttaaaaatttgttaagcatttcaaaaatcacaacggataataacataatcttactttttaaatttgattcatgtcttattaagaacaagactacaagccaagtacttctttggggtactcttaaaggagggttgtataacctggatctctctaaggtcttgcctgtttcccctacttctgcaacttctcaccttcttggcgcactaggagctttcaattgcatcaagaacacacaaattgctaccaataactctcaactttttggcattagagagtgggtcacccctcatctagagtcctaaaaattgttgtaaatacgctttgtcctcaaataaaatgttcagacatttctttttgtgaagcctgttaaattggcaaacttttctgtaccaaagacaagttcaattttttagcttgttcatttagatgtatggggtccttcattctacaattcaatggaaggtttcaagtattatgttagttttattgataattactctaaatatacttggatttttcctatgacaattaaacatcaagtcaccactattttcagacaatttaatgtctatgttgagagatgttttcaaataaaaataaaagctcttcaaactgtctgggggtaaatatggacctttaaaacctttgttataggatcttggaattgagttcaagcacccttgccctcacacacatcaataacagggttgtgcataaaggaacacacatgcatgttgttaatgttggccttacgttgcttgcttaagctgaaatgcctttgagtttctggtgggaagcctttgtctcggccacctatgtcatcaacaggctaccaacacccatcttgcaacataatacaccttatgaggtactctttaatcaaaaactagactattttttttaaagtgtttggttgtgctttttatccccatataagacaatatcaaagtcacaaactttcgtttagaacaacacaatgcctctttttaggatatagcacaacacacaaaggctacaggtgtatgcatccttctggccgtatctatatagctagaacaatcaagtttgataaacacaaatttccctaccactctctctttaaacccctatcaccagtaacaactgtaacccaaacacacaacatatatacacaatacctgctccaatcactcaatcagaaaacaccgtcacaaattaacaagttccctcaaccattcctccatccccattaccaacacatgagcctgttatcaatccctctgaaccttccacaagtcaacctgaaccagcacccttagtcaatactagcccccaaattgctaacacataaactgatcatgaaccaccacccctcatcacccctattccagtttttagtttgcaaattcaccctcttatagatgcctcaaataatacacatcctatgataacaaggttaaagaatggtataatcaaaccaaaggccctcactgctgtctccaaggtttctcttgaacctacatccttcaaggatgtacttcaagatcctctatggtttgctgttatgcaaactgaaatttgtgctcttgtcaagaataaatcttgggttctagttccttatttcccagaaatgactatggtaactaataaatgggtgcatcgcatcaaatataactctaatggttcggttgatatataaaaatctcagcttgttgcaagaggttttcaacaaacacctaacttagactattttgaaacttacagtccagtggtaaagccatctacaattcaagtcattttctctcttgctgctagcaacatttgtccaatacaataaattgatattaacaatgcattcttgaatggggagcatcaagaatgtgtctatatgactcaacctctgggcttcaaaagcattgaattctccaaccatgtttgcaagctcaataaagctatacatggcctgaaataggcccctcgggcctggttcaacaagttaaaaacatatcttatttgatgggaattttacaactcaaaggctgatacctctctcgtcttcatcaagaaaaacaacaagctattacttctccttttttatgtcgatgacattctaataacaggagaagatattgaccaaattcacaacctcatagtcgatctcaacaaacagttttccttaaagaatctaagctctgtcagctacttcttaagcttcgaagtcacaagaaattccaataaaatttatcttactcaatccaagtatataagggatctagtcagctccaccaatatgatagaagccactcctactcccactcccatgattcaaggaaataagctctctttatcaagtagaacacctctgtgtgacctcattctacacaggagtgtgattggtgcattacaatatcttactatgtccagacctgacatctcttttgttgttatcaaactctctcagttcctaaaagctcatactttttcacattggttagtctgtaaaagaatactaaaatatttgtctagtacttgtgatctcggtcttcacttccagctttcaccaagtcttcaattagttgcctacttcgatgcggattgggcaaattttgtagatgataggaagtccacatcaggatattgtgtcttccttggtaaaaatctcatccattagtgttcatgcaaacaaacagtagtagcttgttcaagcacaaaatcttaataccgtgccattacgttagctacaatagagttgatctggttacaatccttgttcacata

SEQ ID NO: 301261 - DNA, 2799 bp, Cannabis indica
cctatttcttctttttttaattgttggtagttgattccagcgtgttaatggtggttgtgatgactctatgatccgattgatagaagtacaaatggtggatttgaggcattggaaaacagccctcccaatgattattaacaaagcaccaatccaagcgttcctttgatgattttgacatttttctgacacttgatccaagtgaaatgatctccttcataaggtgtttcaaaaagtcggcaaccatccaaagtgtttctaaaagcttccatatgggtttcattgcgaagagcacccctaaatttgtcatttatagagagtattttgttgaagtcaccaatgactgaccatggattaagagaagccacatcagcaactcttctaagtaaagtccaagaggttggtctactagccacatccgaagcaccataaaagcatgttaaatgaaaagaattactcccatcaaaagtcaaattacaatcaaaaaaggaggggccataattgagaagagcaatgtcaacatcatccttccataagatcataagaccaccactaagacctgatttaggagattctaaaccattattgtaatgcagtgagcgtcgtacacgagaaacagaattaacagagagtttggtttccatgagaaacaaaacttggggagattgttgttgaacaagcaatcaaagttgtctgaacgcacctgggttccccaagccccgtgcattacagctaaggattttcatgatgaattgcggggttgcccagcaaccaccgcacttgagtcatgggagaagctagaatcttcaaagtcagaaactagcgactcaacatcatcatcccttgacaaatgagaagatgaagagccttggacattgcgacacctttttagcattttcctcatggataaggactcactaggcctcttagatgtggaatttggtggctgattttctttgtccacaatcataatagcagtagtataagtgggagtggatggtatgggaaaattggtttaagtagaggccatgtgatgattgcaatggatagatgggatggctggagggtaggtggcatatgtatgagatgagagagcaagaatatatatgtgggatagatcagtgacaggttgtttgagattggaggtgatagcagagggaaggggtgaatcaggtgtgtgagtggaagacaaatttgtatttgttacaatagttgacacatagtgagaggtttatgataatgacaaagaggaaagaggaaggttattggtggaatttttactgatatgagaacatgtagtataggtgttggtagtgactattttttgatgagaatggctgggaacaaaggccgattgtatagtgggatgttgggagtgttcagagttggaaatagtgttaagtttcaaaggcatttgtgacttaggatcgggttgagagtgagtagagttgctgctattagaaggggcaataaaaacagtgttactgctgttagagggactgtcaaatggaaaaaatgatggagcgcagatatgggctgattgcgagttggggatgattgaacaatgaggtgaagtcggctgtggagaagtggcaggcctagtgaaattacgaatggaatgttgctggttggaacattcaccataaaaaatagtcgatggttgaggttggcttcgagagggaagggcaggtattgaggcagtgagtgtagtacgggccaatcgagttaataatggccaagcatacctttgggaaaatctgcccaatagtgatcataattatttgtgggaagcttcacaccattcatccgaggcccatattgaaagtcatcatcatttccattgtccatgtgctccataaaagcaatacaacgcttaaaggggtgtcctaagcatccacacacgaagcaaaattcagggagtctttcatagcggaaattatccagaactcatctttaatcttaggaagtcagatcatttggccacgtaatagtggctttgaaacacagagtttgacccagatgtgaaggaaagggccccatccttcgttcgtagagtcatcatagacttccatgaactccccaatgatgttaccaagtgcttcagctagcactttagtcttgctcaagaatggcattcggtatatttacacgaaaaacggagtgaacaccaaattttcctttgagacattttgtagaacatctggcgcgaaaagtataatgagatgattttgaaaatgccagggttctttattcaaaacccgacgttgatctccttcacaaccaaacttcacatgaaacaagccttcttcacctttgtaatgttaatttcacactgggaatcttccacgccaatgaccggacatttgatcaataaagttcggtttgtaaatgtgttgtgtggccaagacacgagcaaggagggtgtaggagtttgtttccaatggtgcggggtcatactcaggaattgtgaaaattgatttctcctcatcagtgagggagagtttagcattcaagtcgtttaagaggggatccataggaaaacagagaagacagagagcaacaactaacgaagtagacaacggaagcaggtggtggcgaaaatgagacacgggtaggagtgtgggagggaacggtttacagggaaagatttaaaaaagaggaagacaacaatggcacttagagagaaaaggtagttaaaatacaataactgatacagacccaatagggcacaaatttatgatggtacaaaaaccgtagtttatatatgtatgtttatatatacaaatgtgtttacatgattct

SEQ ID NO: 301262 - DNA, 2057 bp, Cannabis indica
ttttctattgtttctatatgttgattattttctaatgagttagtgaacgaatttatctattgaaaaacaattcttacattaaaaaataaataaacaaacataactttataaatttcaaatattatttaattagaaaaaataaaatataaattgtagataagtggaaattaagatttttaaaaatcagctaataatgatattggacatagttaatcaaaaaaattatgattatatatgttttgaattttaaaaatatatcatttatgttgttgacgtgatttgtatgataaatacaaattttattgtttattattagtatcttattatgttttgtaattattaatttacaattttatgtaattagtaggcttactcattaatactatataaattagtcataaaaatagttatacaaatctaaatatagtaagttgactcattaatatatctattataatttaattaagaatttgtatgaatttttgtaaatatgttttcaaatgtgtacatttttaaaattgtgtttttttgcacatttttttgtaattatttaagaaaatgtataaatataaaatgccctaaaatataattttcaatcattactactatgatgatccgtataatattaatcttatctttccaaatttatttcattatttgaataattatgagtagtaataatatagctgtaagaactaataagaatatatataggaggagacgatgagaaagacggccaccattaattattattgttttgattagcaacactttctgcagtggattttgtcttattgtacaatattaaatatgaaaatgtgtatgaaaatctccgaagaaacagctaaatattacctcatctcatcccactaacttattaattgtcggaaataagaaactttctgatatataattgagtagtttgtaatataaatattaagtttaatttttagttatagatatatatttaaatttaatttttaataataataatatttaaattataatttttaaatttttataagtatttgattattaagttttaagtaaattagtatatgataatctctaattagtccatgttatttattttttattttttttacaaaaaattaatttaaatatatcaataaaaaaattatacgtggataatgatttgatgtttgatagttaggtacttacggagttccaaaaatataacttaaattttattaccatcaaaaattaaatttaaatatttatttacaactaaaaattatacttaaatatttatatcacaaattactctataataatagttatacaaccttattattataccaactaataggaatatatgtattttttttaaaaaaaaagtataggaatatagggagtaagtacattaattaattcactattattacttgataagcaaatgttatataatagctactgcatgtgatgtgattaccgatctgaacttacgatctgaacttacttatttttttatttattgtacgctaatgtaattagtgataccattattcttgtcataaccccggctctaaatagtgactaaacgataattttaaatgtttatgaaggttcatgggcaatttgattaaattctttagccaaagattcaaactaaattaatattcaaaacaagtgatttattagtcctcttaaataacgaatttctgaagttttaaaattaaattaatatttatatgtatggatattttttaatgggtattaaccatgaagggttacgaaacaaatttaactataaatattaattttaaaaatattaaatcattaaattttgatctaataatgaataataaaagaaaattttgaatttttatgcttagtttaactacttaattaaaaaattttaaaaaaatatctctttttatactatatctaaattatgttcatataaaaatatttaagtgaaactcaacttttacttatttttttttttaccaaaaatatatttttttttatttttttttcaactaatggaacaatctcagcccatatgatgtaaaagtgagaaatttttctaatta

SEQ ID NO: 301263 - DNA, 1398 bp, Cannabis indica
gtaaaataatttccaacaagcttcccccgtgagataactttcagcttcaccattaattctggaagggctgactccttcccaccgccactaggaatggaaaaccttggacggacaaaaacgccgatgaacggcaacaacgacaacaggcaacgaaacatcaagaaccctagagaagcttctttcaaagagagaagggaagaactatccagaagtttttcatattattttatttatattcatccagattttgtacacaagggctgccatagcagcgaccatcaccttctacttgattttatttaacttcaattaggttagccacttgatgagcttggccaagtctgcaatatttgttcttcgagctaaccaatctttaatttcaattaaacatcttagactaaattgacaatcaaaacataaatgttcaatagtttcatcatgattgccataatcttgccttcgttggaagtttttgtaaaactgctagccacataataaaatattttttaggcattaaccggttccatactgttgaggtccaatgaactttattctgctccccaactagtataatgtattcttatttgatgttatgtatccacctcatccataggttatcttgtttggatgcaattgcccatacatactttccaattacagtcatgctccataaaataattcttctaaaactacgatcctttttttttttttttcgatttgcacatttcctcccatgatacatatcttggccccaagtaatcaaatattcctttccataaaaatactctacacgctaagttaactctttttaggatcttttttgacaagatcataatttcagcccaataattaagtatgtttagaaatcatcacagagttaatcaatgtcaccctaccaataaagaaaagatttttagagctctatttgttgaatcttttagtccttttttcgatcaaaacttcagctctagcactcgtgaaacacctggttactgtgggaatgcccaactatttgaatggaagatatattcttgtgaatcctgatacattcaatactcgttgaatttcaaaatattgcttcccacaaaaaaagaaggcaaattttgcctcactcggttggaggccagaggttttggaaaataacttcagtccttgaaataacatgtatatggccttataatcactgtggcaatataataacacatcatctgcgaagcttaattaatttagttacaagtccttatatctttcatggtattgaaatccctccttccttcctatttttatcattattcttgagaggtattccattccaagaataattaataaaggagaaattggttcaccttgtcatagacaacgcttagcctcaaaaaatccatgtagagaaccattaaa

SEQ ID NO: 301264 - DNA, 2667 bp, Cannabis indica
atctttgttaattaaataaatattattatttacttttttttttttaattagtaaataaatattattttagtactgtaattaaatttatcacaaaattaaataattaatattgtttcgatacaaattaaaatttattttattctatttgtgtccctatacattatcattactatagcattgacctcttttccttcttttcaataacatattcatagttttacaataaaataaagggtattgtaatatataaacgcttaaataaaaaaataaaaaaaaaagaactattgacctttttttttcttttttattcctgtctgacacatgtttagttattaaataaacactaaaaaaataatctttatacaaataaacataaatatctttaaaattaagtgtaattgtaaacctatttgtccctccaaagaaaatcatttaaaacaaatactaataaatgaacaaaaatatagataagaatctggatatggaagatgtatagtaagttaaatacactcaaatatacacacaaataactaactttgactccataattaagtgacattgttcttacttaaaaatattagataaaatttaagtatgtatctatatagccttatttagtatatgtagttttgttttggttttacgttatattttatatagccttgtttgaattagttgatatttaacaatatatattattctatatttataattttaaagtattgttattagagtattttcttgaatttgttgacgatattccttcaaggttaatattttaagttttatacaactaaatatttaattataccaatagtaatttaaaattcaacaaaatacaccataaaaaataataaaacaattataagaatgttgtagctacacataaataaaaaaaaaatgttgtagctacacatttagctaagtactactattcattaggtaaactttggagtaatactaactcttctagtggatgagtattttactaaataacttttacatccgtgactattttacatagttattgtgtttgctgttaaaaataactttattagaaaccactaattaagatatttttggttgaactttggatatttataacaactttaacctactttcatcttctttgaaaggttgtacttggacttattaattatttatttttttttttggataactaactttatcgtttctaatatatataaatgaaaagtactatatttcttatttatttttttttagaagaaaaaaacactttatgtaaacattttcaaaaatggccttcaactttttgaaaaactttacggaattattttgggtatgtatctactgaacacatttgtagtgtagtgtaaagtgtgcacgtaccttccaaggaagaagcaacgcttttgaaatttttgacgaccaaggtgtgcaaatcttcgccagaccaaattggaaatatacaaacattaacaacgaaacaaacaccagctcccaaagcaatgagcaccaatcgagaattactgcctcattgtactgcccagttctattcccagcaagcattagtatacagaacgttatcacgaacactcggtatccatagtcgtacggcttcattgttgggtacaatctcaaatacgacgcaaaaaatgctgatgaaaaacacgctactaattaatcaactattagagctagctgttaaagcataataataacaatcaataatactaacctactataaatatgcttatcacaattacaacgtcaccctgcttcccagccagtaaagacagctgagcaaagaggaaagccagtattgcagccatcaacgttcccaatccacgattaaaccctttaatcaaagtggcacctgtgtaattataaataattagattattgaagatatattattaatggactatttattattagttacttaattaattacctatgctgaactcgaacatgacaatgacggtaaggattgcccagacagagtactgatctatattatgataggaatctttccagaaaataagcaaggaaactaaggccattgctaggcccattttcatggcgtaaatggcctttcttggatcggtcctgcccatttcccatgccttaccggcgaaatcaactgaatctttcaacaacttgttcatcgttttgttcatcgactggaaacacgtacagcatccccatcttctttcctcatcgattactacgtcgtcgtttattcccttaaagctgcccaagaagagaagcctctctttgctcttctctgcaaaattatgcccaaacattggatccatagtgtatatatatatgctttcttgattatctcttgctcagttcaccaatacattctgcacagaataaaataatttgtacgggtatttaataagatcatcactactgctatttatagagtgaaacttttttaaaaaataaaaattaagacaatactagtaaaaaaaaaaaatcattattggcgtatactttaccttagtaattatcatcattgatattatatggtgtgtttgaaagaagatatttataaagggaaaatttttctcttaaaactaaaatactctatatgggtaaaataggataagtgttataaatattaataattatatggatgtccaaatcttttatttattaccattaattgtaatc

SEQ ID NO: 301265 - DNA, 1843 bp, Cannabis indica
agagagagagagaatatgagatctttttctatcccttcatcctcttagctccagccggcctttaggttatgcttttgagtttcaacctttgtgacccgttgacttggtgtatatcctctgttaatctcgtgcatctttattttcttccttagtgtcctgtttggttgtttgtgtcgtgggagtgaggccttctggggttgactttgctcttctgctttggggttttatttggaaggttggtagggttgttgggtattaattcttcttgtctctttttgtctcttgttgtcggggagggtagttatggggtctggtagggcttctgtcccaccacttaatggcaaaatttactcttgcatggaaaccactgtctcattatcccctagtgtgtcatctcttagagccttgtccagtctgtgtctgtttggtaagctggtggcccctatgtctgtggatgaaaatactgttaatgagtttgtggccagaaattggaataggaaagtctctgttgtggctatgcacaatgttttgaatctgtccaactgttttgaatttggttttgaggttgtggaggacaggaactgggtacttgctaatggcccatggtgcattcggggttaccctttagtcttgcaaccatggtctcagagtgttaatggttcggttcaatgtaatctgctgaggttatggatgcaaattcataatctcccacatgaatatttttcgacggcgaatggtcatctcttgggcaagcttgctggaacggttgtgaacgtggatttagatgatgacaagcctgcctcttggagtaagtttttgaaaattcaagttgacatcaagtttgcaaaaccactcacctctggatgcttttttgacttggctaatggtgagaagaggtggttacagttcaagtttgaacgtattggcatattctgttataaatgtggtgttcttggacaccagcgaagagggtgcggtttagcttcgccggtgatgatttcgaacagcgagggcaccccgttccccatgtttgatccatggctatcaacggaatctgcttatttggacgtattttctagactggtcactgggtttgcgcgtggagctctggtcacggagtcggggaagtcgactccaggtgcaaagccgttcagggtggtcggcgggaactctggcttcagtctgagaagtcatgcacgtcgaccaaggaatttgaggatgatggtgaccgctcggggtcacgcggctgttaattcagagatgacttcgcagggcggtgtggctccccaaggctacgtctgatggtactgttcaggccattgctagttctggtaatgggggtgagattggtcagataggtggggaaaaggatcctgttgagatacccgttttagccattgaaggaggtgaccgtgccttggtttctgagaagaatttgaatttagaaaatgtactgggctgtggtgttggtattgggccgagtttgtgtgggccgaacaaagttgaggttgctttgaccaatgggaggggagttgggccatctgggcttgctgggccgaaggataagtgtgaaaacaatgggatttttggaagtgataatggttgtgggccgatggttctaactaatagtgggcctgggttatttaattccaagcaagtggggcctggtgggttgatgaataattctaatgctattattgaaagggttatcgagaaggagggcagctcccaacccgagcccaaattgaataaagtggttgttggtggggcggcccactcattgttgggttttatgccctaaataaaaactcattacaatctgattagttatcaatttagaagt

SEQ ID NO: 301266 - DNA, 1550 bp, Cannabis indica
ttaaaactacaaattatagaataaattaagataattagtaaactgagattcataatttaaaatagggaaatcaatgctccatgtctttactttctgattaaaatcgttgtttgtctgtttacttttcagttatttttattattttgctctcaattattgtatacttcgaattaaagcataaaactaagaaaagtatagtaattagtaaaagttaaaaatcaatccctattggtttgataaccttttttgaattaaaacttttctataaaaaaactgcacgcttgcagtgaaaattgtatatcaaacactaacaaatataatagtctcatctaaggatggttaattttggttgctatgaaattgagggttaaccaaaaagttttattgaaattcagtttatgagaaacaagcatctctaaatgtagcaaaaattctgtaagaatgtcacttatttgagcttagaggtggtgccacctctaatgggagtaggagttttctccttagaaggctcattaatggactagcacaaggctataatagtgcttaacgtgtaaaagtaagagtaaagagaacaaatgaaggtgtatgaaagttttcttgaacacaacattactagttttatcaattaaagacttagacgttcaatccataggaataccgagtagctcaacaaaactttgtagtgttttcactaaggcaacattcaacttgaaagatatattgttttatgcaccaacattgtctgcttagagatgagaaaggcatgagtatttgaccaaatgggaaattgttagaattggttatatacttaaggttaacatgattagtagagactaatcaatgagatatgtttagcctaatagttcaagttaaaaggaaaaatacattaagaaaatatagcctaatagttaaacttgtaagacataatggaacttcttcttgtgtcccaaaacttggttttaagtaaactaagccacccaacaagttttgggtcaaatagaggtgttgaaatgcatgtcttatgagagattgcacaatgtcaggcgacgtgttgcctagtactggtcgatatgtcgcttggaacatctttgggattacaaaattgaagcaccatcaaaattctagacatcatattttcggaaatagagattatgtcaaaattatgtgacatgtcgcttggaacatgacaaagttacgtttttgatgttttacattcggagcatgcgacatgtcgcctagtgatgggagacatgtcacctggagctatgcatgagaaatttcaaggttttgtaaaacataagaaatgacccaaatgacttcattaaataatataatcatatgggttagtgctaatgattgttcctacactatattgttagagattttataacaatggaagaaaatcaagatttattacaactctattgtaaaattatacaaggactaaaataagagattgattaaatatatgttacaatacatatatatacactatatatattacatatatatatgaaaggtagaagagaagattacaacacatgtaatat

SEQ ID NO: 301267 - DNA, 716 bp, Cannabis indica
aatgaaaaataaaaagttaagataagagtaactagttatctcagaggtaaccagttactatatatatatatatttttcttatatcttttaatttttttaattttttaattttcttgtaaaataacttttttgaataaaaaaactatattttgcaaaatactaccttaaaactataaaaataaaaattttcctattttttttttaaagaaaagtaagagttcatttattaaggtttaatatgattttataaagtttagagcaattctacaaatattccaaaaaagtaaaggattaaaagaaaacccattataaatcttaagatttttttttgagaaagtattattcatattttaatacaatattttattcaatattatttatacaaatattacaattcatgtatatatgtttgttgtagcagaatgcagagtacttttgatgtcaatggcagaaaatattacaggtcctttgccaagccttgctgaagagacatggactgcaaaaatgctctatgctattatatctggtcatgaattgtaaaatatattaatacaatatacacataatataacaattatatttgggatatgattttgtcccgtgatgtactttcacggaatgtattctgtggtacattaaatgggtctcagggtacattaaatgagtatcagggtacgtttctactttttaatctaattacccctagatcaatctca

SEQ ID NO: 301268 - DNA, 4708 bp, Cannabis indica
aaaattaatttgttatttttttttaaaaaaaagataaattattaaggtgtacttatattttacgcaagagaaatgccccaataaaacttctaaaataaataaatttcatatataggcgaaacgacgtcgttttatggatattaaaatagaagaaagagacaaccatgggttgcttcctctgtaaatcggtctccgagttgaactcggaacaaagtttgggagagaagaagaagaagaagaagaagaccgaatcggaaatggcagggaagatgaaaagcgaagctagcagtagcagtagaaccaccaccatcataaacaatggcagaggagaaactaagctagccgattgtggaagaaacagaagctcttgcggttactgtaaatcccgtggttccacaagcatctctcacggtttcatttctctttcttaaatcttatgtacttgctatttatttgatcggattgttcgttgagaattatcatcaacctaattacaatttttgaattttgggctttggagtatttggtcaacgatggataaaactttgtttttgaattgaggttttaatctgaattaatattgaaattcgtaggaaaatagatgagattgttacatgaatgtattcagtatattaaacactgaacaattaagcaagacatatcaagatagattgttgtattgattatatgaacattaagcaattgtaacaaatttttatggtaattaactagcacaagcttttaattaaaaaaaccattttgacagtaacaataattcagttgcaatgttgaggctttcgaatgataaattagtttgtgtgctttgttataagttataaactgatcttttgatcacattgctgtggtttgcaggtttgtgggcgcatagccttagtgtcaatgactatcaaggttggtttgcataactacttttagtgcataactttctaactcttttgtcatcatgattgataatgtggatggatcctcaataccaaacatccttgcgaaattgacgccttagggtgctctctttcaaagtattttacatatttcagcatgtgatgttaccaagcctatgtttgtgcatttgatctttagactattctatggctgtgagaaaattctctaaaacgaaaaatgctcttcgtaagctaggtttccattatgaataagtaagcattcgatgaattattattttcattttcatgagagctttcattacaaatctttttattatctccccaaattctttttttttatacgcttggaggaaaactagactatatgtgctaagtttaattatgttctgctgttctcaatttggctggtaatggatgactgattgttctgaacttaattaatgattttttagatcttcttgaccgaggttggagaagatctggctctttcctttacaaacctgagatggaaaggacgtgttgcccttcttatacgattcgtttgagagcagccgatttttctccttctaaagagcagcttcgagttgctaggcgattgcaaaggtatacttttattgtctcttctgttagaaatggtcgttctgtgtccacactccattcaaatgataagataatggttacagaagtgcagaaggttctagttactttaccaatgcttctccttttttttttggttgaagcaggtagtcatagctgctttacaaatttatatggatattcgccttttagtttgacagttcattttatttcctaacatttgaaaatgagttctgatagcaatttatgcctaggtttttagatggtgacctggattctaataagtctcccaaactaaaagatgattctagtgcttccaaggaagcacacagttgtgctgatactcaatattcaagttcagaagtgaaaaaatgctcatctagtaatggtgcagagaagactgagggggaatctttcttgaattctttaacggacataattactaatgcagtttgcacatgtattgagagcggggtgtttcccaatgacattcaattgccaaaagcttctgttaaaaaagtctcacaaggcaaaaggaaactgtttgttgaaggatctgagactctcttgtactcgagcaatattgcattccagatttctgctgctataaaacgagcaaaaccagctctggagcatgtccaccagccaagagtctccaatgatactgtggatgaaaagaagctatgtcccaaaacaattgcagaaaagctggtgagtctcctaaatcagctagcagaaacttctggtctctctgttaaggcttgcaatggacacataaatttttattctggtgcaaataaggcttatttggatggaagttctgagattgtagataattctgaaggatctgctactgtacatgaaagtaaagtgtgttcctcaacgaataatcatgaaggttcctctgttaaaaaaagaaagcttgagattcatttgacaaggtcaagttttgatccagaggaatttgccttgtacagacgatatcagataaatgtacataacgattcacctagccgtgtcacagaaagttcatatagaaggtttcttgttgatactccgctaatctttgttcctccaactagtgatggtacagttccaccttgtggttttgggtctttccatcagcggtatgtgattgatggccaacttgttgcagttggtgttatagatatccttcctagatgtttgtcaagtaaatacttattttgggatccagactttgcctttctatcacttggcaagtattctgcattacaagaaatcaattgggtgaaagaaaatcaaattcattgtccaagtctccaattttactatcttggattttacattcactcctgcaataagatgagatacaaagcagcgtatcgcccttctgagcttctctgccctcttcgttatgagtaagtcttttacacaaatcgggggtagttaaagtagaaagccctcggtctttttcgtttggtttttcattgtgatagctgtgcttcataaccttctcattctcagtttaacattcataactttcctcattaccgcccaccaatgctaacctggttgtcatgtgatcttctcttatccaggtgggtttcgtttgatgtggccaggccttaccttgacaaaaaggcatatgttgtcttatcagattgtgctgcccaacaagatgaggagtcctcatcaccgaatgcttctgaacaagccatggaaatgcaacatcatgacaacagcgtagaagacacgaacgatgttcttatacctcaaagggaagagatggatgatgccgaatatgatgacagctctgacaatgattcaggcggagaatcaaatctcccagaatctatccaaggggatgatggagatatcggtaacttattgattgggatgagaggcacttatatgaagtacaaggtatgttatattcattgtgagctatacaggaatatgagaactaaaacgatttccatttggctcttatgtttctcactcgtgcaggatttacaacgagcttttggttcgagggaaaggggtgacttggatagtcagttgcgtagatacttacacgttgttggcaaagagcttggcgagcgaatgatttattcacttgggtgatttgatcgatcacttgttgtacattgagcattctatcacaagatcaacctacatttgttcacgactttgttgcccgatttggggtgagtttggggctaaaaaagtaaggcaattctaatgaagtttcgttctcttttgtattatgcctttgcttttacagtttctaacattgcccgtgttccatatggtacatcacttgatatcgaatctctttcgaattcaaatgatttgtttacatacttcttgattgaatagtaatggggttttcaggccaatttttttctttcttatttctcttaatggtcttatcctttttcaattaagctacaccttattaaaggcagaaaatgagaaaatgacctttttcgttctcttcaagcacaacaaaagtatatttaatgagtttagtcttcgattcaagaacagtaacaaaaaggccccatttttatagagttttatatcttaaaagaaattaagtcttttcttcataatttgactgtactaaatgatataattacttaaatcaatctgagtcaagtttgcctaataaaaaatatctttaatcttaggaaaatcttgagaataatgtaataataataataataaatcttcaatctttcattctattattgaataaatctttaaagaaacattacaatgataaagaaatttattaattaactaaagaagaactaagttcactaagaaccgtaattttggatcatgttctctccatatttcttgaatcccttcactcaacactcgagaaaaataccaatcagaaatataatcagagctatcaccattattactttcttgtagggctgttcatccgatccaatccgcacttttttggtcaaacaacatccaatccgcactaagtgcggatttcatattttggatccaatccgatccgcataaaagtttaaatccaatccaatccaatccgcaatagtgcggattggatcggttattttggatcggttacttttttaataataaattatttaatatttcatagaaaaaaaattaaaaaaagactattgtttcttaatctccaatactaatctatttccatctct

SEQ ID NO: 301269 - DNA, 4544 bp, Cannabis indica
atttgcaagatagagatgagtgtcatgctgaagcagtgcaaagacatcatctgccatcccgacatatgtacagtgtcttacaatgtccagcaaacctagaaagaattttttgacagaaatatgccaataagaagcatccagtaaatccacatgacaaataaataatagacattaaaatcatcaatgagctcctgaatgagaaacttactagaatgagaattgccatcaatgtcatcaatgagctcctggatgctagtgagatctgcagtttcctttgggttccttctttgtcttatagatgacctataattggttgggagtttatgaagggtaaagtgtgaagaggtattttatttttgattacttactattttaggaaaaagaaaaaaggaaataaaatctcccaaatcagccactaaaatagcaactacatcaagagaaaaatcagtaataaaacattaatcaattaatcgatgacttaaaggaatagcttatctaaagagagctgttatcttgtcattggaaaacaaataaggtttaatctctatttatttaataaacaacagataagaatgataatactagaagttttgtaatctctatttatttaataaagaacttatattcataagataagaatgataataccagagtagagtgagtgaaaaacacctacaaacattcagaatttttggggagtctaatttgaaagaaatagcagaattttttaagacaatgtaaactcagaagacaacctctgggaaagtattaacctttgggtggcaatttgggtaagaaatcaaaaggttttgaaggattatcattttcagatacaactagaaattgggagaactttatgtattaattgtaaagatttattttcatgtatatgatgtagaagttttcaccctattttgtgactgtcttgttttgtaaattttttcttgtttttgcttttgtctaaattatatttgtacttgtgttggtgtttgttggtgttggtgttggtgttggtgttgtaaccactgttttgctctgccacatgtggaggattctcaataaatttgtgaggtaagttatggaaatgtgacctttgtctctttttccaaaaaaaataagaaaaacacctacaaacatgttttgcaaatctttatgaatttgtagaatccgattcaattcaagtttagtcactctgcattggtttaatgaacttttaagtcctcctttaagatgttaagtttatcgttacttttagtaacctaaaagaactgttaagtctacactttggacaaaacaaacatcccatacataatatatatatatatatatatatatatatatataatataaattgactgccaggtacctaggtgacttaggaatccagcctaacagcaagcctaccttactgaagtcaaactagaaatcccgtcaagatggctatgggatttggtttgcatgtaggcatgcaaccttccagcaggatctgatgaatctgttctaaccattttatgcactggaacctttggaggttttgatcctattaatcataaaaaaaggaaaaaatattgaacaagaataaagaaaaaagaaaaacattgagtattttcaatcagttacaaatgaaagagtagagctcgccaagggtatgcaactaaaactaatgaaggcaattgagttaccagatggtgaaggattaatatccgaatcctttagcgaacacacttgaccagatgaagatggctcaattgtctgttatgtgtagagcacgaaagatattccaggaaaggaaagttagagaaaaggcattatttgagaaatagagttgcaaaaatggttgtacagctcattcagaaatgaatattgaattagtatactcaacatgagcacattaataaaaaatgccaatctctatgtaagtcggagtttaaaatctttgatatcaaaaagtcacaaagccacccaatgttcaactttttcaagtagacgatccttgttttcctctctttcaaagatcctttgtttctttcaagccataaagcccaccaaatagctacaactcccatttcccacaagacttttttagcttttattgccggacacatcatggattagtaatccactgcagtaatttgaaaagcagccaacaatctcaagaaattagaccaaatgcccaaggaaagaaagaggaatggaggagcaaatgatttacattttctttacaattcatcaataagacgcacctccttggagaaagcatccaaaacggcctactcctttgaagattttcgtggacactcagaccattgaaacacacaagccacgagctaagcaaaaacacttttggaagccataggacatttccaaaccgtatttgtgtacttcacaaggctagaagagacctcttcccactagtatgttgaaggctgatttgcaaaataatatttcagaggaatctcctaaccatactctccaatcctccatggttttttgccacaatctctaccttatgggttcttaacattaatggcctaaattttgtgttgtttggcaaattgggccctaagaattgtgtttttgtaaataagtcctaattctaacattttcaagggcaaaattggcatttctctatatccacaaaattttctaagaaaaacaatgtataatgaaattcaaatgtctacatgcaagaattacgcattttttcaaaaacatcaacagttattaacaaacttgactaatttgtcactattttgaaatctcaaaaacttgattgcaagaaagatataagcgactagattgtcaaatagtaaaaaaactaagtagcactcatgctaaaaacttcaaccttatttccattgaagcccgaaatctcccattcaacaaataaagaactgattgaagggtacgtatcaaaaaactatttgcttatattcacatacaacttaagagccaccatgacaatataaaaaacacaagtaaataataaaattgatccaatgcaaatccaagatttccccaccatttgacatgtgcaacaatccttttaaacttttctcaattttatataaaggacttttggtcaaatacacaaagattcatcacaagctaaaggtcaaaagtatctgaactatcaaaattcaccttcatacggatcaaacaaagaagtagaattcggaaatatgcggtttggagcaaaatacaatccaactcacaccacaaagagttcataaccacatggtacagggcaggcaatttcaatggatttgagataatttttaacagctttgtcatgcacgcaaccactcattctatgaaacttgtgggaacaaaagccgaacaaacaaacaaactctattgtctagtttcaattataaagaaaaaatatatatttttaagaaaaaaaaagacaaaattcaagaaaaatatatgagctatgattctttaatttgcaaataatctcttgaaaaaataaaaaaaaaaacaaaaacaaaaacaaaagagaaaagaaaagaaaatcataaaatcaaagctaagtaccccgttgcaagactacctgttcttgaaatgtccttgtgtcatttgagttcctcaattttgactcaactagagattgtatcttctcaatgatgacttcttgattcaaaaggcttacctgcataatatccacatatcaacggttagttataaattaacaagcaaagcattatggtatctatcaatgttttcacatcgtattagaagagaaaccgagcttgaaggggtgtgtggaattatttcctaaatatgaagttgacgagcattgaaaatagtctttcctagattaggaaatcctttccttatatcattgtatcaattatttttacaagttaagacagcagattgtaaagtttgtccgctgattgtaaagttacgtcagcagattgtattatgctatacacaatattattttgcataatgagaaagtattccatttttccaaatctcacatggtaataattctggtactccaggtaattcatcaatttataatgaattgaaagagataaaataatacaaaaataaaagtatggacatgatcataaaattagtaaaacaaaaattattgacaacttcaggtaattcatcatagataataaggtttcaaaataaaaataatgacgtttcagtatagtgtacaactgacacttattctccaaaagcttagagataaaaattgtaagagtaaagaattaatgaataagatgaaatttagaagaaaaaaaaatactgaaagtctatacctctcttttagttgggtgaacattcacatccacatgctctggtggcagtacaatggacatgtatatgaagggttttgatgcttttggcaatgttgcagaataaacaatttcaagagctcttttcaaagcagtccattcaactaatctatctgtgctttaagacaaaattaaactatggtcaaaagaaaacatgcatataatatatatatatatatatttatatatatatatatatatatctatagagagagagagagagag

SEQ ID NO: 301270 - DNA, 4451 bp, Cannabis indica
ttttttttcttgtaggggagattttaacctcaataattttcaagatggtgttttgtcatctgcatttatggttggactccttattgcttctccaatatttgcttccttggcaaagaggtgactacctcattttctagtaaaagctttaattaatttctggttgttgttttgctggattaattacaagttggtatatcctcttcttcttgcagccatagtccttttaggcttattggagttggattatctgtttggacatttgctgcagtgggatgcggtatttcaattgatttttggtctatcacaatatgtagaatgtaagataaaagtgttagtttttccatttgcttttagccttttaagtggtgctactttgtcaattataattataacactatgctgtccttttaggcttgttggtgtaggcgaggcatctttcattagtcttgctgccccatttattgatgacaatgccccgcctgagcaagttagattttcttcttccttttcctttgtattcttattttgtttgtacgtgcattttcttccttcactctatcctaaataactttttgttgtggacctcagaaaactgcatggcttgctttcttttacatgtgcatacccacaggaattgcactgggctatgtctatggtggagttgtaagttttcatatcctatgtttaggctcttaagtgcggtcttgcaatagttacaagttagatcttttaaattttccagccatgaaaactgagaatgagaaattacagcaattgccgttctttatgtatgggtttgttctaggtttttattcataatattggatatgcactatgtctttggttcatctagtgtcatatctatattgctttactttgcttgtagatctcctggaagtattaactctgtaatgtattttgtattttgctcattaaggttggaagcaatttcagttggcgttatgcattttttggcgaggcactccttatgcttccttttgctgtttccggatttctggtgaaacctttgcagttgaaaggtgaactttttgagatgcatattatgtatgttgaatagccttgcataatcttgtcatttatatattcacttgctatacatgactgtaggatttgcatatgttggttcaaacaaaggagtgacaacaattgaagcaactagccatgtaatggaaggtagtgcatgtgcttttatctactgttgccaggttttacttatcctctcatttatcttgaagtacattaataaactgtaagagtgtaaatgtgtacatgcgtgcacctgtgcgtgacgtgtaaaagacatctagaaaaataactgtaatggctacaatattgaaggtgtcaaaggcttaaagggcttcttgtttagcatgacttttaaagtgggtaattgacacatttagtagttcttcattggtcaagtagtgatgatttggtccccaatctttcaattttggcacatttaaccctttatgaaatttaaagtcagttataattgtgtgactctttatatcattttttttttcattataggattttttattttgtaatgttataatacatattctaattttgattctatttctcatagaattaactgattttcacacatgagatgatatttttttaaagattttgtttttacatattctcattatatgagtttcaaattagacacataccaaacaaattaaaaaggtatgtaatttctgaagttattttaaaagaatgtccagataattacttgaattaagcttttgttaataaaattatcctgaagaagaggacaccatctttgcatatactcatggtgatggtattggagaacggcataatctaagaaagtaatgtcatctgcacatagttggacctacagttctgcatttcattaatctgtaacgaaaaaatctatatagctatgttgccatctcttttccttctaatgatgcaaattgtggctttagataaagttgcggattgtcattcatatatgtgttgaaattacatcttgttgatgctgttttctgttttttaagacatgcttgtgcagcaattcctgtttttaagactgctgataaccttataattgctgtttcagacggatcagatgtagattctgtgcttattcctttagatgaaacaaagaagtaagtagctttatgtttggattccttttatatctgccccgtttggctaagcttttctaagctcctttttagtttctaggattaaaaaaaatcctttttgaagcggtcggataaaaaaaaaggtcttttctagcttctccaaaaaggacttttgagaagctattttcaaaattcaatcatttctaatttattcataaaagatcttttttaaatatccaaacgctttgaagatgtcttttcattaatgaaaaatctttacagaatagttacccaaacaataaaaataaggtacaacttttacttatcttgtgcttctagctttaagcaaaagcataataagcttagccaaacgggctgattcattgttttggaaaatactaatgggcaattgtgaagcccaaaaaccacactaataccgatagatcctattgtattaaatcctcatgtaagtcctacacataactaattgtggcaatagggtaattaagggaactgttgaattgaaatccatttaagggaagggaggtagcttagttaaagagaagaatactagagagtttcaaattaaaatggctataaaactaatgacaaatagagtctgcaaaatatctagtaagtgaggccaaaattccttggatttgtttatttaaagcttttgggtttgttaaatatacattgtcatccttcttctaacatttgagaaaaaattaaaatactttttagcgtcgtaactaattagtgtaaaattctttcacaaagttgtgcctgacatgctattttgttgaatttaatttgattgggttttctcttgtatgtttcaggttatcagctttctctaaattatcgagccaatgctccagatttactaaggatatgaaagtacttttgcttgataaagtttatgttgtcaatgttttaggtacacttttatattcattattagtactttgttgcagagttttagttcatgaacattataaaatttgtgataaaatatttacatcttctactgctgttagagtggttttcatttatatgtttgtgcgctccctaggatccaagtttttaatcattctttgatgtaaagaaatacttattttttgtaaaaactacttccttaagatgtctccagactccagctactaactaaatttgtaaattcataattttattttttctaatgaacttttttttctttttttgtattggcaggttacatttcatacaactttgttattggcgcctattcttattgggggccaaaggctggttataatatttatcatatggtaaagctattgctacttctgcttattaagtatttgtatactttatgatgaagtttttgtctttcttcaatgtcagcccttataacttagaaatttcattttttttttttatattacagcactgatgataattctgattgattgaaactttctccagagtaatgcagatttgttatttggagggattacaattgtctgtggaattttcggcacattggcaggagggtttatccttgataaaatggatgctacaatttctaatgcatttaaagtgagttctttcattggtttgcatgtatttaaaatattattgatgttctattttctacttgatttttaataacataataggctggctttttttatatttgtttaatttcttacaaattatatctgccaaagtacctttcaagaggcctaggcatatcagagtaaaacagttcctgtatcagtagtcagcctttttctcatatcctctttaatattgaattgtaccatttctgctagaaattaaatcaaaaactctgatgacacttgttgttttattgcttaaccttctgccttttgcagcttctttccggagccacttttctaggtgcgatattctgcttcagtgccttctgtctaaaaagcttatatggcttcatagctctttttgcagtgggtgagctgcttgtatttgcaactcaggtaatcttttaatgcaggaatgttttgataggatactggtttcttgtttatggtttctgtgatttatcatgattaaaaacagtcttgctcatccccagtatgtggtaaatgaaaggggttggtttgattggctaacttggctgtcattatatgacgatgctttagtaatgtttcattaatcataatgtttctgcaggctccagttaattatgtttgcctccattgcgttaaaccaagtttgaggtccattgtcaatggctatgtcaactgtttcaattcacatatttggtgatgttccttcctc

SEQ ID NO: 301271 - DNA, 3578 bp, Cannabis indica
cacttacaaacttgaaactttgaatatttatgacgctctttaccctatcctaaactaaaatcataacagaacattaaagtgataccttttcaacaacatcaatgctgaaaatactcttacttgatttgacactccatcattgttgaatgcatcggcgaaagtagcgaaatcatcatcttaaataaaattctttgcagcctctctcatgacagcagcatcagattcagatactgtgggggctaaatcacttgaactcggaaatcaacaggaagaaaacaatggctaacttaagcgagagtgaagcttggaaatcacatcaccagatattcatatcaccctaatagtaccaagaaaatccattttccacaacaatattaatcaccaataatctccacaagaacacttcccatcgaaaaagtgatggaatcggttcacatctcttacaataatctcccgtccatagattttcgaaatgaacttggtggccgtgtgacaatcaacacaaatgcgaaggttcttggttactcgaagaacaacaccaggactagtattcagaaggccaaaagcaatggcgagcttttcactatgagcgctaagattatgttctttctcctcttcgctaacatcgtgcaaaacaagactagtgtcgggtacataaccaactcccttaattttctcaggcagttctttcaagaacatgtaaatttcctttgcctgaggatgagaagtatctccaccgagaaacatatgagctttcccgttgatttcgatccagctacatcccggagtcttcctcatgcctcggttttttagcatagctctcagattgtccacttctttccacattccaacttcagcatacatattggagagcaagacaaaattgccactgttatctggttcaagaacaaataacttcttagctgcagcctcggccaattccaaattgcggtgtttcctacacgcagctaacaaggcgccccacacgcttggtcctgcttgcattggcatttgatttataagattgtttgcttcaaccaatcgccctgcacgacccaaaagatcaacaacacaagcataatgctgaacttctggctctacaaaatatgatttcgtcatacaatggaagtatttcaaacccagatcaacaagaccagaatgactgcatcctgataacaatcctgtaaatgtgatggtatcgggttgaaccccaactctgatcatgtcctcgaaagtggatacagactccaaaccatgtccatgagaagcataagccgtaatcatagtattccaagcaatcaaattccttttttgttgatgtatcttatcgaaacattggtgagcttcaacaagactcccacatttagcatacattgcaacaagagctgtttgcacagagacattagaacccaacccgatttcatttgcaaacttgtgaatcttcctcccacgttcaagtgctgctgaatgtgcgcacgcaggaagaacactcattatcgttacccaattaggcttcacctctgaatcttcttccatcatcttatcaaatacatctaatgctctctctgcaagcccattttgagtgtaccccgaaatcatagcagtccaagaaataatattcctccggaccattctcttaaacaaatcctctgcaacataaatctctccattcttcatgtaacctgcaattagtgcattccaagatgaaatgtctctcactatcattccattgaacaacttgtgagcttcactaatttcgccacacttgacatacatatctatcaaagaagttcccacatacatgtctatctccaatccaattctcaaacttatcccatgaatacatttccccatccaaacatttgaagcacaacatttcagcacaaaagggtatgtaaaatgatcaccttgtaggcctagagattgcatttgagtataaatcccaattgttttatgaggataaccatacaaactataagctcgaataattgaattatacaaaagcaaagaagggttatttatacgatcgaatatagtaacagcagtatcaagatcaccagaacttgcatacattgcaatcatcttagctccaaggaaagcattaggctcaaccaatcttagggtcatttgagcatggacttgacggcccaatctcaacaagtttcgaccagtgaggaaattgaaaacagctgcaaatgatgagatctcagccgggttctgacagattataggttcaacaagggaaaacaaactcgaatgtaagggaaaatgatgagactgagattgagatgagcattgactgtgtgcaaaacgaaaatggctttgaggttgttttgggatatcaagaagcacaaatagtgaacgaggacaatggcagtagtctacattcttatatgagaaagctgataagaacaaaatcaatggctgacacctcatatctagtatggggatctttcactacataaaatgtctgcaatattcataagagtagtgagagagagttagtgtgtggaatttcaagtattttcatcagtgaatccaacttttgtacggttccaaacaaaaacaacattcatgtcaaacataactacaaatctgcctttttgcttagattttatataaccataccaaaatcaaggcccttaacttctagcaatttaaacagataataatgtaaacaaatgttctaatgacgaagtagtagactttaagccaaaataacctctctatgtaacatgagcaagtatcctgttcctctgctaacaaagcttcaagctttctccctagaaactcttctctttccaagtaaagagctttcaatgattcctgcaacatataaactaaataaaatggattttttcaataagcccagaaattatcttctttaaaacaccgaaattacaagctttaaccatgcatttcacactcgaatgctaaaaacttcacctttacgattcataaatgtttgtctttgttgatgtagcagacccatatcctaaaacgttgtcttttgagcttgaaagtgaaaagtagcgaggaatagtgtaattagggagatgcccagatgagatttttgaggtttaaagaagaaaagtagaatacccagaatccaaaacctcgtcttttttaaataaagctgaacaatcacgaagttaatatagtttctgggttgagtattacagttttaatggtggctctaaggtccaacagtccaactccgacgatgtcaaaatgaaaaagagaaaaaaaaatattgtcgtttgaagtcccatataatattttccccaactaaacgacatgcagtttgtcttttgtttttgtttattttatttcatttttgacaatgtgatactaaaataatttagggttttttttattagtatttttataattaattttttatttatttagaaaataaaacaacataatcttgaaatcaaaatagtataattttaaaataaaaataacataaaataaaaacaacataatctctaaatagaaacaacataacttcacaaaaaaaaaaaacaaactttattaaataaaaaataactaaaataaaaataaaaaacaaatac

SEQ ID NO: 301272 - DNA, 1662 bp, Cannabis indica
ttttagtttttttttatttttaatttttttttttttttttgacttaaactttattttaattttagtttttgataataatattcatgttaatatataaataatctttattaaaaaaaaacatgtggcccttttcataatagcgttttaatgatcattatcatctcttattgtaatttaagaagttaatgacatcccaaccaatatcaaattcattgctaaaagtcaaaggaccaagatgacatatttggaagaacggcacctatatattttttataaattgctttttgcaatacaataatggttaaaaaaaccaataattaaaatattaaatattatgaattaggccaaaactttattcaaaacacaatgtaataagacccaaccctaaggccaaactaaggatataattgataaattagtgtaagaagctagtgaactttgatcttaagtttagatttttagatattcaaactccccaaaataaatagataaacttaatataataattactaccaacctacacaaccatactaccacttataataaaatagaatttataaatttattattctctttctttcacttatggtctttttatcatgttgtaagtaaggatgacaattttttgtgataattcaaagttggcttatttaataagtgtgttaatactaggtattaatagtgcctaatactactatgacataatatttaattaatatatatacgtaagattcaaaatttaattacactaataataatataatattttataataatactaatagtcttgaaaatctatcatattcatatagtagtaatggtataaaaattcaaaattcaaaatgtgtaacttattatgtcgattacataatttataattactttcttgagttggattgcaagcatgccctttagattactgaaaaattcttgtggtattgttgacatcattgaggattatagacttaagtaggaaattccgatcttgaggtttttgttttgttggtagagaagataatcgcattttcattgtttagctaaattcgctttggacaccaaagcttcagtttcttaagaatgtgagtgtttccttagttgctcatcctatcattgtgttggatttgctaattttattgtcatttcattttctagtttgcttaatgaaacatctttcctataaaaataaataaataaataaagataagaaatagtgattaagtagtgtaaaaagtgtatagcttaattaattaatgtatctataaaaagtagctaaaactaattatatgactcctatgaatattaatttcaagtcaagtaacaataaaaagtggctatttatgaagttattcctaacctacaagttaatgatatgcatttggcacaattgacttatttaataaatttatacttagcaaataaaatatgataataatattgcaaataaaagatgataataatattaagggtattgagttaaaatttgaagagtgttttgtggttaaaccctttcaattgtccttccacttatatttaaccattggtagcaaaacttttcaaattactaaactaattaatgatatttgtgtaatttccatttaagtaatatttatctaatctattgtggatctctaaattacagcagaagaaagagagagagagaga

SEQ ID NO: 301273 - DNA, 4036 bp, Cannabis indica
ttttttttttttgttttaattattgattgtgaaagcttgattacaaatattattatatttatatatatgatggcaagattaacttgttattgtcatatatatgttcctgtataatggacttaattctcagtagatttaggaggcaatgatgattatgacatcggagaaaatgatccctaatctatttgatgttattgttaactatatatataggtagaatctaattataaatttcatgtacacaatgctatgcaaagcaaaataactaaataaggtaagcagaaaacgtttgtaattagatcttgttgtattataggtttattcatgaacttttgatgatatggatgtttatgctgaaaagtttattaagtcacatatgcatccaacataataaatgtatgaaaaatcatagttctaaacttctaatacatcaataattattatgttctacctatattatatatcttattctaaattttttatttacacatgttgtagattagatgggaaaaaaaaaggtggtacccgctattatcatcattatcacagaatattcataacattagcagaaaaggaaagaaaagaaaaagttttttatttttttcttttctgagaacatgtttcttcaatgagaaaaatgtcaaaataaataactaaataaataatgtatgtactacaatttagtaatgccgtgacattaaaaaagaaaaaaagaaaagaaaaagaacatagccaatagaaaatataatcactctagctagaaaaaataggtaattaaatatgataaaaaagtacttaaagaaaagataatggttaatttttttaattattatttttaaaatgtatatctttaattttaaaaaagttaccggagaaattttgacaacaccaaataacaaaagtattcgaatatataacaatgaaatacacctgcaaaatagcgagtattcatttaaagtaattaatactcgagaaaataagtaaataacgaaaaattgaaagtaataacaaagcaaagttcagtttgcctagtacactattatgctcattatgttaatggatcattccttaatatagaaagaaaatgtaatgctcatttattttatttttcatattattttctctgttctacacgtttaatataataaataacataaatactttaattatgaataattgtagaacattcattcatttctttctttcctgtcaatcatgacgactgatcgttgacattaattgatggaacacttgtgacgacagtgatcacatatcaagtgttcttaatatcggctacccaaacccacgagcttgaactggttatcgcatattaaaaagtctaagtagaagatcatgcacctactatgaagctcgatggtacgtcttctgcaagatccaaaagctcatatttcccagtttggaagagattatattttacggcgtaaagccctaacccatccgtacaaactggaagaaggtcggttacaagctggtgaagtattcaaatgtgcactgtcctaccaaccatacgatgcgttctccagaccatcagaaatactggttcttctccacaggcttccttgtgaagacggtgccaaacctctttttggattttgaaatttgggtatgcgctcttttcatttttattgtttgttgcaatcttttgaagctagccacttaccaaagctcctttgttttaattctggcagaactcgtcccccaaactccagagagtgagaaattaacaaagaaagtggcccagttcatctctttatctgatgaggagctgaaagttgaaggcttggttaccatgaaactactccgcgagcatgaactaattgttggcttttggagcattgatataatgtaagtagcacgggccagagccaagcttccaaagagacaaaagaacaaattgccgcaaagattgctgatataataacgaaagcagtgaaggaggatgaacgcttggtggtggattgggcacgtcgccatcctaaccccatgatagaggaggatgagattatggaaaggttcaccgctacatacctaaatgaaggtgctcttggagctagcatttccgaaaaaggtaacagatccttctgtgtgttttgcacccccagtctctaccgaatgtcccaaagggaccaagggggggttcaacaattataagtatagatcgtcttaggtacttcatgaagacgtatatcgatatggtagatgagatcattaggagccaaagtaactagagttgtctcaggatacaattagagtggatccatttctaacaatgtccttctcgaatttcaaagaatatggaagcctcatgagtcaggaagacataaatttatttgcaaggaggaaccatataactgctcattgaatggttgcacccatgccaatatctttatttatgtcgatgcatgtctatacttgtttgtttatgttgatagattgttgtcttttgacagtattatatatggtttttgtgttgtagaaactctcgagtccaaaatgatgaaatgagtcatggatgccatcaaatagattgtctcttagatggaggggagcaaagggaaaggtaaatcaaagtctagggccaatagggcccgtaaaccaagacctcttagctctcactcttcttttgacactcacggaccaactcaggctgtgaagactttggtttctaagacacctagtgtggtagaaaagacccaggctaaggtgggggagacttctcggagccaagtggcttctggtagtggggaagcgtaagtagttcaccctcaccagtcagcccctgagaagcctccttttgggttaataattgatataaaaacctaaaattccccagagaccatggtcgtgtctgacgagagaagggagggacttatattttcccagacaaggttgatatgaccgctacgcattccaaccctcttcctctctttgagaaagagactaagaaagcaaggttgttgtcagcgaggcagctgtctcccataagagagggggatcttcgggcctccattacccccagtcaggaacatctaaatcaaacactaccacaactgcaacaaaagcaacaacaacaacaacaataacaacatcaataactcaaccaacaataataacagcaataacaactccaacaacaacaatcacaacccaaccaacaacaacaactacaactttagtctaaacaagcatcacccaaagggccaaaagcctctctacaaccctagtcaaaagcaattcatctaatggttggctcactgattcttggccttgtctctctagcataatacagaggactagctctagtggtggcgctcgactgttgctccatgttggccattccttcagtatgaagtgccagtggaaggtcctccttgggcagcgaggttggccattaagaccaaccaggttggcagtttcctcctgaccagccgtggtagccaggtttgtgatgcctcctaaaatggcagggttggcaaaatccaattgttttctggagattctagttgtgactggaacacagacatcaagatcaactgctgtagcgtcttaaggaagatccaatgagacagaagttgtagcaggagttctccttgtgttaaccatgtcattttattagataaattaacaactcactctcaatgaaagcaccaaattgttgatctcagatttggccaatcaacagtggagtcaaatttgatattaatgcttaccatgtgtaacataataagaacagaaaagtaaataagacacaaaagtttatagaggtttgacccccttcattagcaggtaatgacctactccccttttggttgtattgataccagagataatacaacacaaatcgtaatagtagtgggatctggagtggctctcttaagtagtggggaccatggcttttcttctaatttttcttcagaaaaactgagccttccccactttctacaccttggtcaaaaccctctctcttttcttcttcatctttttcgaccctagtgaaagagtaagtgcccacaca

SEQ ID NO: 301274 - DNA, 1556 bp, Cannabis indica
aaaaaaaaaaaaaacttctattattgctgaaaagaatatacatatttatacattgcttctaaaatatcacaactcacaagttcatgacaaaattttgttgactttattaaaatttgattctgaataatataataatacgacaatcatataattataaagtcgaattattatttcattttaaatttcatattaatctcctatcacactagacgaattttccacgtgatgatctacatatacatataattattatatatatagacgataaatatgataccatatatattatagataacttttgaaataaatatgccttaattatttagatgtgttatcatgatgtacacaaagtaataagtgagcaacacggtagcattacatgtaacatacatctaaatgacaacaaagcctgaataaggctctctcgtgatgatatttactttttatcacaatgcatgtgtatatatatatgcactgtttggtcaacaactgattgggacacgacacgactctaataatttaatttgttgtggcacagaaaaaataggttcttttacataaattttcaaatcaaacattcaaacaaattttgtaaaattattctaattattagcataaacatatatgtgatcatatacaacaacaacaacaataatttgtccaattagacatatatatataaattgaattatgtacgtgttcccttttgaggagaaatagtaacagtcgagaattttcttaaactattaattattaaagagaaagaaaggaaaagacaaggaatggcaaaaataatagagcagagtagtttttagaaaggacaggaaaggatcgtaagtaatctattatcatgactagactccacgtttgattatttatcaaacttgagagcactcacatcacttttgtattctattgttttcatttttattattagtattatatatatatatatatggtaccacgcaccagcctaataatgtagctgtaaatatctatatatatataagtattatataaattaaagtctaattaacatttttgtcacctaaactttgacatgtactaaatttaacaattttaatagttcagagacatttttaacgaccttaaaaatttaagaggcataatttggtacatgtcaaagttgatagagcaaaagccctaattatcctaaactaaattaacaataaaattacatgtctatgctgatttttttttttgcaccattttttttttatgattttcatgctttttattgtccctcagtgtttaagttgaatttgtgatatgattttcaaatctgataaataagtgtttcaaatcttgatattatgatatggattgttttactatctttattcacattaactttttttttttcattaaattgtgtggtaatagagttttatttattgttaatcagtatgtcaatttgaagagggccaactgttacagaaattttgcctataagtttatttttgttataaaataatataaaataatataaaataaataagaaaaaaagaagatgaagatgaaaagagaaagagaaa

SEQ ID NO: 301275 - DNA, 3023 bp, Cannabis indica
aaaacgacatgtcgtaagtctaatttttcaggaaaacgacatttgtatccatcttaatcaattttgttaagaacaaaaataatacaaacaaccaaattaacacgtaatgaacttgcatgaattgatcattttctcataatttaaaacacgtcaaaaacaattatagtaatattatttatgagaattatattcttttatattgcaatagtagaaagatagaaagaaacattaactaatctcttgaataagaattagcagactacattattttgaaaaattaaatctaactctgcttgaaacgtttgatcttttgagaaattttcgaactcgccaaatatgctttcgagctcatccttcgttaattttgttgaaatttttggtacttcttgttgtaccgctatattcttctcttcaccaataccatcaagaagataaagatttgatgtagactctgataaagtattctcgtgtattattttttgtcgtttcacgttcgattctttatgctcgtttattacaatcactttcttttctttcgatttcattttgtaaatcttgcataacacccaactacattgctgcaaaaaataaattaaaattaaattagtatattaatcaaattaaagtgagtatcaaaatttggtagtgataatcaatatatatatgtatacctgtgtgttattagattcaggtaaacgatactcgatcatcttccatcgagttagttttttatctgtgtccataaaatccagagttcttctaaaaccaatctcgactttttgtttattcaagattggctttttttgagcattgccatgccaagttccattcttagcttttcgtttcgatctcttactatttttaaatgtggaagatgaatcttttcgatgaaaaaaataccatgcgttttcgcacatgggtgagtattgatctacatacaattgataacatatataaaactaatgttactaacaaaattaaaagaaaaatatgagttataaagaaagtactaatgtatgatcttaccagtaagttcttgaggatgaaaatcatagatattcacatcttgaatgtgattaggttgaagaagatgagggttgaagtttttgttagacacataaaattcaattatttcttgatcatttggacgaaatctaaccccagctggtagaaaattgttgaactccataattattgagagaaaataatgtatgtgatgttgatttagagaaatgagtatgtgaagaagtaaagagtagtgattattattgtatttatagtagtattgttttctgttaactatattaactgttttgttagttaatttggttgactctagtttaaaaaaaaatgtgtgactaattgttccaaaccactatttaattaattaaacaattttcttatgataacttattttatgattaaaaaaatgtgacacatttttatttttataatcagaaaataatataagttcaataaattacttgttttgattttattaattaatataatgaagatactggttagaagattgaaagaacttgatcagttcaaacacagttgttcattaagaaaagatgagattgagaatcttcaagaatttataaaaacattagaacaagattcgtaaaagaagagtgttgataatgaatctttaaagattgttataaagacactaaatgagaatttggacaagtgtgaagagtggtttcgaaagtacaacataccaaaaaggtatcaaaatggtcatagacgaaggattacatagtaagattacaagagttgatggaaatgacatggagaaaagaaacaaagaacaagagagaaaaagggtatttgacattgcgagaattgatgggagaaatacatgtcacgaaaagcaatggcaatggcctaatcgctttcgattctcttcggttttctcttgaagtaatcgtcactcaaatctctaaccttctcattcagtacttgttctcacttatgttaacttccaatgcaagtaatgaaattgtatcgcgtaatcttgatgagcttctaactataatcgaatgcttatccctagagaatctgattactctgttgctaaaaacatgtttgttgagataatttgtttctttattgatgcaatggagttggcttgaccattttgggaccacgagaataagattagccttgttaagaaaaccgctcattatgatgttcaataatgatgtgcttttctcaatgtctgttcatcttaagagtaatgttttcgaggagaaattggaaagagttggagaaaagataaaagagtgaattttttatatcgaatttgtccaagaatgtagaagctaatttttgttcagagataaagtttttaaggcaagttttggaagctggtgtgcatgaaattttcattgaagatgacaagagttcatggtctttagtaagaaaaatttgtgtaattaatgtttgttcaaagttttaacctataatagaaaaatttcaagaagaagaagaagaagagattacattgtttattgtgtttctttattgctgactttgactagttataaatgatcacatcagaatgaaatattaccactaattcaagcaccaaacatgaccaaattagccatggttagctctggttctagggggaaattcaatgtcaaatcgatctatgtttcactaatctcggctgtgaagattgactatgctgctgccatcttgtttatatccagtttgactgttgctttgctaagaaaattgttgctgaaattatgtcatggcgggttttggaagctgtttgtaacgccactctctcagcggtttactatggtgccgtttggtaacacttttgttttttaatttttaaatcacaaaatgaaaataaaatttatttttaaaaaacaaaaatgcgttctgtaacaacttttgtttttcaattttaaaaacagaaaacaaaagtgtgttctgtaaagttcatttttatttttatttttttattttatttaagtcgggtctaggtccggggtcggatt

SEQ ID NO: 301276 - DNA, 1863 bp, Cannabis indica
aaaaaacaattttttaaaacaaaaaacagaaaacaataccaaacatgctcatagttttccattataatatgataattctagatttagtaggattgtaataggccttttaaaatataattgtattggcgaaattattgtaggctaattgaatgtatgaaccatgtttagacatatgacttgacaccttcgatgaataattgatagcgacacttacaatctagtttgtaattattattattaagttttaattttatcagagtcgagttatgcatgttctgtaaaatttatctttattttcttgagtattgatgcgtaatgtacattgaaagaacaatgaactcaacttctctaggtacctaaagctaattgacctagctagttgaaatttgtgatcacaacacaactacgtagttttttttttttttactttttattattatatatatatttttagaaaatatagaaattgttgggtaaatttcacttataaccagttctttttacaacaaatatccacatcaacacttacaacagaaacaaaacaagttggactcaaccctaggtggcttcgcctctactagatcaagaaataggagttagttacaactgttattgtaactaactcctagatctgtgatcaaccgactatgacacatgtatataagcagaaaattaaaacaaacagtgcagattacacatattagaaaagatagagaaagagagaaggtgtaaaccctagttgaaggattctgctccaagatccagagatgagaaaccaagttctcatggtgaggaggtagaaggaggaagtacatgcacaagaaatcaaaaagagagttagatcgagaacaaatcaagtgaagaacaaaacaaaaagtgtaaaagagaaagaatcgagcttacctggtcgatcttatgtgacaggaagctccaaaacttgtaaatcgacattgttgatagtgtatatcaagcttcgatctcttagatgagcttgacagagatgtagcccagttttttgggtgaactctgaaatatttcttggtgttttctctctcttactttgtttttcattttgctaaatctaaatctgtgtgtgtgggtgaagaacctaggatttcgattcagagaggctgagtgtgtgttgtgtttgggtgtttagggtttctagactcttctgtagagtctttaaaccaaagcttcaaacgacactagagtttgtgtcgtgttgatcaaaacactgctgtttttgtctaaggttaagttagacaaagaaatgtcgtttttgaccttgatcctgatattaaaactcttgttggtgtagagtaaaagggtaaaatcctacaaaaatatctattaataagcaaattgtacaaaatctattacatgaatatatatcttaaaattatcaaaaatatatagacttttccaagaggtttatgtagtatttttcttttaaattttccttttgttatctttcatttggaaacagtcaaataattaattccaataattaatttaattttataatgacatatacattgtaatcaatattaaataaattacaaataaaatcttagtctaacatggaaaataagaacttattaagaagtggcttatgcttctagatacatatatacttggttcatttatatagtaataatattcgttgtgatgataaaaattaaaatagtaacaatttgtatttaaatattaagttttagttgcaagtaatttttttgttatgcactgaaagtcacatttagtcacaaaaaaattatgctgtaactaaaaagttgttactaaaggtagcgtttttttatagtgtgtcgtgagattgatttatcgttgttttttttttttttt

SEQ ID NO: 301277 - DNA, 2170 bp, Cannabis indica
acggacaagctagtgtgacgtctcgggaaattggggcgttacaatagctctagaaacaatttggtgtacttgttattttatgtggatgacatcctaattacaggtcccaatctatctcttataaatcatttcatctcaggtcttaacaatgaattttccttgaaagatttagggccagtacacaattttttgggagtagaaatttacagggatagcaatggcatgtatcttagccaaagcaagtacataactgacctgcttacaaaggttcacatggagggagccaaaagcagtcccaaccctactagtcctgcaacaaaaatgagtttacaagacagtgatccctttgaggatatcactctgtacagaagcaccattggagccttccagtatttgagtttgactcgaccaaatgttgcttacataaccaacaaacttagccaatttcttcatgctccaactgttaaacagtgggaagcttgtaaaaggttgcttcgatatctaaaaggcactctcatagaagggttatggctcaaaccaagtgacaccctacaacttcaaggatacactgatgcagattgggccagctgcatcgacaatagaagatccacatgtggttatctcatgtttttgggagataacttagtgtcttggtcagcaaagaagcaacatgttgttgctagatcaagcacaaagaatgaattcagggcccttgccaatgctgctgcagaagttcaatggatcacatctcttttatctgaacttaaagttcctctatctcaaccacctatcatgtggattgataatcaaagtgctactgcacttgcagccaatctagtatttcatgcacgatgtaaacacatagaaattgatcttcatttcgttcgagacctaataatagcaagacaactcttagttcgctatgttccttcttttgatcaagttgttgacatcttaactaaaccattgacaacagatagatttaattacttaaaaggcaaacttcaaatggcttcatcaccatttcgtttgaggggggacgttagctaacacatctattagttgttttttagttagttggtgttagttaagtgttgagtgttgtttgttatttttgttataatatatttgtactctgtttcaaatagtatataataaaaggtctttagttagccatttttggttaagctttccttggctctaccttttgctatgcttttctttcttttttctcttactttgttttctgccatttgagactaaaatatataagaattatttttaataaaatattcatagttcaaaaatgaaacttaagctagttaaaattaagagttattttcggcataagtactttatatttttaaatttatacacttacatatttatttttttaattagtactgacacatatcaatatattattaatctaaatcaattaatatttatgttaataataacaaatgataatattttttatttttttaaaaatatatatttttttaattcttaagaaatatttttttaataaataaataagcaattgaataaaataaaaagaagaagatgaagaaaccttatacttctccaaaccagtaaagaaatactaaaaaatcacaacaatactaaaataattttaaacccgtaactttttatctcatttaacacataaaagttatgatatggttctaacaatatcgaaacaaacgaatcccaacacataaacaagaaaaagaaaaatagtttcttcctcttctagatttatcatccattaatgatggcgagaaagggtatagaacttcagaaggtgggagagagcagagacccgtgcacaaagcccaaacccattttgttggatttggtgtactcttcattctttcccgtctctgttagctccatcaagcactcgatacctcagctcctcttctatattcgtctaccattaacacccaaatctatcaaagatgatggttatctctctcctcttcctcaaaggccttatgggatgcttttgtcttaaaaatgatcgagaaagaagaaagctcgtttgaatctattgccttcgaaaccgatgaaagtggtgaatgtcaacttcttcttctttgtaacaccccaatattttgccatattttacaaaatactaattttgatgcattaattaaaaagattc

SEQ ID NO: 301278 - DNA, 2891 bp, Cannabis indica
cgagtagtacataagccaacataaatttattgatatccaatataatactaaatattttgataccgctattataatataatctaataggcttaactaacatgtacgctaaacatgtaaacacatatatgcatatcattatactaatcttacttgaattttgaattcaagtgtccgggtcaacctgagtcgaatagctgctcgacggtttacaggcccctaaatcacatgatttgcaaaactgatgagtgacacgctaaatcaatttttggggacttaaacttgaaactaaaagtttccctatcgatggataacatggaaataccctaaatattacaaaaatgggaaaattagggttccctaaaatgccccaatcggagttccggttcaatggggttttttggggaccaatcggttgaccggtttagtgcaggaaaaatacaaaaccctctacacacctcaattcaaacccaaaccttaaaataacttctagaatacctaattacattataacaaagagaattcatgcaataaaaccaaccacaacaaccgaaaactaaatccaccattagagagaaaagcttgagtttataaactcaaaccttgctcaatcactacaacaacaaacaagaacaacttaaaatagctcaaatgaccccaatatatcctaagaacacaaaatcaaacaactcttaaaactacagaaccctaatttacaaatcaagtaaataacctaactatgaactaaagaaaccacaaaaagagaacctagagagttttacctcggattaaatcactaaaaacttgataggaaatcctaaattgaactgaagaagctttaaatgtagctggtttctcttgagggttcgagaggtagagagagagtgaaatgagagaaagagataatgcttatcatttttttttctaacgtgaatatcaaataaacctaatattaatgtagtaatatcctcaattatactcacctgaaataattctaataatattccactaaaggacaaacaacaaccaatggtaaatgaccaattttcccttgcctaagccaaaaagcaaccatgccacctaggggcattttgatcaaatctaatacctcaaataatctcaacatttcaatgtctaactatatttcctcgttgctactaaaatactagaatgtgattttataggccaaacgccgcgttctaatgatgtcgggcacaaaacatgtaaaaacgtaaaatttcatatatggcataaataatacaacctgaattgaaataaatttccataaaataataaatcataattaatattctagattcttaattaagccctaatgatctactaatttctataatagaactaagcgatctatgaatgtttacaaactcccctcaccaaaatctatgaagtggaaatcctagataaatggaggtggttggggaaggtaacaagaaaattaatgagttgtgtatagacgtggaatagaaatgacaaagaaaataagccaacaagctcaaaatttggtgactaaaggttaaaatagaaagggttagctagaaaggcacaaaacgtctaagaatgccctaagtcatgtctaaggtggaatgtcaactaggattttacctcaaggatcacactaacttttatgcaagtgagagattaatggaattattccttaaaagcaagtaattaattgataatatattacagaatatatgaaatacaattataagataaacgaatactttaattatagaagtataattaataaatatctaaaaattcccaattcatacggagaatgtgaaattttataaggatgtgcaagagcattaagattatatgatatgaataaaactagtcagtagtatattaaagtaaaaagaatctttaatatggaactaatatgtatagtctgctatacaatatacttcttatgtgtataatttagattcagatcacatatgtggatagacatgtaataaaggcactgtgtataataaacgtgtcaatggtcaagtcacttggatgaccccaatcatcacttatcttataaattggtaaactccctgacaacaatctagaaaccaaaagatcatggtatcgagcagctccatatgttatctatgacgacaaactatatcacataagttttaatcaaccactcttaaagtgcatcgatggtgatcaatacgactacatcctctgagaggtgcatggaggaataagcagtattcacactgatttcctcaattcccagagcatgtttgagaatccttggcacctgcagctaccgtggataatttctgccagtcacgctcatcgtcccctcctaggtaatcatctaactgacaacctcacagtacacagatatttaggaaaaaatgcatgcattacaagtagagattgcaggaagagatcaggttcaagcatgacatccaccacgagtcccaaactgacatcgcgtgataatcaagtaactaatgatactaggcatcatagtaaacgttctaacatgactcataattacagggaatgttcatatgataatgaccacaatggactcgacctaaatcaaccaatttgtgaccttatacatggtagaggtccaaatattcccaacacaaatagaaatcatagttagagggtggagagacccaaagaagaggaaaatcctaaaggtcacaacctacgtggtcgtgcacaacttctaactgagataaacgacgtagagcctcattcctcttcctttagaactaatagtcattccctcagtgtttacaccacggtaggagcggtgttcacaagactaggaagaaggtaccacgtgcagagaggtgacctgcgagattgcctttgtaacaccctaactaacataggcgtattacgtgatt

SEQ ID NO: 301279 - DNA, 4629 bp, Cannabis indica
gtatatgctatattacatacactatatatatagtctaacaccatcatccattgatatgagaagattggctgagcatgctatgatagcgaatgttgttgtgaggatccacccatatcaaccaaactagaaaagaaaactgaaggatgttgttgcgaaattcctctgtacatgtatggatgtgtgtacgatggtccatacatgtagggttaaggtggtggagggtgcgatggttgtgactgaggttgcgagattggttatactggatgctgatattatgatggcaaagatgtatgcatgtcagctatgtcgtcaaatgatgataatgtgtaggtgaaccttgagacatgtgagtctaagacggttgaggtgttgtagttgatctttgtactattggggccctacattccaatttttgaaatgtgtaggacacttagcactaatataatcgctcaaaatatgtgggaaagttgcatgctctactcccactatcttttgtgtaattagatagtagactaatgacagtggtgcttttgtctcccttcttcttttctccaatcgttcacgaatagattgacaactaccctttctcttggagtcttctcttttgaataagaaaaaaaaactttaattaacatatattttttttaatttctaaaatattagtataaatataaattaccagagtcatcctcacacatagtaggaattctagaaggatcgttgggatcttacctgctaccatctccaccatggtaagaagctacatgatctgctgatattttgatactaaatacaaaaaaattgttaaaaatatttatgaatcaattacactgaaacaataccaccgaatgtgcaccagtaaatgacacatgaaatatttcttcaagctcaccataataattaaaaccttttgtgccaagcacacacactccactattttgagtgattcgaattttttctcagtcttttgtaataaatctagtcccgtttattacatactcttgataagaataggtaacaagatctgatccagatgctaaagctagcaattcctcactatgatgacctaaagctctgatcttgtgcaactcatagatctaaattgggataacaaaaattaacaaatcaaattcaaatcataatcagtaagtgattacgaatgaggataccttatcataaaaccacaatggggactcttatttctgtaaagtcttatgatctgcattaggatccttttgtttgatgacaccaaggtgttccccatcatttgtttgtgttagaatttagcttgtatagaattataaataatgagagaaaaaattaattgacttacttcatataaggttcaattttagtagaattcaaaagtatgaaccattcaattatcttcctcttgtgctcgttcattgtagataaagtttctttactaagtggacgatattaggattaaaacacaaataagtgtcctggaacatactgtgtatcttcattgcaattggggcaattaaagtttgttgtgatgctttaaaatacaacgaacaaaacgttaaagcctcattagtaacttatccttctgctatggacccatcaggaggagctttgtttctaacatacccttacaattttgtcatgtacctctagaaatggtacatccacctcataaataccggtccacccattatagcctcacatggcaaatgtaacaccaaataaatcataatgtcaaaaaaagctggggaaaaaattaattctatcgtttacaatattgagatgagtttttttttcgctttttccatatcttttacatttattatcctcgaacataattctctaaagaaatggcatatctccgttatgaaatctcctgtattttttggtattaatctgcaaacaccaagtgaaagtaattgtttattatatgacagtcatgggacttcaacccatatatattgttgtcattctcgcttaccttcttcttcaagttagaacaaaagtcaactgggagttttgcttcttttataaattaataaaattgtggcttttcttcagaacctagcacgtaggagcatgtgacttcattaatcttttattctcatcttcataaatccacaacactccctaatacccatcttcttgagatcatatctagcattatcagtatctttagaattttcattatccaagatggtgtcgaggaggctgccacacacattcttctcaatatgcatgacatctaggttgtgttttaacttgagtgtactctagtactcaagtttgtaaagaggctttttttctcaagttactttcactgccacttttttcgtttcaataacccaaaattttcatgttttcttgggacctgaggtggtagagcatttacttgttctaaaatctacttacatgtaaactttctcaaggcacgtcaatcttcaactttaccatcaaagtacaagtcctgcctcatctcatgattatggggcaagaatcgtctatgaccaacataagatgtcttcccaataacgcgaatggaagatgtgtcttcattacatgtaggacaagctttatacccctgaccactccatctagacaaactactgtgagtagggaaatcgttcaatctccttagaaaggcagctctcatgttggagatagtattcgtattgttatctcttgtttaaaccccattaatgcacaactatttcaacctatctaccaatggtctaagaaatacattgatgtccttacctggtgatcttgacctatataaaattattatctttcatacaacgccatgagggagattgtagtttgccaacacagcaggccacatgttgtacgattgactcgaatttctaaaaggattaaatccatcagtagccaagcctaaatatatatttctatgatctttcataaaattgggatatctagcgtcaaactccctccatgtagacccatccacagggtgatgcataactctaactttttctaatatcctagtgtgatgacatatcatatctttcgctgtataaattgagctatacattcttttcaaacgaggaactcaatggaaaataatgcatcaccgtatgtagaaccttttgtccttgggtattaggattaatccatctgctacttccacataccaaacataaatctttcaaagcatactctttgtaaaataaacaacaatcataatgttgacttcacttttagccaacaacagtgagtcaagttaaagcgattaagaataattaagcaataaatatgaattgagattaagtataaaaaaataccagaattataaaggtttgtccccttgatgataataatagcctactcctctttagttgtatttacttgagagtagagaagcaagaaggccttgatctctctcgaaaagctcttacaataatttctgagtattttacttttaaatctagatttctctcgtgtgttctctcataataaatttcttatccttgaatagtgagatgattccactatttatagggattaattatatcaattagttttttaaaactaataagcaataaaataaggaaagtatttactttctataatgacaatgagctaggaaactaggtggtgttgtggtgggattttcgaaccaaaatttttaaatcaaattagttgcattagtttgagtatacccaaatttacaagaaaattaaaattcttggaagataaactcaaaggttcacatttcttgggttcttggatcagatatgtgcattcctttgtatcttttgtatgtttatatatacatatttgaaaattttgaatctatttttttgcatttttctaagttttatgcatttttttgttaaaagattcaatgttatttcgataatcactcaataaatgcttgttagggaggttagggatcatatttttttgattcatattcatgaatatatcaaattttcccatgttcaccgaaaatgtatcgaatcttatctaaatcacataaaaaaattgtaaacatataaaataaaataacactgctatcaaaagcgcatcgagaacctatcgataatgcaatttgactaatcctatgaaactctatcaaaattctatcttttagatgggatttcatctttaattgattttcaatgctttttcgatagaatttatctgatttctttcaaattgtatttttgattagctttttgaggaccatggcgtataaactacattatcttctgtagaagagagtcatcataggacacattgtacaagaggtagagggaggttggttcattccagttagggtgacattattcaaatcgtggtggatctctttcatgtaggaaactttgggtatgggggttggtccatttaggttggggtggagctcagtcgtgcaggccaactttgggtatatatgaggattgtttcgtttaggacagggtggcgtcattcaagtcatggtggagctcagtcgtcgaggaaacttgggtcttaatctgggctcctccatgtgtctcctctattcctctaggtgttttttattaggatgtgtgtgtgtgtgtgtgtgtgagagagagagagagagagagagagagagagtagagagagagagagtagagagtagagtagtagtagtag

SEQ ID NO: 301280 - DNA, 2075 bp, Cannabis indica
aataaaaataaaatttaaaaatgtactcacagtcgccgagcttgttggggacagtaagggaagctttgacgcaaatttcgagaggggtcgggggagcagaggcggacattgagatggagaggggcctgttggttcgatggcatgaactggtggtggagaatacgacgccgtttcgaacaggtcggaggcagtggtgcttgattgtggaggagagcatagcacaagccgtgggttggagtctagcgcttgacatcttcggtttcttagttacttaatttttatttttctcttattttgagagagaatgatgaggtggtataatataatatttattgtatgcaagtgaggtgcgtttttcttacctttctcatcctttactcaaccactcataaatcaacacgtggcacacgaaactcacgaattcaacttcttcaaggccaagccaaggcttttatttaaaaaagataaagaaaaaaaaatcatatcatgacagcagtatgctttttaagtttattgagaaactagtaaatatacttaacttctttggttaaatctgcagtatgggtcctacctttggatgaacattctttggccaagggagttattagaaagaaggtgctcgataactcattggtgatgtcgtgatggtagttctgggaacatcaagaataatgtttggatctaaagaaagatgtaactacttactccttttacggcatttgaataatgtcacaaataaaggtgaaaaggtggcgtattactggcacaaatatgcaccaacataccttacctgcgcaattaaatatggcaggaaatagatatatcaacgctcatttgcgccgacaaaactcttacctgccatattttattattggttggattagttttgtcgacgcaaataaaaccttttttttaaaaaaaatgataatttacaataaatattataattatttttaaatattaaattatatttgaaaaaaacataattaaataaaaaagcagtattgacatatataattaaatagtatctagatcgaactattataaaaagatgttcgagttgaaaagttagcaactaaacaaaagtgctaaagtaaaatattaaaagaagttctaaaaaaaaaagtcctaaagttaattataaaatatttatggtcctacagacgggcaatgtcattgttgttgttgttctgagtctcgggacaacatgatgatgatctagcaccaggaggagtggggaatggtagaagtggatccatagcaggcaagttgaaatcaggaacaacacaagaaagtactcaaactaatcttggaatcgcttccggtagacttgctgtgtttcatatggctacttcgaatactgaatttcatgttgtgcctcctacacctgtagttgtaaggcctcatactgttccatagtaacaaattgcgagttagcagcagaagacgtggcaggtgctcttttggctctaactgccttctatcttaggagatggccaaagcctcttagatgtcgagatcgctcacccaatacttgcgtcataacaggcaagtttcatgggtactgggtgggatctatataatcataagcttgctgatcatcagtgggcgctggttgatttgcagccacttcaaccattttctcatacaaaactactgagatgttttgtccaagagatcatgtcccatgccctctaaaatcacttgaaatgtaatgatcgcttgactttatatgggaattagtagatatttgaggatttatttaatttatttatcattatatgcctcttagaagataactagtgtttatttttagaaatgggctttagattattattgttatccctgttcccgaatgggttctacacgagagtagcaaaagggagccacgtcagatcgtatgggaatattttggattccccttttcttaagataggatcagggaaggcttccgaatatttgggagagtgggtctattgtgaagaaggaatcagtccttgaagttgtaacctaacgctttcggtattcagaagtgttaaccgaggttttcggcaaccaatataataatagtaatt

SEQ ID NO: 301281 - DNA, 1046 bp, Cannabis indica
accctaatcctataagaaggaagggtttagtttcgcatcggctctttcagccagagctgccataacgttcgcgcctcccactacctctgcgcttcagcaaaattcaatctctgcgaggttagctgatctcaatcaacaatggcggacaaggcagtcactattcgcaccaggaagttcatgacaaacagacttctgtcaaggaagcaattcgtaagtatcgattaaacttttcatctttcttttcggaaactggctaaaattttaatcctttactactgcttcgttagtgcccaatgtagtggaatgacaaggttttgactttagactgaatgttttcccttcaatttcttcatgaagagacagatatagtgatattgtaatttctatcagtcgtttagttatcccggactgtttagtaacaagggttttgtaaatagtaatcagatctatgtttggatatgctttatatgggtataattatggttagcgagagtgtcagattgatgatttttctgtcattctatcataaaataaatgaatgatttatcttactgctgtaaatttgcataagcatatagtttttttaacgtattaaattactattattttggtaccttaatattgttgttgtttgattatcataggtcattgatgttcttcacccaggaagagctaatgtctccaaggtataatttttttcttcgtgtcatgtataattataagagaattgtcaggttacgacttcataattttgtttaaatgtagttgattttttttttacatatctctttgttctataggctgagctgaaggagaaattagcaaggatgtatgaagtgaaggacccaaattcaattttcgtattcaagttccgcactcactttggtggtgggaaatctactggatttggtttgatctatgattcagtagagaatgcaaagaaattcgagccaaagtacaggcttgtcagggtatgtttaacacttatcttttatttgttaatgcatgtatttcacttgagattcaaccatgcttaactctttaag

SEQ ID NO: 301282 - DNA, 4548 bp, Cannabis indica
ttttttttaatgcaagcataaaaataagaagtgttttcatcacctttttgcagccaattgaccttgcttctttgcttaagaaagctatgcaacattttatctctttcactaaactcctcagctgctgccctttcagcctccaacaagatcaggttcccaggatcggtttgagcttgtaatctcagagccaaatacttctctttagcctgctggtaggtaacctcaacatctcctactgccttattaaatttcctaagaacatgcttcagccgcaaacattttagatgaatagcttgtaacccaatagctttaaccggttttccccaactttccataaccaccttaacaaaattttcattatcagtccagtggttgtaaaatctaaaaggttttacaccaatgtcttgagtaagagcagaagcaactacacaagagcaatgatcaaaagaagtctcccaattcatattaacataagagttgggaaacaaatctaaccattcttcattcttaaaggcatgatcaattctggaataaattctatctccccccccccttgattattggtccatgtgaaatgagagccagttttcctcaaagcatcggccaaacccaaggctaaccaatcattagcatcttctatttcagttcttgttacctgattccctccacttcgatctccaaaatccatcacagcattaaaatctcccattattatccaaggtttggacataatagaaaggtttgccaagctactccacaaatccttccgatcttctccattattagcaccataaacaaaagtagctaaaaaatcaaactcatggcatgccattttgacttgacaatgaaccagttgagatgtttcctctaaaatctttacctaaacataatccttcttccaaacaaccaaaattctcccttcaatgattggactagagtaaaagttccaaccaatgaatttatttagcatagtttcaatcactttagagcctctcattttagtttcaatgattgcccctaaaccaactttctttattcgacataaatcaatcacagcctcctgcttcttattactattgaagcccctaatgttccaactcattatattgcagctatccattagcaatcttctcttgagtaattgccattttgtcaccatcttgctgcccttgcagaatatcaaatgaattacaccctttctcatcagcatcaactcttctcacctctatgttccttttctggttgctgtcctcttaggagttttccaattatccaacccatctccttgagtcacctgagttacctcacccgattttgaagtcacacccttgcttgattcttctttttcattattctgctcagtaggagtagctagattcaatacagtttcagtcttggcaacttctttctggtttgaattaatccccttcttcccatcttcattaatcttcttctttctacaacctgccccgaaatgaccatatccacgacagcagttgcattgaaccggaagccattcatactctaccggctgctctatcaatcgtccatgctcattcaagaactctatcactcttgggggcttattcgagatatccatttcgaccaacactctagcaaattttaccatggacctctccttggtaattttgtctgtcataattggcttccctaaggtgctcacaatggcacttagactctttgtacgccagtaatgcaacccaaggtctggtaatcggatccaaagaggaaccgatttaactggatttatggttgttaagtctgtcgaccaagggcgaattataactggttttttgtcaaattggagaacaccctcctccaaaaccaagtcacgagtcactgtatcgttaaatttcacaatagtaaagccaccattcattctcacaatctgttgaatgcccagatatccccatttacgtgttaggaaaccctcaaaaactgcaaatgggggagttagcccctaggaccatacacacaactgccgtattccatattgccgcttggacattcacctcttccaaatcaacctgtgcgattcttttcccatttttaagcatgggttcagtatatgttagcttaggttcagagaacgagagcttatcttctgtaaattgcttccatttttgctgagaactctcacgcagttcgtccttctcaacctcatctgcccagaatccaggagtctcgttcttctcctcaacagccgtctgaacgaatgagtcttggattgaagggggttctgaaagatcaaccttgatggcaggctttcgtcccaccctcttctttttcgccatggaaaaggagagttgttacgcacgccttaggagagttgtaacatttccatattgtatatatagtttttaatttcttagatctttctcgagtttctttcattaatttcatcacatagatttgttccaatctcttgattttgttttgcaatcataatccaaaatccaaatggtggttgcacttgcacaattaagccatgcttgcatgtataactaacctaaaacaatgcttacaaatctaatcataatgaggacacactactactaaaaaaggaagctaaaacattaaaaatagcgagatttgtcctttagtagtaaccgaagccatatagaaacgtgatggctatggcttcggttatcactaactaaccgaagttaaagggttttataatcctataacatggcttgacattttttttcttcattctcttctcagcaaatctgcaacggaaaacccaaaacccaaaacccaaaacccatcaccccaacctccatttttagctatttctatttataattttttgtttcaaaatctctcattttcacaactcaaaatcacatgtcggcattggaacaatttcttttagtgttttagtataccttcgacgattttgtgtgtttctttaactccagcagttttgtggttgatttggttgtcttttttttagcttgcattattgaggtataaattatgtgtacatatatatatatatatatttaagttacattgtattatctttgtattttttaattttctttgtttgtttgtgagttagggattttgttgttggtggagcttcgtcgacggtagtcgaagcacggcagtgatggcccattttaagtaagtataacagattttatgtttactacgaaaataaaagtttagaaatttgtttatataaatttagtgatatgtatgtataatatatgttgacggaaagaattcatcaacaaagctatgattggaaaccttggactaacttgttgattagcttagatatacatatatataaagagagaaagattagagattaagtaaaagacccatatctaaaatctgaaatgaatgttgtagtttgtattcaaacaatagtctctctatacacaaggttccaaccccttctttaatagagtgaatggtaattatagttgggctttagtagtcttgtttacaaactgaactgtaagtggttcctattgggaccatgtactattatgatgataggttgtagtgggatggagacattgttagtcgggtgtcaggtggtactgacatgagtacacacccattacttgtactcaatgtatgtcgacccttgtacatccactactttgtatcagttttttcatgtgtcatgcctgagataactaacccatctttgcttgagcatgccttctatgtcccctagagattccttatttagtgagactcaaagacttggttgagtccttaagttgttggatgggttatcattacttgaagtcactttacgatgagagacggaagagcatagcttcttctcgactgaaggggagtggtggaagtaggctctaacgagacccttggcttgctaagtcaaaatgatgcggtacgggagtagcgaggtccctcatttggcttgagggctagcggggcagcacgaaaaaggacaagaccttcgacttgctggatcagaatagcactaaagagggtcagcagagacccttatcttgttggggttgagcgacacagaagggtcagtgagaccctcgtctccctagggcgacgcaacctagtaggatccgcgagacccttatctcgtgagggtggcatgacatggaacggtcagcgagaaccttatctcacgagactcccccattctcatgcctcttccctcatttcctttctctcattctgttatgaagtcgatattcttccttgtaggagtctctttaagagtgtagaaacatgtgattttgtatgctcgaccccactccatcccatcatatgatataaagatttcaaggaagtcaaaattctatatctgttcgaaattaactagaagaggtaattccatacgtagttacagtaatctttaaaataatccttcaatgggatgatgaccccaacatgaatatgctctacactccaagctccaatcctgtaggaaccactcatactacattaagagtaagtattgaatgttggaaattattttaccaggatctagatttactaatatgaattctaaaacaa

SEQ ID NO: 301283 - DNA, 3361 bp, Cannabis indica
agtagcagtataacaccaagaaaaaaggcaccagtaatacttttttgtaattctctataactttatataataatgtttatgaaatatcgctgaacaatcgcaaggcaccgtgttatatatatgaactttttttttttttcaattgaacttaatttaagttttaattctacatttattttgtaagaaaatatatagcattaataaactagattatatctatcaccattattttgtaattatttaagtaaatattcaatttcaatatatttacatagtataactcaaataataggataaataatatttagaaagctataaatcactaactaattttataattagtcaatgttagatcctaactatcatttaaagttgctatttagaatttttattccccaaactattaccgctactaaattgttccaatggtcgaaattacattcatggtcctaaatagcctgagaacacaacacaaagctcacaagttttttttgtgtaaaaggaaatcataaatttataagtgagaaaatatgacaagatttggtgtctttccattgtaacaatatacatgttgaaactaacaaccgaaacacatgaattaaactaatagagaagctgtctgaacaaccataccgtatttcgcttctttgagtttataggaaccttagattagaagatgaagtcactaagctgagtagattcatgtttcctttgagtgttccgattcacaatataagcattgtcttcaatgcctgcgttcaagcaattcatcctgtgcctgttttaccgtcacaaacaatcatcaaacatagttaataatctcttgtttatgcctaactgcaccaaaatcctacaacaactcaccattcaaagtggtcttcgcagcatatagaaccccaaatcatcgacaacccagaacctttcctgaaatacagttgggatttatgtcaattatgaagtgaaaatgttgatcaattatgaagttaataacaactcttaaaatgtatcccatatcataccaagttgcagtgtacatgtcgtagaacttatcaaaggctttatcgaaacaatagtggcaaactaaaagctcgttgatgtctgtaaccttgcatgttgatttgcagcatttcacctagacgaattagataactaaattagataaggattcaattcaatcagtttcgttgttgtttcttttaaactcgtgaagagtaaatacttactagacgcctgagcttatgggaataaatttgtcgatgagatgtttgtttctttatatgctcgttcaaatgacctgcactggaaattagctttataagtaataaattgctgaggtaatgttttgagtttatctgctacagtaagagatatggcatcattctcccaatctgttaaaagggaatattgttgcttactcgtcacaaaaaacagtattacaaccgaggcatgtcgccaaacttattgagctgcagcatgagctacacttagcagaagacaattttctgcctatctgatgacatctgcagataaaaggtttaaaaaaagcgaagcaattttgagtaaactttgattcaaagtttggagaattgaagaattatagttaatatttgacggctaatttaaagggagcggtaacacaccttttgtacaattcagcaagatctctggaaagggaactggttttgtttttcccttgtaatgtctacattaaaggccaaacaaggtaaggaatgaatgaacttaagagcaggtttcatttttctgataaatgcgtaaagaattacaaacctcgttagatttcataaccagacagtcttcagcaaggtgtccaggtctttgacatttccaactaacaaaacattttcagagtttcagatgcaaataatcaggctgtgcttcaaagacgaaaaattctcagccattcataaaagagaagtttgacaagaactttggataattgactcataaatacagcactcataagcataccattcataagtacaaaggttagattttttactggaccaacgattccgattgaaatcccatgtgtcctcttcgatctcagacacgggtaagctaagtttaagttcggatgagacagcatcagctctttgggtcctcaaaggttcctaatgtagttatttgaaggcttcagaactatgaaagcagtatattttgattgctaaagttgaatttgtgcattgattacctttgtaacgttactgaattctaaaagctcgcgtttgcactccatgctacagacatcgtcatcggtctatcaaaaagtaccaacaccattgaaggattatcaaacttaatgaaatagaaaacagaattatggaaaacttcaaactacacacaggtctttaaatttctacctcattgcatatatattctccgaatttaccacagattacacaaacaggttctccagctaaaggaaaacgttgttcacttctgctctttactcgatcaagttcattttcataacctaaaaggtcaacattaaagagttgccataaacataatcatactatttcaatctcataatggaattcatcaactatctcagattttcatactcatactagaacaatctaataaactttacttcatttgtgcaaaagaaaattaataatatcaggacactaaccagaatttagtgaatcttgtttttcttcacattctgaagaactactttcatcacctaaattatcatacaaaataactcaaattaagttaataaagcatgaaaatgaaaaccatagattacaattacatcaaatttcatgaatttgaaccattcaaattgcagaaaaacttactgccatatgctaccaaattcacaagagcagaagtagaagttccctgaaacaaagagaaattaagaagaacaaaacaaaatcaatacttggaacaaacccattaagaaagaaacaagccaattcaaagataatatctcaattaccagaacatcagcagataattcttcataagattttgaagaacaagcttctttcctgctcacaccaatatcaaacatatttcaatcaaaactgttactttttttcctttaaagaaaagagattaattaccttatcttctggatataatcatggtgagacataggtccattttcatcttcagctttttccaaagaagatagtttaggttgagagtggcgttttcgtttttgttggcgtttgttattgggttgatgatgttgatcttcatcttcatgtagcttttctacgattgatggagcagcaccagttgcagcgttgtaagctgaatcagaccaaaattagcgaaaactgaaaactcaatgatacttcaatggagagagagagagagagag

SEQ ID NO: 301284 - DNA, 3282 bp, Cannabis indica
tctgcatctaaatatttctgtgttccctatcttaatgggaatggaagaagaaaaataaaaatcccatcaggacacatgtatgaaaataaggcaaatatatcattaaaaaagaaagggaccaggtattgtggcaccacacatttatggacacgtgataatcacataaagaaataaaaatgagccaattttataatgtatgatataatactctaaagttgatttgaataaatttataaaatacaatataatgtttaccttttagttaagccaagatttggaatatccaatggaagttagaacatcttaatatgccattatttcttgagttagatgaggtgagtgagctaagcagtgatgtgaagcccaactaccaatctcaccatttcattatgtactattcttttaaattatttatcatttttgttttccaaatgcccattttgaaatgattcctagtatattctgcgaactgggtttttttaaacatttgcctagcatgccaatagcaacgtattttactattattgtgctaaaaaaaatacaaaaatcaatctaaccaactgcatattctaattgtagtattctataatgcaaaattatatatgatgatattaaacatgacactgtagtctgtctgtgtaggagctataatatatatactttttaaataataatataataatataaggagttatagtgtgaaaacatttacctttgtgtgttttaaatcaacacataaatagtgtgcgaattggaaagaaccttaaagaacagtaaaatgtcggcaattactatgaaaactggctatattattatttatttgccagtaatggcatttaaattttaaagtaaaagaccactacactgtccagtctgtcactacacaagaagtattatttttctaaactcattttcccccaaataattcatcttatgattattactcacccactttcccaccttacttaataatccttatactgaggaaatgcgattcacgttggaatatataaaaataaatataaataattatttatattcataattatattttcatgctaaacaaacacttttgcttaaagtgggagcgtcatggagtaatatcatgattatattaggggatagtgggtctgctttttccaaatcaggccaaattgctccataatgaataaacatcaccattattgttaccaataatacacttaaaaataataaaaccaatcatcataacctggacattttattaaaacatacatttagttcaaacttttatgtatgtatgtatgaaataacatacactttcatttttcttttttaccaagtaaaaaaaaaattatttacacgcacaaaatttccaccaaaaaagaacaagtttctcaaccaaagaaaaaaaaagacaaatatatcaaacacttgtgctatcttacagtggatgcaattgaatgagcccaaaacttgagctgatctttcatgtcgatttcattaccagtttcaggtaacttccaattcttcaatggagatttcttcgttcttttaatatccaaaacatcccaagcttcagataaataaggcctcgaaaccaaattcgcttgatcgtgaatattactattactattattattatcgtgatcttttcctctgttataattttgtccaacaacatcactctgttttttctctgcaaatctttgtaagccagggataatagaaaccagcttcgaatctctacactcctcctctgtaaaaacaaaacccagatccataaaccctttaagctcctcaaattcaaggtcagacaagcttttactactgctcccatgttttttcatcctactccttcttttgttgactttcttgttgaccgcagctactaaatcttcttgtttctcagtactagtagtgctgtaattacttccttcctcttctaaaaagtctctcacttcttttcccgaaataatggtttgaagctttggtgcgtggagattaagaactgagctaggagagaactgagaatcagagaagatactccctttggatgatgagtactccaaaagatgctcgctttgtgaccttacattcagatggtttacaaatggagaaaatgaaagatggtgttgatgatgttcatgttcatggtcttgtgaggataaagtttgttcttcttgattatgttcatgatcaaaatcttcagttgggtttgtttttgaagtactgaaacacgaggaggatctaattccaaaccagtatgaatcaaagaggtttagtacttcatctgcagccattttttttactttctattttttggttagactgagaaaatttgagaagatatgcactagaaactactcgtctaaaattagatagatagggttgtggtgctctgtgccactttgtagataagaatgatttatatgaagtttgtcattactaatatattggctacttgtcataattgcccctcatattaggcctatattacacatttaggatatattttccacgtttactccgatgtggaattttgttgatattcatttagttttactcgtttctttaatctcaaaatgtgacaaaaaagataaattgacaactggcaaatgggaaatggtcaataagaatagtgacgtgttcgtattactatttttgtagttttctttttaaactatgattaaattagctttgattatagtaatactaaacttttatttaaactaaaatgtgattcagattgtgaataagtgattagtaactcatattatattggtgttttcacctaatctaatacagaactggtatgtgtggtcgtatagagggattgatttgaggtagtctctagtcaaagcactatatattagactttattatatatattttgaaaactgctaaatttgacaaatgaacgataatagagcactattatcaaaaactcagcgcaaaatgacaattatcatacatttgcaattattattttttgttctttcaattaggcatgccaataatgtgtaaaatttcaccatgaagatgggacgatgttagatttgtccttatataatgaaaaatgctaaggggtaattgcaccggtgccaaacttaacaaaacatatatagagctcttacataataagtcaaatttcttgtataaatagagagaggagtgttaattacaattttttagttaatttttacgtttaaaattatatattagaataaattttggagttttttattgttatacttcaaaatagttttttttattatttttacggaattctacataaaaact

SEQ ID NO: 301285 - DNA, 2277 bp, Cannabis indica
taggtagttttaccaccaaaattttagattaaggaattagttgcaaaaacttatccactttaggaggttttgccgcaaataacccttatatttatgcatagatcaatatgggtttatgattatgtcattctcatcatccactattcaccaagccagttgtatccagcgtggatccaagtggctcagctgcccatctacgtctcaggggtaaaaccgtccagaaacaaaaagtatttgatgacatcataattaattccaaagattactatttatttaattattttctatataaaatgattctgtaaattaagacagaaggaacagccgtgaatcttcaacaacaaccacccaccatagccataccacaggtcattcatctctcttccatttctccctccttcaattataattattattattcttattacattgtccaatttaatctgattacagaaatttgatgttgaagatgggtaaaatcaatatatatatataatataaatattaagctttgtttgggtcttttgactatggtctccgtaagactctggtttccaaagttttctttttatttatttaattttgttatgaaaaacccagaataccctataaagcttagagggttcagattgaatttgattgagatctaatcaaagatggtcaaaaatgtttcttggatttttatgtaataaggttgatttgaaatgcaggaatagtcagtcttgtttgacattttatggatatcagaacacattgtgaggatgagatttcagaggatgtaacaagagaattgctcattgcaatttcttactctttacctgaaaaaaaggctttggatttgaccaaatcatctgattcattcaatgccgtagaaggtgtcgccatgtttaatggcgatttaatcgattattatcggtctgaactgatttccatttccaattcggaatctggtgatgtttaaaatctgagtactaaacagattgggattccatcaactttttcaattcagaaatcataatgtaatatagacaattcttcttcactattatttggagatgtattataaattactttaaatttcttgctttcttcatgtcaagaaagctttggaggaagttgaatctaattaccatggttgaggattcaaacaccttcatctgtacatattgtatacattatatcatactgtatatatatatatatattttgatgaatattatattgtaattgttgtatattgtgtgccttatattgggttgttttgttgttcttaaatagttgtacaatttagtgtacaaaattcaggtggagtatagagttttgaaattgtgatttccttaaatgctaaattgatctttaagattacaccaaacaaatttactttgaattatttgatcagaaaagtatttgtataaggactcaaaaattatttaaataaatactctaaatacatcagaacttatcttaattttaagtgacaattcagattattagatgatgagacgatataaattattgcaggttaggattatgaaagataaatgcaagtcaaaattggatcgaatccaaataacacgattattatttggttaaattaaggtaatgcatgtgatacgaaatcaacagctaatttatatccaatatattatttaaattattaatttatatttaatcattatttatttatatagaaaaatatataaattagaaagaaaattgcttattgatataaaaaaattttactcattgtattattaatttctgataaattattttaattaatcaatattatccctacaagaaaaattaatattatttaattgtaacttcatatatatttttgtttagtatgttatttaaatgagtaaaaaaattgatataattaaaaatatatataaaaattaaatataagataccaaccatgttaatcgatatgtattgtaatataaggatagtttacatataaacacaacacgagaacccaagtcgggttaatattgaaattttttaatacgaaatatatatgggtcaggttaggattaactaattaaacatatcaacttatataatacgaacacaaatataatacggcaatacgaattgctactcctatatacaaataggctttagggacccagacctgacttataaaaaccctaccatatcaaccaacggtgataggctattatcaggcttagccctaagctaagacgggctaggcccatgtctagggcccatctaaatttagggcccaaaacttttatatagtatactttt

SEQ ID NO: 301286 - DNA, 2524 bp, Cannabis indica
acatgcaaaggggtttaaaggggtcaactgaaatatcacaattgtatgagccaatgtctgttccaaataattcagcaacagcctcatctgttgagtctgcttgagtattgctcccctgcatttggtcagagttgggacaagcatcctctttttcgctaacaccattaatgtaattctgtcgatttccagccagccactccattagagtcgatggtgtaataactttcatattagcaaaagcacttctgaagatgttagaacttgtaatcgatatacaagaagaatcttctttgttgtaaaatctgttatcctctgcattagtatgagaatgagagatcaaacaattatcttcattgcagtgttcaagttgaatatcaggtgcgtcggagttaattctctccaatctaccagggcctaaaaaggaagaaacgagaagaaaaataaaggcacttccactgtacaaacagaagagtaagatttttattgacattcaaattagcacttcaaaaagcaacaatctccacaaggcaaaaaattgaattgctaatacgatgtaaactctttctttttaacaacaattttatttgtcatcatacatatatcaagataaatgtgaaatgcactctcttttacactcttacttaaatatttgacacatggccaatactactcattttacaacgtttttaaaatatgaaatatttgagatgtccacttgttaagcattaatgcattagagtgcaaaaagaaaaaaccaaatggaaatctaaaaggaagtgacctccataatcagattgttcaccttcttctgcatcagggtatggaaaagtctgtaaacttgtttgggttttttcactgttgacatcattttcagttccctgttcgatagtaaggggaatattattacatgaaccactgttctttgacaaattttttgcccctaaccttgcaaaaagttcagatctcaatgtttcttcaagtagaaaagattccctcgagctatcagttgacggttttctaccaggtttcatatttacatccttctccaaatcaccactactgttgttttttgtaaaacacccaaagctagatttgacattttcacgttcaaatgaaaatgactcatcgtcttcatcaatatttggatcattagaagaagatcggaccccatcagcagctgctttgcccatacagcacaatggctcagatgtactagcatctggttcactgcccagttctgaccccaaatgttgtccactcacatgcctatctgatgtttgagctggaagaatgttgatataactgaagttggagccaactcctagtggattaacaccatcatatttgagtaagtgatttcttggtggtaacagaagcatattttcagacacatctttcgagtaacctgacccaattccaactttctcattctgtcttgaggagcctaataaatctgaactgtccatgataaatgatcgcaagtgggaagagtacaattctcttttgcgatacagatcagaacatctagcattagcctcaaccagatccctttgagctttacgataagctttgagagcatttctttcttcaatttcacatctatgtctaagctcttgagcttcctcaagatctttgtctattgattcctccatttcaaccaatgactgcacatttattctgttacgttctgacacatttgcattacttgaacaattccaaaagttttcattatttaaagatgcctacaacattcaggaagaagaattattatgaaaaataatataattgggaaggaataacattgagagatgccatgtggctagagtcaaagttttgccttaagggaataggaatgcttgatgtatttttctgtattaagttttgtactgttttgtcagttttatggcctctaacttgcaatcaagacctggaaacaaacctgaatgttatcattgaatgcaggctcaagtatcttgtcaccggatgagatgtgaggatggttgtcaatcacaagattttttcccaccgtttctttgttaaagaaagtactttgttgctgatgaggaacaatttttcttggattcaactccacactgttctgcaaaaatttaaaggaaaaataaaagtaaaattcagtgattaagttctcataatatcataccatatttcacaataattcaaagatctgccaaaaatatcttgggagaaaaagaacacccactgagaatagataaatgttatgaagaagtaacaagaagaagcacagagaatattcaaaatgctattcatacaaattgataatatctattactttccatatgaggtattgagcaaaatcagcagcttctaaccactcatgcagtaaaccctagaaccatagaaataattttggtggtacttccataaagaagcacatttaagctttactgagatcgtcaaaaagtgaccacatgaaggtgcttaaacagggaaaagaaggctaagtcttactaagttctttgggataacattagaaatcttattc

SEQ ID NO: 301287 - DNA, 3157 bp, Cannabis indica
aatataataaaatctagtatattagtatatgaacatgtaagtaatttttgcttgaagcgtactcacttaatgattaagtcttaataaagataaaataaataaaacagtgtttacttgaaattaaaatatttttattggaaggatttttttttttttgagaataaacttgtgcttcatttgataaacaataagtacaaagcaatcaagttacatggaaagtagagaatcattccaaactaactcattatctagtcataaacctaacttaacaaccttatgagccaaaacatttaaatccctactaacatgactaacagttaagttaggactgaactataacaagttcttagagaactattattctaggtacaagatttaagtttatccaatggttttacaatttgttttaagaacatccacaggaagatgaaacatttgaacccattgaatgtcataaagaactgcctttgcttcaaccatagagaaacttgcttcaacctgattcaatccattcaaaacaacaaccccaatactatgcttcttgttttgatgatcgatggctgcatcggtataaacctgaaaattatccttaaaagaatttggtgttggcctggtatgcacaggagtagaaatatttgactgattatgctgttgttgtgcatccagatacttaaagaaaaagctaaaacaccaatcaaaaatatcattagcaggcatagcattatgtctgtaaaagatattgtttctctgattttaaagagcccacaattaacagtataaaatacaaacataatctctgtcaaagcatcggtcatactcattaaaaacatatgagtatcaaggtgtttatatttataataataagtcacaaaccttgaagatttccaaactttcctcgatctagagcaatccaacaaagcatgctgtatagtttcggggcaaagcttgcaaatgggacaaataggagagtcaataacatgtttttgaaaaaggaaggaggcaacaggaacaacattcgaaacaactctccaaacaaaatgttttatttttgggggaactttagaattccaaatcttactccagaatttcttagaatcattaaaagatgaagaagtgggaatatcttgagtagagagagccaaatggtaggcaaacataacactaaaagaccagaactctccctggaccaaataagatcatcttttccattgtgacctgagacaggcacctcaagaatatcatgaacaacagcttcatcaaaatgtctcctaagtgtaggtagatcccaagattcggaatcatctatgaaatgggaaagcatacaagattcaagggagacattatccttatagtgtagaaatttattatgaggtagccaataatcctcaagagtcataatttgttcaccatccctgatcttccaaatggtaccagaagccatcaaatttctttcccaaagaaggcttctccaagagtaggaagggatatgaccaggagtaacctcaaatattgaggaatttggaaagtacctagctttgagaacttgacagggcaaagagttagggattttaaagatcctccaagcttgcttagtaagcatagcttggttaaaatgaattagggaccgaaaaccaagcccacccaaaaattttgattgacaaaccgatttccaagatttccaataaatttttttggtatcacagaagaaccccaccaaaatctggccatcgtagcctcaattcctttacacagtttgacaggttacctaaagtaggccatcgcataagcaggtatagcctgtataacagccttgagaaggatttccttacctgcctctgccttggaaaaccacttagcagaccacttcgaaagaacagagagaactttatctttaaggaaagaaaaggaatgatatttagatttgggaagacactgagaaagacctaagtatttactaatgaaaggtctgtcttcaagatggaaagtgttgaagaaaagatctctgatagtttgggaagtatttggggaaagaaggatagaagatttagaaacattaataatctgccctgatgctttagaataaacgttaaacacatcccaaagagaagaacaggagtttctattagtagagcaaaagatgagaccatcatcagcaaaaaaaagatgggaaatagaacgtgctcttctagagatagtaacccccttgagtagacccttcacttgtttagcatgaagtagagatgataagccttcagcacacagaataaaaagatagggggataaaggatcccttgcctgagtctacgagaaggcttaacaaagcccttaacaagcccattaaccaaaaaggaaaaacaagtagtagttatacacctcatgataagagatacaaaactaataggaaagttgaaatgaagcataatactcttcaaaaaataccaatcaattcgatcaaaagcctttgctatgtcaagatttaaggcagcccagccacatttaccactctttctagagttaatggtatagacaatttcctgagcaataagtatattgtcaaaaatgaccatgccagtcacaaaagcgctttggaaaggagagataattttatctaacacagtttttaaacgactggctaaaactttggaaacaaccttataaaaggttgtgcaaagactaatgggtctaaagtccttaacagaagtgacatgctatttttaggaataaggacaattaaagtggaattgagatcagaaaaatcaaccccattgttaaggcagtcaaggacagcattaacaaaatcagagcccaccgtgtgccaattcttttgataaaaataggcattaagaccatctaaaccaggggccctatcccagaaagatgaaaaatgactttcctaacctcatcaatagtgaaaggctgaccaaggaaatcaacttcagagtcctcaagaggaggacctaagcactccagaatcatattcgcagactcagcattaccactgtcagaatgaaaaaggttagaaaaataagaggagattaaggcacaaatatcctcaaaattatcaacaaaattaccattgtcatctttaagaaacctaatagtattattcttctttctatgggaagcaaaacgataaaaaatttagtgttcttatccc

SEQ ID NO: 301288 - DNA, 2833 bp, Cannabis indica
tctagatgcatcaaacaaacaagcagatgtacaaaatagtcactttccatcttacggaagaatttgattctcgtttcatgatattaccaaatcatttgaataaattcttcagaaaaacagtggcattaccttcaagcaatatatttctttcatctagaggatcacttggcagaagtagcatctagcaatataacatcaaacatggtcattagagcaaggcagcacagaagacaactgaaaattatagattttaaattgccaattgactcaaactttggactaaaaaagagcatttttgcagcgaacaatcccaaacaaaatgttgaccaattttttaaagccacaattttatttctgatataattatgtgaaaataccttaagattgtcttcgagttcttttatttgactggacaaagaatcaatttcggaagctatcatctgcgccatatcctcatcagtcccttcttcttttgctagagctgacaacatacctttggcttcttctaactctttttcgcattccttgaatctcctaaaggttgacacaacctgtttcatcaaaaccaactcaatatcccatataaaaaaccataaactatagaaggtgcagcctccacttgaaacctggtataggaaagaacaaaacaaactataatacctcatcaagctctgaaacagattgtgctagcttttggtattcactgggatttgagactacatctgggtcagccaacttgacctgaaattcaaaaacgtatcatgaaactaacatctaaaagtgtcagcctcgctaaagaacatacataaagaaatttgggctcacaaccaattggcaatgggaggagtagcctattcatcttatatgttacaaattatatctacacataagtaatgtgggactaactctaatagagccagctagaaccactcaaaccctgctctatgattacttgaaaacactaagaaactaaattcctttaaaagtttttttagagattttggttatatttccctcggctatgattactgatcgaaaaagaaaatcacacacacataattttcttctaagtaaccaatttgattcgtcagaagcaaaattaagtttcatgttcaagcagcaaaacactagaaaaaacgctaccgcataaaagtatatcaatatataaccatttacaattcaaatcaatcaaaatcataccgataattccttccacgtattctcagccgactccagcttcgtaattaaataaggctcctgtaattcatcatcaacattatgagaaatacgtcccaacactccatttcttccccgagaaaacaattcccgggaaagacaaaaaaaaaaagcgaaaataaaacagcttgtgacactattttcaatgtcgtctttttcggtaaaagcaaaatagtacacggaccgccatgcaaatcaatctccgacgcctaggaggaggtttaagcaccagaggatttctcgagggttcgcgaaaacggtttcgtagtggaaaggtaagcacccgagccgccattgaagtggtagttaagctactcattatcaatattaaggccagaatttggtatggagagaagctctgcgtgccagtgtagaggttgaagccagaaatacgagctttgcagggagagaagatatgtggtgtttggaagagataaagtttgaataatgggtctgtttgtttgggtatacactttattgtactccgtttgtggggttagggttatccacgtaccgtttacaccaaaataatataagatttggttcaatatgatttgtgacacttaatttttaaaaaaataaaaattttattaagaaaaatctactcaaaaatcaaggactagtatttgtctaaatacactctcctaaattagtaacagagattgtcagtgtatgggcaacaccattcgctgatcgcgaaatggcactgcaagaaccaccgtcaacaacagctaataaataataaatatctaataaaatagactgaaaaaattaaaattaatgtaaaacttattaatccaactaattgcaacaatggaatcactattaataatggagatattgaaactaaactgatgtgcaagaaccaagctcagacgaatggctagtagctccgctacattagttgagaaatcgcctaacacacctgatgaccatgccaaccaaacaacaccctctgcatcctgtatcactcccccaattcaacaaagcctctccgtgaaatcaccgaagcatccgtcgctagagcaaaggatccaggaggaggtggcatccatcgcgtatctcgatttacccctgggttcgcaagacccaagcccaaatgaaagccttgtcgatcatactccttaaactctaccagataattattgactaggtttggaataatatctaatcttgactgcttgttgccaaataatactgagttcccatcattccacagccaccaaaggattgtcatcatcactttaaaagcctcacgggatagtctgtcaaagagtaataggagaattccctacattggcccatatgcacatcaacggagcatcgaccacaccccaaacgatgtcacgctagaataaaaccagcacagaaaatagagcatgctcaggagtttcagcttcttctccacaccgagaacagcaaagaggtacccgaacttttcttcaaataggggtgagcaacggtcggtttggtcggtattttacacaaaaaaaaatccaaaattcgattttcggtttttatggttttaatccgaaaaccgaccgaccattataaaaatataaaaaaaccgaccgttttaatccacggtttggtcggt

SEQ ID NO: 301289 - DNA, 3067 bp, Cannabis indica
tattttgtggggtgtaaatagaagtccccatttaataaaactccccaataaaatggtgtattacatatttgcctttttctttcgtcaatcaaaaatagaacaatcaaaacccctttctttgtttcgctcaaaccacaaacctcaactccgctcatctcatcgccgtccgtacaccgccgccgctcgacccctcaccaccgcccgaccctgcaactccttcttttgtctcggctcaaggtaatttgttctttccccaaatcaactcgaagaagaatgtttctttatatccgggaatttgatgtatgtgttgttatagttttgaataaagctaattggttttaggttaagtttgatatataattttactgttgttcatgtgaaatttaaacatcagtgcatggctttattttctaaagactttgtttttttagcattgtgtaaagtttgtttttttagtacaagttaactttgatgcagtgtatggttggttcctttccgttgtatcgccttggagtcatttggctttaattcaatatggtttctagtgtttctggttttcttaaattgggctggaaaagaagtgatgatgaatataaattgaagtattgatatgctgtaacatgatcttttcttaattattggagaacactcaagcttgtggttggagatcttctagtgctgtttttttacgttttttgagtgttttacaagtatagataggggttgtggtctagctcactcctatctgttaggttctctcttcactctcaagaactagcagtatggtttctttctctattagtaattagctgtggaatccaaaacattttgtatatatggtgattgaaatcaagcttttggttggagattttctactgctgtttttttacattttttgagtgtttcacaagtatagataggggttttggtctagttcacccctatctgttaggttctctcttcactctcaagaactagcagtatgatttctttctctattagtaatttggctttggaatccaaaacattttgtatatatggtgattgaaattattgaccaattgtttttattacccttcgaatcaacattttttatgttctgttttcagtgatacactcagtaactaacaaaatgtcatccctgaggaatgccattagcagacgggcacataaagaacgagctcaaccgtaagtcattacataattatcttattgtgtactttctaaataaacaatgccaattttttgtaatttttttcatattaaggtctatgtgtgttgtttgtcagacaagcaaggaaaaaatttggatttttggaaaaacacaaggactatgttgagcgtgcaaaagtattccacaaaaaggaggagactttacgggtaaacactaggataaattttgtgtattcaaatatttagttttttggtttctgctggtaatactaatgggccttgtttattctaatattatgtatttgtttatttctcagagacttaaagagaaagcttccttcaggaatcctgatgaattttactttaagatgatcaacactcgaactgttggcggtgtccataaattagagtaagttatatttgttttgttgtttgttattttctctatgtcaatgtatattcttacctttaactttagtacattaatttactgaaagtgtttttttttggggggtaatgcaggagtgaggcaaacaaatacactccggaagagcttatgctcatgaagagccaagatataggatacatacttcagaaagttcagagtgagaaaaaagtaataattgagtaatgatgtatttggtgtgattaggtttatcagaaaaagagacaaaagtaataattgtctttattgtcctaagttttaaaaaaaaaaaaaaaaaattagctgtagattgattgtgctttgtttgttgcagaaaatcgaaaagctgaatgctgttctacactctattgataacgaaccatcaaatagaaaagtttactacgctgaagacaggttagatctcctacctctcaaattgttgttttttttttggggggaagaaagaactctcttctttactaacgatagattagttggtagtctttgaagttaaaaaaaaaaaaaacctcaaaccactatttactgggaaattttaacaaagtgaacattttagaagtctttcgctggtgcaaatctcattagcttaaaaatttgtttcttggtgtcaatctcattaacaaagtttacattctactaataatagaccatcaaatagaaaagttcactacacttttcagattgtttttttgggaaaagagcacttgtttcctttaccaactatagattagttggttgttagtgagttcttctttgtaccaagtttaactcaaacctctttttactgggaaacttggaatactattaacaaagtgaacatcttacaaatctttcactggtgccaatctcattgacttatagtttatttcttggtgtttcatgtgtttgttgtttacaatttcaaattatcaactatttttatcttgtgatcacattcagacactcatacaatcttttcatggtcatttttcttttgtggatgaactaatatatctcggctgaaattctttttatcatttcttgtagggaggaggctaaagatatccagtcacgttcttcaaagcctagaatacccttagcgtctgaggacattcctgagcgtattaaaaggtataaccattgtagaacagaatttttatatttgtcagtgtgcacattgtgaaatctaactaaactcactatttagattcttaattagttcttacctattattctccaaacatcacctattattttcatgtctcatgctattttatctttcatggacaggaaaacagcagcttcctacagagaactagaagcaagaaagaaaagggtcaatgagttggagaaaatctacatggatatgtcaatgcagcaggaattgcaggtaatgacatacaaaaacttttccatgtttttctttctctatatggtactaaattagactaaattagagtttctagaaataaa

SEQ ID NO: 301290 - DNA, 4174 bp, Cannabis indica
tctagcttcagaaatatctgagaaattattcttcctcaggtcataattattcttagatttcggtcctttaaccatcatttcaacaactccatcgtcgaatttctatgaggataacgaggaacttaccaatagacttcgcaacttccaaactaaaactttgtcgatcattcaatgttttaaaactccacctctagtctttgcatatacaagtcagtgtgcttcttatcagacagttttgtatgcctttgtatgcttttgcattgtagttttacttggggtagtgggttatagttgaatgccataagttatggaatttttgggtttgtatcgactggaatatcatgctccaccgtgtaaggcagttattgtatttgtttgaatgataatgtagagaccatagagattttatgtattttgaagcaatttcatgcgtagaaaactaggaatttctcgcttgagggactgttaattttgcaaattttggtgtggttctctagaattcttgccaaaattcatgatctaatatctgaaacaaatacagttctcgaatttaggattcagcttagacttttgtttcctttttccctttaagttcctaatctgcttacccgagagcttaatgttcctagataaagggttaggagggaacttctccaagcagaggtcaaggagaattctcccgttcccttatcatttttgtttgatccgagcactaactacttggtcttcttattcttaggttccacaatgtctgaagaaaatcaaagtcttggaggataccaagagcataaacccgcaagggacaagggtcatgacaacaacgatccagcttggaacgtcaatgatgaaccagtatttgttgatgtagggttttatgctataaataaaacttaaatttaatttaatattatttttaattaataaagttcagaaatcatatttttactttatcaattgattatatgtttaatacataaattctattaaatctagaacatatagttattcataattatggtgataacatcagagtcgcaaataaataaaattatatgtttcaaacatctttagtctcatgatttatcagtacattgaatttacattggtgtgatgatcaacaataaggtttatttacccttattataagtgatatatcttttccaaggcattaagcaaaataaacttgaaattagatgtataggatttacatcaagacaagaccgatgttgataaatagaacagttatcataatcttaccattataactattctaaggcaatatcaattagtttatcatagattagttatatttgaattctaaaatgattaagctttaagctaattctactattttgagttctttgatttgtttgttacaagcttaccctacagtgtagccaatacttgctttttgggaacttgatagtatacttgagtggaagtgttagtcatggatatggacatctatagcttctatttgttagaagtgaaacgatattttctttgagcttggttaaaggtgttaaatgattgacatctcatttcgataattgtattagtttactaaaataccatttacaatgaactaagtgttcaaagataaaatgcattgatgggtaaaatattaattttagtccctactcattataaaccatctatagaggatcactgattattttgatagaaataatgaataattcatagcgtatctatattatgtatatacaatgtttcatttaatcaagagtggaataccgagtctataattgagtcatgagaaattaataagttataaaatttatttgttaaattttagattaacttgtcgggagcctagattttattggcccatagtccccgcaatatctgagataaataccaaatagcaagtctcaataattaatttattttaatcaattaggactcacattattgactttgttaattatgagaatttttattatgtttggtaaaaataaagaagagaaaaaaaaaagagtgtgaactcagaaattcgttcacattaactaaggttggataattaatattgtgaattaatcatgatatgtgtatatataatatatatatatgtatgtatgtatataaataataataagatataaagatttttttacatgattttgtgtaaattaatctacatactccacgagtccatcttatttctcgaatttttatgaatgagaatacaatttggtagaatttttctaagttagaatatttgtcgtccctgctacattattcttactgctatttatagggataagatagcaattattttttatccaatctttacaacgattatgaataataaacatttcacacgtttcatatatctagctaataggcaggaaatagcatgcaaccacttttattttaaataagatagctgccatttttgacttggtttttgtattttgtaacatgcgtttattgagatgcttgattgtttgaagtatagtccatgggagattcaccaatacttgaatgtatccttcggatgatatattcctcggagaacacattgattacattttcgaggtgatgaacaggagcaagcttaagcaagttaagcctctcaatatttacagtatcgacatcatgaatgttcctgaattccttcacaagcttagctcccttagttgcatatcatgagtgtgttaagcacctcccattcaatgttattaacatcaacgtatctcgaagagatcgcacacgaacttcatattgcaaggaggttattaatatctcgatcttttaaattaactgagttaatttatttcctctattgtacacgtgttatgtaactaaacccatacatttactgctcaaaatgtgggtataacaattgctccctaaaaagtactctttgatttggaaggaatttttactcattatcttaggaagtggaccgtcctttatgcgtattgagtatgcttttattttggtcgttttatttttttgagaaaacttttgagtacaattaaagtcatcttacaattgacttgtgggttaatcaccgttgattaatcatcattgatgatcaaacggtgcttgcaaggtaggttctaagtgggcttttttcatttttttttcattacttctagctttatcagcttcttccttatttttctccacttttagaaaaaatatactctggtggcccttttgacttttctctatttgtttcatgccctcattatctctcttatattttcttcgtgattctgccaccaatttttcaaaactaaggtctcgctacatactagacccctagtatcgtaggtttctagtgaggaattcatcaagattgtcgcttatcctaagaacttagtaagtatcaaaagcctctttttctggaatttttcgcatgtttttattttctgaactttttatggttttatttgtactaggtagatactgaaattacttgacacttattactcccagtttagtttaaaattttacagaatcaaacgatattttaaaaacgtctttgttcaattctaaacgtgaaaacccagaatttatagtacatggaattcaatttttacctaattttccatttgaaccaaaacccaaagttttaaaaacaaaacttaatgcaatttagcttttattaatccttgcaaatttgtaataaaactactaggttttatattgtgtgattgaatgtcattatttcaattagtagcatctgattgtattagttttttaactggtatcagaactaactttttcgtgtaaacaaattgagatcctattgctactgattgattcttgattagattctatagtgtttcaatttttcttttgttgtttattatttttggaaggctgatccactttaagattcatctcctagtgcaacgaagttgttgtttgttattttttggaaaactaatccactttgagattcatctcacaatgtaatgaatttgttgtttgtgttgtgtgtagaccaataagaaatggagatgttacatgaaggaggttccacggcttgacctcctatgcttgaaggagccaattatccatattataaaaccaagataagggcgttcttaaaggtcgttgatgaaagagtctggatggcagtagctgagggttggtcacctcccatggtatcagatgatgaaggtgttgggttttatgc

SEQ ID NO: 301291 - DNA, 1955 bp, Cannabis indica
attaccgctaaaaattaaacttaggtatttatttgtaaccaaaaattaaacttaggtatttatgtcgcaaattactctaaaattaataataaacttattattttaaatttttaattaaaatattaattaaacattaaattttgtacaaagttttgtaattgtgcattggagcacaatactaaacattaatgcaaatatacaaagtcatttcttatatcaatatagcacaatttatacatctctcattgaaaatggtattgactaaagagtaattaaatctacacttaaattaatatatgcactgcaaatagtttctaaattaattgtatttatttaaattgagacctaatatttaaaaagtagtgctatgatgtattataaatacaagttcatttttgacacaatacgataccaacacgattttgagagacacaagcatgatccgacatcaaaaaatatgaatttaaacacgtcataacactatattggaaattggcatgacataacaaaaaaaatataagattaagcatgactcgacatgacacgtgaagaaccaagaaaaaagaaaataagagaacaaaaaatattacatattacataaagtgggttggactctcaattttaattaatcaaactctcttctttttttcctcctctctctcccctctctttctttctttctttctctttcatcaagaacccacaccaccaccactgtccaagctctggtgaccactttccgatcactatctaaccctatgtgccaagccattgtactttctgatagctggtgaccatacccctcaagcagcatcattgtactatctgcctactactgaccatacttctcaagcggtatcacctcatttgccgtcgttagtccaagattacgggtcaaagttttgagattcaaaatttgaatgcattttttggttagctcccatgtctgtttgactatccattttcactgctaaacttagctcattgaggaaaacaacccctactaatccattttgccaagtttgctactttttttagtgatatttttgaagctccgcctctttacgataactttctggaaataccatgtaccattttttataaatggttgatatgggcatgatctactcattgatgtgatcattttgatatgtaccactcctatttttgaaaatatttctagtacaccaatttctactaccaccgatcgtaattaaggcttcagaacttcagatttcaaatatattcatgttatattcattggactcgatttaaaaagtacattacaatgattttaattatttattcaatcgaagaatgtaagaaaaagtgacttttgtagtggctagctgatgaatacacatttgtacacctattcatggtcatttatttgataaattagtgtttatttctaaaattttatatatatatatatatttgatgtgtttttatagttgtgcagttttgaatttaaaggcaataatactatgaatttggtgcataaaaatgataataaagatatatgtcaaagtcgggaagcaaaatgtgattgaaagaagccaaaaacaagagttgctgttctagaaaacatgtctactgggtatcaggcaacatgttgtctgggtgccaagcgacatgtctcctgagtgttaggtgacatgtcatccaacttataaggatgccttttggcacgttaacaaaagttgaatcgaacggaaaaataattcaggtgacgtgtcgcctgtcgtacattctaaatttaaaccctaattttaaaacgttatattttctatctttttcggtagataaatagaattgtatattttgacttctggattgaaagagagagacagaaagaaacttttagatcagaaaacttattgaagagcaagagcaagagattccaagcaatcatcatcattaaccattagagtcattttcttcttcttcttctt

SEQ ID NO: 301292 - DNA, 539 bp, Cannabis indica
tttttttttgaaaaagagttgaagacttatttgtatggacattttaagaatttttgccccaattatccctattttaaacagaaaaataagagcggatttgtcagaaataatcgcgggtaaaatgttaaaatggacttttacagatacaacccgtagtttgtgggcttttacagtctcaccgcccaagtttggataggtcgacacctgtcttatttttaatagtctgacactttgacagctatatcatatatttctttttttatttccttaaatagtttgacacgtgtcttatttttaatagattgccatcttatccaatatatgacaggttgagcaataattcattttccgtgtctcctaaactataaattgggttgggccattgacgttgtcccacagttactaccgtgtgtactgtcccatataatttgatcctttacttaatatggaaggataaatgaaggaaaacttaaaaaaaaaaaatattaaaatttgggttaattttataaaaaatactatcacacggaatttttttaaaa

SEQ ID NO: 301293 - DNA, 2149 bp, Cannabis indica
tcacgttcttgggggagggaatctctcgaacgttagaagaagaagttgtagatgtgaccttaggcttgcaggacctgtgggctttggtcttagacttccccttacctttggagccctccgccttggccagacttttagtgaccttctcacttaatgctttcaacattctgacttcaagagtatgagtgaacaacaacaagcacacagttaacaagtcaacttcgaagtggcaaaatcaaaagcataaataatatttaacaacatatttctaaaaagtgtacatgtgggccattcagtgagcaactataaggttccacacgagcaaaggaagtcatgtcctcccaaccatagaagctgccatattctttggaaagttggaaggacatgtttgtaaaaggatctactctaatggaatttggaggcaactttggattgccaggattcctaacaattttgtttactcatatctatgaaatcactcatggggtacttagcttggtctaaatttgagaaatgactgtcaaattccccttgctccatctgggatatgcgatggagactgggggtacgaagaacgaggaagggtctattacctcttctagaagtactagctcccaaagcgccctcgtttgggtaagctgccacatgcctctcccagatctcctcaactttggtcaaaggattaggatgacggagcaaccaattagcttctaggagttggtcctctttagcagtctccgtgaaaatcttggctaaatcacgcgtaacatcctccttaatttcctttggtgcctggctttgacccctatggcttacattgtcgatgctctagaagttggcaatgagtccatgttcacaaagtaagggtgtggtcaccaagctgttgacttttagctaatccttcgtgaaagccttgtactgggccacttttttggccaactcctcagtctcagtattctgaggtaccgactctgacaatagaacaatgaagcacaatcaacacttggacaaaatcaaaggagagcgtgaagaggaaacaaatcataaagtaagtataagggtttttacttggaagttggaagctagttgaagggtgggcaccctcttcaccgggaagccaatagagaaaaactaatattccctaagatcgtgggaactcttggtgtggctagtggggcaatgaatgtctgagtacttctcgagattataaaaacctacttttttacaattggtcctcattggttgaggcttcactccataaaagagcaagacctccttcggggagggcacctcaaacttgttaattttacaaaaaaacataccatccaaccaggagcttacaggacgaaggtattagctgaaatagggaaataaaataatgcgagcaatgagatctgcgaagaaagtcctcagagggagatgtgctccacttgaaatatgaaccaactccaagcgctgaaccctaccgtgctcacagacacagattcctttagggtggccatcttgtgccacatcaatgtcaaaatgttgagcagtccgactccggtggcatacaactcgagcatcccatatgaacagaagtaattctctttttggtccatctcctatatggagtcgttgagttcttgagcgggaggtggggccgttggcctttcctttccgtttggattttttaggggtcccaaatggaacctcctctgggatggtttccgaaacctctatctagatgacctctaggataacctcaaggatggtagccaactgaagttcccctgcagaaactcctgtcggagttccctcagtggccgtttcttcaacaagggcaacattggacttatcctcgatttccactgcatcaagatggaactctacattcaaatccatcagtgacaaaagaaaggaagaaaaataccaagcaattaggcacccactattcaaataaaaaaatgggcatctggggaagcctccccaaaaattgcttggagaggtcctcgccggacatatagcttccagaaactagttttctccagacaacttgaagcaataggtcggaaactgttgggttttatgccctaaataaaactcatttcaatataatcagatttgcttattaatatagatcagaaataacatttaatgttgcatggtt

SEQ ID NO: 301294 - DNA, 8084 bp, Cannabis indica
tttataaaaaatggtaccttaggtaattattaaaaaaaaaaaaaaaatcattgataccaaaccattatcatgtttttggtttttgcgtagatcccacaaagaaattcatgattgtaaccaatggatgggccagagcttgtctgtccattcagcccaataagtgttacgtttgctttctttccaaggcccaacaacacatatatacacgagaaaattaacagaaaaaaaaataaataaataagtaccaatagaaaacgaaagaagagtttcgcggaaaatatttatttttctgcgcgattttctttacagccaaacaggaattctaggccattccaggaaactgcccagccttgtccgtcttcaacactatcttattcaatttctattcactgaatacgatccctctgctctttgatgtgattcgttcggttttaggctttggttttgagcgggttttgacgaatcaatgaagccgatacggcttcctgagccacctggtcccaaagtgaacatgggcgttgcagacatcttcgaaggcggcgtttatggtgtcattagacgagccgttgtaattggcaacggctttccttcctctgagaatcagagcatcggtttggttcgcgctcttggcctagccgataagcatgtcttatatgtaagttcatgggagcaaataacctaatttaactttactaatttgattaagattctgcaatttttttttataatatttgttgcgcacgtatttcggaagactgtttgatgctattacaaaattgaaatttgagtagctgcatagaatatatatttatataaacaaatttctgtaatttactcaatgttgtgttgtgttttattttatttattagtttttaaaatttaaaattttgagtaattggtgtatgttgcttgtaatttgcttagttatagtttagtatcatattcactgatatgatccaaaatcatgattgtagagttacatggttggtgattgagtaaaacttttgtgcccactgcccaacaactaatttgatcatccacttagttctataccctgaagaagaatgaatgattatagatgtgccttattttttttttttttcaaaagctgctacaatgtgcagaattttgtgtgtaattgtgatgaaacttctcagttcacatggtttgtaatcacaagcatcatcatgcattgaaaagcacctactgtaataacaaaacactgtattccgccttatccatatatgatactttgtgctaaaataaaaccatcaatcaatgctacttgaacactcatataaaaatcatttgtgattttcgcaaataaactaaagtataaggttttacattatgaaatggatttgaggcaagtattcttgacatcaactaaagccatttctagggccaagaatctttgatcagcattctaagataatctcttaaaatgacataataatccctacatggatttacctatgtatgccaaatggatcacctcatagatttacccatgtatttcacatggatctacacatttgtatacagtatactaaaaccatcattttcaattcatcaatgtgatctgtgtatgtcctcagccatttttttctttccaaatcatgcgatgatattttttatttgttcatatgttcatacgtacttgttatttttaatatggtggtattaacaatggtgatgttcatcccacaagtgacatcataattgttgggggtcttcataatccaattcaaattgacctaaccgatatgatccaagccaattagaaaggactggatatccaattaatttgtttggattggatgttgaaagctggattctaattggataggatcagttagtagagataacattctcacaaatccgataaaaaatgattaatgtattatatattaatttaactgaaatgtataaaattaaagttataagtgattctgtgttgatttttttaatttattaaggtgcaacttagcaattgggtgcttataatccaatcccaactgacctgacccatctcatccaattagaaaagattggatatccaataaaaattacacaaaatcttcacttgtatttatactgtaaatagccaatatctggaaccagtcaaggtgtaattgtattttaccgttgtcaagcctgtgaacctgtgtattttaaattatagaaattaaatgttgctttaagtagatgtatatgcatgtgtattcattcatttactaatatttctcagtctacttcatatgcagcgagtaacaagaccaaggggaggagtaaatgagtggctccattggcttccagtttctcttcacaaaaaattatattacatcttacagcagatctcaaaatttattttaaaatctaaaggtcatagagttatgactttaccttcagaaaatggtggacgcatgggcttgtcatctattttggaagctgatgtgaagcaaattgtaaacatggctcgtgagacttctgaaaagtaattattttctcacagtgattaaaagcactgttccattttgtttaatgatgtagccagggtgcagccaaattcttatgttgaggaggatatttataatttcaaattttcaggcggggtttacatgttttttttcttacctctgaacttttgggggttagactagattttttgctcaaatttattagaaaatgcaaataattaatttagagttatgctctacttgtatcctacttcattgaatacttaatatcttctatacattttttttaagtgtttatgattctttttacagggatggacctttattggtggttgcttctggcagggataccattcccattgcaagttccataaaacgtttagcacctgaaaatgtttttgttgttcaggtttgttgattgaactttcctatttttctttttggtgtgtttgtaattgttgttattattatcattatcgttttcccacttaactgaataaatagttcagccacgggagaggcataagttttctgaaatataatttaggcctagtgcagcaaatttcccactgctacatctctaaggaagaagcttttggtctgattagcaaataatgtaaatttgtacctgcaactccctttccttggataaactaaactgcactagaaccttcacccatttccaaaatcctaacctttccctgtaggtttttatctgaaaaagagttggtaattttcttttgtgagatgggctatcccttggggatttgttggtagaactcaagatgtgataacattcatatatttatcttatatgtaacttgtttaaaggacattaatgttgcagatagagagttgggagttagcaaatttaggttctgggaaccatgtttagaaaatttcttactcattgtattgttttagtgggaacttcttgaaatttgttcatttaatgtaatagggtttgtctttagatgagtatttggggagaactataccattctaatatatactagtactttatatatatatatatatttatatatatatatttataccagtccttttgatttgtagcaatctgaattttctatttatgccttttttatttgtataatccaaaactgaatgtaacgaagtttatcatcagaagtggaaaattttctcaatttggggtcatcatctgcctgaaaattgtacacttggatgtgtcaaatcatgctttgaaattcaagcctataagaatgacatctattttctatgtcagggtagtaggctctagtgtatttcaaaattgtggagtatgacccttttttttttcttctattgtatacatattcttgcagattcaacatcccagaaaacaattgaatcggttcgacttggtcatcactccccaacatgattattatcctttgacacctgaagggcaagagcaggttcctcgatttcttaggaagtggattactcctcaggaaccccctgacaagcatgtggtgagtgttacgccttcaaaatggaatttattggtggtttattttttttatcctgctcttaacttctagagaatttggcctgatattgtaattgaccttacccactttgaatacaggtcctcacagcgggagctttacatcaaattgattctactgctcttcgtagtgcagccagtatgtggcatgatgaatttgcacctctcccaaagcccttacttgtggtttacgttggtgggcctacaggtaccttcatgttcctgatttggtcattgttcgatatatatatatttattgcatatgaaaaatataagcctaaactatatcataagagtagaacatataaaaccctatgtcctcattgtaatctaatatgaagtaacctatataagcgtaatctaatatcagaatatcagaaggccattttatcactgtttccctctattgtatgattattattattttgtatttttaataaattatttgatgagcattaaatgacattaaattttgcatcaagatttacaattatgcattggagcataacagtaaaaattgatgcaaaaatgtcacaaaaccattatttgtaccaaatatagatcaacttttgcatctcctattggagatggtctaataaatatgaagtatattttgctgagtagtagaccattatactaaagctttgagatttgatgacataaaaaccattaaaactatagaacaaatcaaatgtttatcttttttctgaaactcagaagtgatgccttataaaaaggcatgttggagtgtgtgtattcaagaataaagagtcaacacccaattttctgatttttttttagaaaaattagcaattctgaagtatttaattcggaagtttttggttgttttaccactgcatttgtatgatattctatcacaactttttaataggctgttgtcgatttggtgcggaccttgcaaagcagttgacatccagtttgctcagtgttcttgcaagctgtggaactatcaaaatatgttttgctgataggactcccgacaaggtatgccatgcacaacatttttgcagaatcgtctttgataagtgatgcctatattatatgatgtgttggctgatgctgtcatcaacaggtatctaatattattttgaaggagcttggtgataatccaaaagtttacatttggcatggtgaaggtaagttgatatctcatgtatgcttatcagggagagtagtgaaagtaggaaagtttttgatgggatgctttataatgattttcagaaccaaatcctcacatgggaaatgtggcttgggctgatgctttcgttgtgacagcagattctgttagtctgataagtgaggtttgcagcactgggtaagataataatattatctctgtagttacttaatcgaacataattagttaataaggatgtggtcttcaccttaattactttgtacattctgtgggttttttttccctctaaaaaaactattgctccccaggaaacctgtctacgttatggtgttgagaaatgtagatggaaactctctgatttccacaagtctctgatgaatcgaggagtagttcggccatttacgaggttctgaggatgtaagtaatgtgcaatttggttgcgttttaaaatatatttatattttaaatacatattaaattttattccattcctttctctatttttattcctattcttttgttacactcgaaaaacgtacacttgtgcagcttttaaagaagaatcactttatgtacataaatgattttaaaggtgttactatgtaattgtgtttaagttttgtagtgcccataaattttcaatatttcctcttatttagtttcttagctcattttcacatcattttctcattgttttgacatatttcttttccaatttcagattagagaaagctggagttatcctcccctaaatgatactgccgaagcagcctcaaaggtgcatgaagcacttgctcagcgtggatggagactgcggccatagaaggcatgttgatcgttacagttcgtttgattgtggttggcttgtaacagttttctcaagaaaaaaagggttttgatctttaggtatattcaattcaatagtgcatataggagaagataacctacaaaggatatttttttttgaaattcaatttatttccccttttggggcattgctacgtatggaataaaggattgttcttgctgctcagaggagttggctgcaatgtttgttctataatttttcttttttttgtaatataaacccacatgtatttttcttctcattgtacaaagatgcaatgtcaagatatattctttcctttgaacatctgtattgaaatgaaacatactgtttggatagttcagtccatttctttggttcattttagtgtatcttcatttttacaatcagccattacaatttacatgaagacttgttgtcattgctgatctgattacatacgttagcagcctaattgattaggtgaagaatataaattgaactctggcttattgagattgagataaaatgtgtgaaacttgattcttgtttatagtgctcaaactacagccctacgtaattggttgttgtgtattgcttttagaccaattgctattcataaagtggagcaagttagctattgcaacaactccatagagcttccatttactgaatcctttttctctactctttatataacttctcttcttcattttagtatattccaagcaaacccattatagaatatacccttttctcttctctctatttgatttgctcagatggactcaaaacagagctctgatgaagctgtccttattccaaaaagcaggtccaagggaaaagcagtagtggatgatgcctcccctgctcctgctcatgttcccgccccagtcgtagccgtcgtgagcaacaaaaaagtgactatagctcggagagtaggatggaaaaaaggcattgccatattcgactttgttctaaggctgtgtgcggccgcagctgcctttgctgcttctgttgccgccgcacaagcagaggagattttacctttcttcacgcagttccttcagttccatgctgagtacaatgatcttccaactttacagtaatgcattttatcatttacttaaataacaaaataataaaacatgcatgcacacacaaaatccatcctacatcccaatttcaaacttgcataaataacaaaattacattagtgaatctcgtacacttacatgttatatacatacaattgcaggttttttgtgatagcaaatgcagcagctggtgcatatcttgtactctcgttacccttttctataatatgcattattcgaccctataaagtaggaccaaggctcctcctcctcatcttagacacggtgaactctatttccttattattactttcatgtgtattgtatttttctctcttatcacaaacaaagtaaaaaccaaaagcctattggggtttaaccatgttctaattggcccgttttatacaactatttctttccttttaatcttataatttccaatgaacttgattttgagattctttggtagagtttgataattttaaattaaatggtcttttcttatagaatctaaagtaaatagtagagcataaagttaattagaatttttgctctttaaattttgacatgtacaaattatatttcctgaactttttaaatcgttaaaaattctccatgaactattaaaattgttagatttaagaatttttgtccaatttcattcaattttacaaatatgtcgattgtcaatgtactaaatcatgctcccgaactttaatatttattaaatcaagtccttgaatattaacatgtaccaaatttgtaccctataaatttttatctacgtcagactttttttattaaaattagacaaaagtccttaaatccaacaatctcaatagttcaggaaaaatttttaatgaccttaaaaattcatgggacatgatttgatacatgtcaaaattcaagaaaaaaaaaatctaaattaacctaataataatatgcttttgtaattacataattttttaaaaaaaaattgaagtgtgtctca

SEQ ID NO: 301295 - DNA, 2859 bp, Cannabis indica
cgtaacttttgctagtatatatatatataaacacacacaaacacaaatatacataaaacaaatatgttattttaatatttatttaaattatttaaccagaagttgtaatgaataaactaatttcatcaaaataaatatagatttttgttattatcccttaacaaataataatatgaaaaaacaataaatacaattagattcaacttgaaacacacaatctcagattttaggaattgcaaacaattgctcttctttgttaaattggaatgacactattcaggtacataataatctcattttttgttctattacattgagctcatgccaagacgtgtcttccaaactagaatcttaggcatgacatatttgctttagcctttcaaaacaccaaaaaggaacaagcttggtgttgatcgataatgcatggaaatcacctttccttcgatttcacttttgatttcactggaactcccctatacatgtctacttgttcctttagagcatctctccttggtcgagccaacttgttgttagggtcaaaaagcagaacttcttcaaatgccttaagagcagacttgaactctttcttcttttcataggcatctccaaggttgttccatgctgtgacatagcccggttgaattttcacggcggtttcaaactgagtaattcctttctcaagcttcccgtcgcggacataactgacaccaagagcattataaacctgttcatttcaaacatttcaaatgacagtagcggtgataatatgatatagcaaagacaaacgttatttatatgtaagagcttctcattccccattttcctacaatgtttccaaagcttaaggatgcagtgaaacacctccactgttactctgtaggctaatgtcatcgagacccaacaatatagcaatctaagtatacataaacggagccccaagacatgaaatagatacatacatatatataaatgacaacttcatacatttgaagccataatccggttctgttaaattaattacactaaagacggagttataatatacatgacaacttcgtaccaagttatgattgataccagctacgcctattgaaagaaaaaagaaatttgaaaaatggcataatatgaaggaagaagaaaacaaatgctttttgcttcttcagtacaaccaatgtttatgaacttcggctcaaaaatgaaatttgattttgtatgtaactcaaagagatgattcatggtacaaaatatcttatataagtcaaagagatgatttagtaataaggtacaacggaagtgcacatatatttgagacagaagagaaactggtcattttagattccaagcttattttattattgatatcatgcatgaatatcatgcgttaatgcgataatttagtacattataatttatcatttgttaatgttttgtagtttgttttacttaatctaggtgtgttttgtagtttggagagtagctggagcaagcaaaatagatgcaaaaataattgaggggcaagagaaaatttattacacaattagtgctcaacgctgcgacaaacgtcttctgaattgcaacgccaatggaattttatgaagccaaggactaagcgtcatgacgactagtgtcaatgtcgtgtcacgatgtagagcaaaaaatataagcgggaaacttgctttctttgctaatttttcttgcaagttttgatgtaggctatagaggactaatgggaggccaaattcaagtctttcgagagattgacgagaaagagaggaatcaaaactttgaatactaaaggagtttctttctaccaagagttttcatctttcacatgctaggcaattaagtgagaatacatttgtttaacttaaatatatattaaaggaaaactattttagatttctctaaaatctgataatcgttatatttaattgttaatacttaaacactttagtgatactcttcgtgggacgataatctattttcactttattacttgtagcttgcgttatttcaaaataaaaatatttttggcattgttgcagaaaaaattaattgctaaatttatcccaatccacattttcttaattcaatcttttctctaatttgttatttatgcgttgtgctgaaatgacaggaataatttggttttagcacgtaatagatcatcatttatctatcttgttcatgattcaatctttgtttttttaattgtaattttatgggttgtgctgaaatgacaggaataatttgttaccacgtatagagtataatttatcagtcaagaggtgtttagcattatttatctatattgttcataaatcaatctttttttttaattgtaattttatgggttgtgctgaaatgacacgaataatttgttaccacgtatagagtataatttattaaacttctagaatgttcaaaatattagcgtatggtaacacttttattttttaatttttcaatcactaaaataaaagtagaacttttgtttttaaaaattttacgttctataatcacttttgttgtttaattttaaaaacactaacaaatgtgtgttagtaaagtttatttgtatttttatttttgattttatttaagtcgcattcgggtccgggatcggggtccaagtctaggggtcgcactcacagttcagggtcaagtcccagtctagggtccggtactggggttgggacgggggtctgggtccggggccaaggccggggtccgggtccgaggttcaagttcagttcggctctaggaccggggccgaagtccgggttcggggttcggctccaagtcccaatctcaggggccacgtagtcagagtccaaaatattgatttagaaaaaaaaa

SEQ ID NO: 301296 - DNA, 2881 bp, Cannabis indica
ctttgctctgtatttgatatataattatttgcacttttagatatctaaatagttttaattaatgttaatttttgtatatgacagtgtagtttaaaactcttttatgtgaaataactgtttgaaactttatgtattgaaaattactcggaatctctcaaaatttttacaaattgtcttaaataactacaatataaatcatcataaattcaaattataactattcgaatatcaaaaacatgaaggggtgtatgatacacttatttttgaggtgcactgtagaaacattctataatttttttaataattaacatgtttgaagaaatttcaataactgttttactaggcattgtatcgagctgcgaaagcgtctttgtcattgaacttgttatctgaggccaaatcccattgtgagaatggacttaaacatgacctggataaccaagaactgaagaaacttttgaggcagattaattctctgaagtttgaacaagaacaacgccaggctcaagtttccaaagctgttggagaagctaaggtctccttcattattttcatttgtttagcaatgtctgatatgggatttcatttaattgttaccactcatgtattagtctttgctcaatcatgtaggaccttctttcagctattgaatctagaggttataagattgggaaaccaatgttcagagaccttattggactaagaaagccattaatggataagaataagatggttcactggcctgttcttcttctttatgctgaggttatgtcaagtgattttattgaggatttctgtgagacagacatgtttacagttcatctcgacatgatatccttttaatttagagagctttaagggactaattcatggttgttatgaattctgttgattaatgctaatgtattgcttcattatgtttaactttatttggagtccttagctttcaaacatgttttcagaaagtgctccacctttgccatgggatacagagaacaattacactcgcgaagctatcgaattatactacgaggtaagatattgtctcttcttttttcattttggttgagtgttatggtttttgaaaacattctgacattctttagaagtgatcttcaccatgaacaaaactttcatggcctttaggctcttattggactcttttcctatagtgtctaggcaatagacactaaagttttcaagtgttgagtcactggaattcatataggaaatcatctcaatcctttggcttcgactcgatatccttgtaatgtaagtttgcatcctttttatgcctcatttcaaactcttctaccttgctttaacaggctgcttcaggagtttgcctaccaaagaaaaaaattcttcagtatctccttgagggtactccagcttctaatgtggaagacatcggtgatgatgacaaggacgctgctgaggatgcaaatctcggtatctctgcaggtagacagtatttcattccctttctttatttgcaacatttctctctagtgtcccatctaatcttagaaagttatatttcgattaggctcctcaaaatggatcaaagtaaatgaaagaagaacacttcacaatgtactgaaagagcctaacttcatcattcaaggaatcccaggtgtgtttaacatgttctcattttacatcaaagcttttaagggaattgatgttatcgatttttctgatgaattccttggttgctgatgatgcagtcttctatgtcgtctctaaaaaatcaaccgatttctatagaaagttcaaagccggtttatggactcttccatcatgagtaggatcgatgcttattaggcttggtgagcttacactattttagtaggctcgagaaggataggctcgctcgctgcctgcttttttgtgacgggaaacccttctagcacggattttcgttaactacatacatagtttgctttggtttagtatcaaagattaggaaattattgatttttgctttaaggttgtcttgtgtcaaaattttcaagaccctatactattatttaaactctagtatttacatggtaaaaagtttaggtttttgttgatttgattattactttctatatgtgtagttggtttgtatgagcagttcaagtaagtttgagaatagaggaaaagtattattgtttacaagtttgttataaagtattacatcatatttaatgaagtgctaaaaatgtagtgtattgatatattttgagcctacttacaaacaaaattaagaatggtggttctgaaaagtgtgtcaaatttctttacaagaaaaagtgtgtcaaatttaatacatattaaaagttatgattaatttggtctaatatatagtgatcaaatttatttttgtatttaaaaaatttattagattaatttttgaatttttatataatggttgataataatgatagtgtaaaccgctcaaattgcagtacactacactgcatttttgtagttttaagatctcgctgtgcggtttaagaaattacaaaagccgcatatgcgatttaatttgaaaaaaacgttacaatccacactacttgctccgccaacaccccaatcctaaccatagattttaagaggaagaagagagcattttgtataacaaatttcaactagttggagtaaaaaatttgctccaaccatatcatactattcttaacttttcattttaaagctataaaaccaaggctcattaatcatttaaagatttttgtgaagaaaaaaataataattttgccatattaatcaacaaagcaacttaacacccaccaagacaaaaccggctgtgaaaatcacagcctattaattttgccatatgttttagaaaattttataaaatagatatcactttttg

SEQ ID NO: 301297 - DNA, 1079 bp, Cannabis indica
tttatttaataatcagaaaattttataagcttttcaaggcataaactttaacagttcagtgcatataatatctttattttgttctgttattgaggattgtaaaaagttgcttgttaatttaagaaatgtccacttagttttgttagatgggggttgatttattggaataaagaaattgatttcttctttaaaaaaaatatctacgggaaatttcttaaaagtgcaaatcatggttttatgtaaagggcaaaggtatttattttctaattctttttagttatattttttttgtaattattaattaataatttaaaaactataaatctacaattaaaccaagcaatatgtatctaaatcttatattactctatctcttcaaattttcttagctaatttgtattgtgtgttatacagtcatttcacttttactttccatcattttttattggatctatcattgttattttagtcaagtttaagccaatctaagagagcaaataaatcatgtaaataatgatgttacagttttggtccagcgtttcttttcatgtggtgagtttcttgattacctttcagatactaatatagtgcttattctgaaaaaaatcccaacctgaaagtatgaatgagttgcgaccaattgctttatgtaatgttatttacaagattttatcgaaagtattggctactagactcaaagggattctcacaaaggttatcttagagactcaaagcgctttcctacctgggcggcttattactgattatattttgatttcgtgtgagataatgcattatcttaaacaaaagcaaaaaggcaaacaaggattcatggcaattaagctggacatgagtaaggcgtatgatagagttgaatggggatttttggaagcaatgatgaggaagttgggtttccatgagcagcgtattcggttgattttaaagtgtgtgagttcggttgcttataagtttgtggttggggagcatgaggttgtgttgggttttgtgccctaaataaaacccattttactataatcatatttacttattaagaaagatcagaaataacattttatgtt

SEQ ID NO: 301298 - DNA, 850 bp, Cannabis indica
aaaaaaaacaaaataaaaagacctaaacaaaaacaaaaggagggatctgcaaattctgtgtcctctccgtaggttaatgttcatacccattgtcccagaagcatcactccctccatagaatgtagcatgagcattagtccaacctccgccataagcataggcagaggacaccattgtcaaaaaacccaccaagaaaacaccagcaagagccatttttttcacctgcacgaaggataagaagtaaagaaacttagcacttggtgtttctgaaaaagctttgttgaaacttaaatagcaacagaagaaatgtgtagagaaggaaggtaaagataattactttgaagagtaatggagcgaggagaaaaataaaatgtgagctggttgagtgaatgaaatggggtgggggttgaggggtattatatagaggagagggggttttaaggagggaaatgatggggtgggaaggaggacttaggataggacactgtttaaccactatcacaactaacacccttttttttaaaagctttctggggaccactaacggcttgggctttaagaggtttttcatcaaactctactaatctagtcttaaaaagcaactaaacaagtctatttgggcttttcgggttttgaagctaagccggtttatgaaaggaaaaccatgtggttttgtgggtatctctaatgggaaaatcctcccaaaatccaagtgggacatagaggctttttgctcttatatggttaacaaactaccatacccaaatcacccacatgcaagcatcgaccatttgccgcgatacccctttggttattttgttcccttctgcttttttctctctctctctct

SEQ ID NO: 301299 - DNA, 3271 bp, Cannabis indica
aaaaattcttctgaatatcgaaacagatatacatcaattgtagaagcaccctatattattttcaatcaacggtttcatttattacttcatgaacaatttagtcaaaaagactattctaaagattttattattattattattattattattgagatgacattgtgcaaagaaacagaatattgaaacttcttttattctttgcccatctaattatccaatgatttatttccattattcttggtcttgggattacattttcagttaaaatcagtataaaactggatgatctgtgttctcactgatatgggaattgtcacataatgtgtctcatctgtccaagtcaaactcccaaaatagtagccagtgttgaccttgtgagaggttgagacttcaactatgaaagataaatctttaactgatgagttaaaagccaaaatatcaggtctcacagctacatgaattccttgtggagagtcaatttgggctttgtaaactgaattaacaggaccaacatttgtgacagttctagtgagagtaactgagtttcttatacttggaatggtgattgaaggaacatttacatcaagaatggaaggtttggggcttggacatgttttggattttccaacaagttgagtgattgaagaatcattatagccaacagcacagaggtacattatgtagtcatctgtgcccatgtcgtatacgagaccaggtttggctgccttattcgggttcacaatccctgctccataatcaaaaggattggctagcttttgtggtgacccctcagcaaaaacaggctctccaaatggatcagtcttccaagctgcaaaaaaaatgaaaatatagtttgcttatccgattttaatggttaatagtttcagcagtctcagtgatgagtttgaaagatacataacctgttgtcataagagctgattttattgcagcaggagaccaacttggatgtattgcttttaaaagtgcaacaatgcctgacacatgaggtgctgccattgatgtccctgaatgcaaggcaaatcctccatccataaaaggatcaaagggagaacttgcagctagtgtactaacaccgggtgctgctatatcaggctgtatatcaacacaaaaactatgtattggtcaaaaatataatgtcaaaatcataaaacttataaagggataaatttttagtgttttgcaccttcaaaatggctggagaaatggagctcggccctctagatgagaagtgagcaactttggttgatacgggcctccccgctaatgttttagaagggctcaatttcacaataggagatctttgtaccaaacaaacattagaaatggttaaatgacaagttatcataaattgatcataaactccaagtgtggattttgtgtggtaatgtacctggtggaacgaatatagaatagtatttggcttccgagttcatagtcaacttcaatacatggaaagtcattgctacatggcccgataacatctccaggatgcttggcgataatcactccaaccccacctgcttgtttcactgaagtgactgctgctgacactggagatcgattgttcattgttgtgaaacataacaccacatttccagcaactggtgtgttgttaagcgtaagtgactcacatacactgcaatttcaatagtttgttaaagacagattcttatctattgacttatcactttccatttgtttatatatagaactgagcacaacaagaaccaatagcaaaaaaatgatagtaatctaataaagcaaaatgtcccataaatcaaaataagcttaattaagagaaaataattcaattacccaaataaagtggggcggagtcctgggttttctggatacaccaacccagtaaaaccaacttcttttcctctaaacattgcttgaccctaaaaaaacaaaattataaccaaaagaaaaattgataaaaaaataaataaataaataaatgagaaatttagaactcaaaaatacaataacgctataaaacacactctttagtctcagtagacatgtttacaaattgaattgaggcgaaaatctgtattttcaaaatcaaaaatgggttttgtagtcaaattaaattaattaccagtatcgtaaagttgttgccaagaacaatgccagtgggaaaagacctatcaacagtggaagcagcaacagtcaaaatccaaggtgaagtattatcaatggtgtgagaagaaggtccttcgtttccaccagcacaaacgacagtaatccctttagtgacagcatgaaacgacccaggtccgatcccatccctttcatcaatttgaggaaacaaaggaagatccgtcccaagcgacaccgacagcacatcaacgccgtcgtgtatggcatcatcgaaggccttcaagatatctgccgacgagcactggcctctcggcacgttccagcagaccttgtacatggcgattcgagctttgggagcgccgcccctaaggaggccgagtgcgatgcccttgtagctagcgttggggacgaaggagccagcagctatggtggaggtgtgggtgccgtggccgaaggagtctctgggggacttgaaatctggagcttgggtggtgttgaaaggttggcgattctcggcgagaaatccatcgatgtagtatttggctccgatgagttttcgattgcagtcctgtgtggcattgaatcgctccccagattggcatgatcctttccagcgttgtgggattgggcctaagccttcatcgttcaaaatcactgactctggccatattcctatagtggagttggaaatagagtgtcaccattccaacacactgataaacttaaaatttgtttttggctaaatttgtaaagaacacgtaaaaaattaaaaaaaaaaaaagtgtcgttttcttttctcacgaataatttttattttttatctagtatattttatgaatatatttaaattttaaaatcttacttattataattaagataaatttatgcttttttattgattatagtaaggaaatatttcaatttttatgaaaatagttgtggtgatgcatattaataataacacttaactgttttaaaaaaataacaattaatcatttattttcgattgtcaattttgtatttactaactctatttattatacacactattccacttatattagttttttaaatgagtttttatgatgcttttattttaattctatttcagacattattttttttttcaaaaatatacatgtaa

SEQ ID NO: 301300 - DNA, 5778 bp, Cannabis indica
atgtgattacatgtttagcgtgcatgtttatgaatgcctgttagataacatattataataacaatattagtgtacatagagatgcactgaatatagacaatatatgtttggctaagtactgagtgacgctatcacatcggtatgactagagtatgactagcataccgagtataggctgatattatggtcaatattattgtcgtacgaacgttctagacgcagtatcgtgttggacatgaggatagggttatggttgggtgtataggtgcttgattataattcgagctatagttatgttattatttatgcttttcttactgagtcagtcgactcacagatattgtttgcttgtgtaggtaaaggcaagactaaggttgagcagtcatgagaacgaggggatgaaaattgtacgtgtcgggacggttaggcctggagcgtacggtccttgggacaactagttgtattttgtctagtcgctaagtgacaacttttgtattacatactatgtttcagttgtaaatgttttgtaaacgggatcccagttatatataaatatgtatttattttggtattcataagtaattaaataaagttttaattaattatgtttttttaataaattcgttgattagcaacaagttacacaattaagttaaaatcacgataacaagcctaaactagtagagtgttacaaatctcttccaccattaatgtcattatcgtcgtctctgcttccaccaatgactcaacattacgtaccactcaaatatgaagattatccctttaatgttatggagtacttgtttaacacaggaagttggttaatttttcgagaaccaaagtcactttgataatggtcaaattcaagaattttatagtttcgttgggtgaatgttatggaatcaataataatgatttgagatattcttcttttcaggtttgttaatttaaactttaacgaatgaatcattacttttgtttaaatatatcataactaataaaattaataatatttgtcaccagttgcattaccctacttctaaatattatgctacagatcatcatcttcgaagcatatctagtctccactcccctccaatactttgggctggcaattttgtaatacaacgtgatgacacgactcgaaaacaatacgaaataaatgggtttgagtgacacatttaaaatctgtgtcaaaattgggtctacatgtttaacacgtttattaaacatattattttcgggtcaacacactaaaaatgacacgattataacacgtataagcatatataagtattttaaaaataaaaattatattatgtaaaaataaaaattcttaaaaaatctcataaaaatacttttcttcttattttctttatcaaaaaaataataataaattaaaattatgaattttatgagttttatgtgtattgatatacataattgtgttaactgtgtcaaattcttattatgttataacatatttaatcgtgtgttaaacgtgtcatttttcaaatttgtgtcatgacacgtttattaaatatgttatcgtgtcgtctcgtgtcgtgtgacccgttaagtaatcgtttcgtgttcacgtatcaacacaaatacaacgcaataacacgaattatcagcgctacaaacttgcactctcaacagttctctgaacagccaaatggaagttaattaatattccaccatctacaaatatatatagatagattctatataaataaaaagtgttttaacaatatttggaaaattttgactattaaaaatggtgttaggaatgtatactatacgtttgatgttttcaatttgccataatctaaaaatatcgatataattcattcttcaacaaagagttgaacacataagtttgtaaacacttttaaaaaataaatgaagtccctcaaaacaaaaacttgtaaatgagctctttcttgataccaaaaacaacaaatttttttttttttgattaggaagtgtgcgtacagcacaaacaagaacaacaacaaaaaacagacagcaaaacaaacaccagaaaaacagccaaagaaagaacaacaaacaaagagacgaattaaaaataacagaccaacgactcaataacaaaagaacacctattcctcatctatcaccaggatcccattccgtgaggtcatctagcactgatccgtccacggcctcaggatttatgcacccaactacgctcgaattagtagcccactttgcaatattatgagccatatagatgcacttgcgcgagatatggacaatgccccaatcattcagcttgtcacaacagtgaagaaaccttgatttggcttcctgcagactgaaatccacacaaatggacataggagcttcgaaggctttcacgacacaaagattgtcactttgaaaaatgatgttttttagacccaattcaatagctttttctgctgccaggcacacttctggcacactgcatgagcttcagctagctttggcaaagttgccatacctttcttaactgtgatcgaaagaattgtacccgaatcatctcgaatgactgcagataacaagcagcctgtagcagaaattgctacatcagagttacagcaggcccaggaggatggaggcggagtccattctaggacctcctcaactctattcgaggcaaccatgacatggtcatggatcttctggcgaaccgagtcaatgatcagcactaactcagtgtcctttttaccatgcactcgttggtttctttctcgccaaatagcttccacaatacataaagttgtagccatgaaatcgaaaaattctacgttcggagggagattcggacctttgtagaacccaagccaatccttccaacaagtgatggtaactagttcagtgcggatgccccatccaaggctgaaccaaatggccttagcaatgttgcacttctagaagaggtggaaagatgtttcacactcctccttacacataggacaaggtcccaaaactccatccaaaaatggggccatagataccaaaaacaacattatctttccttttaaagattttttttatattatgacacaaacagttttgattaaagacttaacaattacataactgaccatggtagatgataaaggaaaccacctaagacaatcatctaaatagttagcggaaatcttagaagctaaaaaagattgactaaaaactaaaagtttcacttctatacttgccataataatgaaaaaagtacaaggagttatctcactagagctacatcactaacaaaattgatttcccactctcataaataaaactaaaagactgtaaccaacacatattattgtactcttgtttagttttggtgagaataaagagatgagaatgaactacatccttattgccacttgatctgcagaacttttcttcacaacacctctagtgcataactcacttaacaactccaaagcctcagttgcaaatccttcataagctagaccttcaatgagaatggtatatgtcacttcagtgggtttacatcctttggataccatatgatccagaaaatcgatggcacgactggtttgcctagtcttacaaagtcccaacatgatagagttgaaggtgattgcattaggctttattccaagtccttgtaactcatggaaaagctttatagcttcgtcaactttcccttccctgataagccctccaacaagtgaagagtatgtaatgatatcaggcttgagacctttcctctgcatctcatccaatagttcaatagcacgatccgttttccccactttggacagcccatcaattacagtattgtaggtgatcagaacaggtgagcatcccttgctactcagttgattaagtatctccacagcaacatcaacattcccatctttgcataatgctgtgagcaaagtgttataggtaacaatatcagggtaacaccccctgcccaccattatgtccaagtactcaattgccctatccatcttcttctctttgcaaaacccatgaagcaatgggttgtagctcaaggaattaggtgtacaaccatgcttaggcatcttctccaagatgtcaattgctcgacctagtaaacctttcctgcacaagaaattaatcaagatattgaaagtaacaacactaggagaacaaccttttctaaccatctcaactaacagattttcggcatccatccacctccctgtgctacacatgctacgcagaataatattatgagtaattacatttggttggcagccataatctgatgccatgctatttaagaatttgattgcctcacccaatttcccttccttgcacatcccattaataagaacattgtaagttaccacgtcgggtttgcaacctctaatcctcatctcatctaacagcttcattgcctgttcaaccccactctctttacaagttgcctcaatcaatatggtgtatgtaaacacatctggataacaatcctttctcagctcccacaaatcaagtactttcatggcttctttcaatttcccactatcacaaagagtacgcaaaatggtattgtatgtaacaacatcaggatcaacactcattcggttcaaaacctttaaagcattatcaatctctccagatttgcaatacccactgatcagaacattgtaagttataacatcaagaacagccccagaattctctaacatgtttatgatctgagtagcctttctagtctttccactcttacaaaaccctcgaattaaactcgtacaggctataatatcaggatgatctccgcgattgaccattgcctcaataacacttagccctgcatccaatttcccatgtctaacaaatcgacggagctgattgttaccatcgaattcctcaaaattaatagaattcttaactttcggcaacttattagcattggagctaattaaagtttcaatcttggagagagcaagaacagggtttctcctatgtttacgataaccctcatttatcttacactcaacgttgtgagacagagctagaacccgagttttgcagcacactgaaaccccaatacagtaatttttcttagtaccattgcatacatggctaccattctccgaaactggtttgtgaaatgagcaaaacccatctggggttcgcgttatggaaacgattgaatccattttctccaactattctaccacccaaaacaagaaaaaagaaaaaaggcccaatactctgaaaatacaaaaagaaaaaataaataaataaaaagattatgtacgggaatatagagtactggaaaagaaagggaaagggtaaccttctcttgtattgaaagagcttttctttttcttctgttctctaatggagttttgccttatccgccgttctgtctttatctgatggaacggagagagaaggcttggcttggcgtggcctttcaatcatcacagttgcccttccaaggcccaagtagaatgttaaagtataaattatataagggagtgtttggaatagattaatgttagcaagagagtggtaatgttaaacattgtcttgtttgtttggaaggtttaattttaaaatgtcattcccttggtaatgtaaatacccttgaggagggtaatgttgatacattaaaaaaaacggtgggattagttattcccttctattatattaaattgaataacatttttaaattaataaataaatttaaataccattaatattatgatttattataaataaaatattacgatatatatatttagtctgtaaaat

SEQ ID NO: 301301 - DNA, 2032 bp, Cannabis indica
ttggacccactggtggggttttagtgctcacctcgaaagcctacgtgtgccttgctggaaacacagataacatgcacgattcatcttacataattaataaaatagtattaaaaaatataaaactaaaccttctaaaacataacaaaactaaaattgaatttaaaaaaaaaaatactaaaagtgaaattgggttgcctcccaagattgcttcaagatcactttaattaaggtcttcagcttgaagctcacttttcttcaaactcaatttgggtcaagttcaccttgtgcacccttgagtgctaaagtatcatacgaggaaaatattcttttattcttaggaatattgtaattgtcctcaatgtcatcaaaatgtttcaaacttcccacaaaacaacattttcattcaacgtcaagccacacgaaatcgttcttcagcctttttctttttttaccaagtattctttgacactcattcaccacctcaactctatgacaattatgaatatctattgcttcaaagacattaaatattatctcttcattttgcacacgcaactttaatttcccttttgtacatcaattagtgctctgctagtagctaaaaatggtcttcctagtatgattggaatattgcatcttcctctatatcaagaataagaaaattagcggggaaaataaatttaccaacctttactagaacatccttaatgactccacggggatgcttaactgaacgatctgccatctgtaagggaacagtagtagggcaagcatctcccaattttagtttttagaagatagagagaggcattagattcgcactagcccccaaatcacctaagaccatagtttcaataagccaccaatagaacatggaacattgaaactacccagatctttgagctttggaggtattttcttttcatattcctccaaagtaaatgctacagtctcatattcctccaaatttcttttcattgatagaatctccttaaaaaaaatttagataagttgacatttgctcaagtgtcacaacaaaaggaaaattaatatgcaacttcttgaatacttctatgaacttggcaaactgcttatcaactatcaagtgtatttttttttttgaagccttgaagggtaaggactcttttgtatcgacttttcatacttaggtttctttttcttgggaagttctttagtaaccttttctttcgttggactagtgacttgttgatccttacttttctttttttttgtctatcatcgttggcccttcatagttggttccactcctcaatgtaactgcttgacattattctttagggtttaccactgttgaacaaggtaaagtcccttaatttttccttgacaacaattttgtaatttgatccatttgaattctaggttgcgaatggatgatcttattttagtcatgaattggttgatcgtgtcggatgatggttccaattttgtcaattgaggaggaggtgatggttgttgtggtatttgtggtctttcagggtcataatattgccttggattaagcctaaaagttatttgttgtggagggtaaagaggtggatgtcgtggatattatggttgttgcccttgattattactcattgatagtgttgtcaattttaatacgcaagtgcacgtatcgttgttcaagtaataaactcacacgagtgaggtcgaaccacagggaactgaactgaataccactaaattagacttatgattctatttggtagataaataattttgatggagtttaaaataaagaaaaaaaaaacaagaaaattaaagaaagcatcttcaattacccaattgttattgttaattattattcctctttcttcatgtgaatgacaaattataaaattaacctaactcttttcagatcttttaggtcctaaatcatatgttatctattgcatctctaagatagactaacatacaatccgcattaagcaataatctcaatgcacataggctatgcaaatactttcgtttcacaacaaaacctagttta

SEQ ID NO: 301302 - DNA, 3036 bp, Cannabis indica
tttagatgtattttgatcgacatggaacactggatttgcagcaagagcaatggcactttggctatcaacccaaatcatagggcaatggtttaaagaaacttgttcagacaaaagagaagtgatccatttgagttgtgtagcagtattttccattgatctaaagtcgctttcagtacttgatcgaccaactacatgttttttagttgaccaagagataagattacctccaagaaacacatcatagccactcatggagtgtttgtcatcaacacacgaggcccaatcaacactagactaactggttagagtgtaatcattaataggtcaaaaaattagcccttctgacatggttcctttgagatatcggaggagtctcctgcaggcttctcagtgtagtgttgtaggatattttaaaaactggcttaacttgttaacaacaaaggcaatatttggtcgtggtagttgaagatattgcaaagcaccaatattacttttgtagagtgtaggatcgacaaatggttcaccctcttgtaataaaagttttgtggcagcacttataggattggaacaggatttggcaccttccattttaattttaactaacaaatcatttatgtactcggtatgcgacaagtacataccagtggagtcacggtgaatatcaacacccaaaaaataatgaacatcacccaaatctttgagtgaaaaggacctgttcaagtcatgtataagtcgagttatgagagcctgatcaggacatgtaactaggatatcgtcaagatagacaagtagaataagtaaggtggatcaagagccatacacaaataatgatgtttcagatttggaagcatgaaaatcccatttaatgagacattctttgattttgtcatagctcgtggagcctgtttaaggtcataaagagctttgttcaattggcacacatgagttggctttgttggacctgtgaaccttggtggtttcttcacacatacagtttcaatgagcatcccattaatcaaatcattacttacatcgagttttttgactggccagttagtcaaaatgacaatagagagagaattgttctaacagtaacaagtttcacaataggagaaaaagtttcctcatagtcaattccatgtgtttgtaagtatccacttactgtaagtctggatatgaatctatccaaagatccatttgcatttagcttcactctatggacccatttgttatcaatattatgccttcttggtttatatggcattaatgtccaagttcgagcagctttgagtgcactgatttctttgattcattgatgctagccatttgggatcttgtaaagccattttgagagacttaggctctgaagaaagtagtgactcgggcaatgggtgcttagttgcaagataggcctttggcttgacaattccactcttagacctggttgtatatgatgtgttcaagctacaatatccttttgcattattagagacaaatagtgttgtgggaattatgggtatatttatcgttggattggcttgataaactattgggaaagatttttgagcagcagaggttaaaggtggtggggcttgaggtggtaaaaggagtacatttttaggtgctatagtaggtgatggttttgagtgatttgtagatggtgatgtttctaggatattttggataggaggggatatatgtggtggtgcagtgggaggagaaactgtggggaaagaggtaccatttgtctcagtgacaacaacagaaattaaaccaatagcagtattgtgagaactagtaaaaaatgttgcaaagggaccatagcaagaatttgatttagtgagtacctattgcgataatgatgctggaaaaagaccagaatagtaaagctaattgaatatcacatctcttgcaatgaagattttgcatttatcactttcacacagataccctttgtgaaaaggagaataaccaagaaaaagacattattgtgtccagaaatccatcttgtgtgagttgtaggaccttaggtgggggaaagcaatcacatccaaatggctttaaaatgttgtattgagtcccaaagagacattcataaggacttatgttgtgtggcacaagggttggtaacttgttaatggtaaaggtagcacactgtaaatcatgccacaagtgagtaagatccaaaccagactatgctatcaatgtgagtccaattttagtgatgcgtctatgctttctctctgctcttccattctactcatgattatgaagacaaggatgagagagcaaaatttcttgatctgctaagaacttggaaaagagtttgtattcaccatcaccatttgcttgaacactctttataggtaaaccaaattgcttttttgccatgcttttgaatctaacaaacatgttaaaagcttgagatttcaaagttagtgggtatatctaagtgaatcggctatagtcatctaataattgtatttaatattattgaccatctttagatgccacatgacatggtccccaaaggccattatgaactagctctaatggttgttcaacatgactatttaacataagaaaaggcaacttgtgacttgcctttttgacaggcattacaaaattgtaggttgttgatggagctagaattggatgactggggaagcagtttggtgccacaaattgacatcatcatatttagatgaatagaaaacaaaatgtacagacagacaagaaatcaattttattgattgaaggtttattacgattgaactgagagaaaatattcttaaatatgcaattacaattggaattacagaatgaatcaactaaagtatctgaagtaatggcaaggttgcattgtaaagtcgatcttgctcgacttgaagaatcactaaggagataaaggccatctctagctttccttttaagcaatacaactccgatttctttgtccttaacaaaacaacagtatttatgaaattaaaaaaaaaaattgtcttgagttagtttagagacactaacaagattttt

SEQ ID NO: 301303 - DNA, 4090 bp, Cannabis indica
ttctcagcagcaaagcaaaagttcagctgttctacctggctgagttgaatgctttatcaacttttagcctcttgtcatgtacgaaattccttccaattctatatatgtgcaaattagctgattataatatcaattgcttctctaaggttgacctgttaggagtttctgctttcttttgatggtactctgaattgcaagtttgtataattcctagtacatttgttgaagaccttataacagaatagtttaaaaatcaacatatcataatatgttcactcctaatcttctcataaactaaaatgaacattattaaatgcactttcagaccacatttgtaaaattttcagctctcgaggaacttcctaaaagaagcttttgcattgttttgatttagctggtccctgatgtggttgttggaaaacttataatatctttgaccattcacagtgtgtataatcaaggaacttttttcaaaatttttagctttctcttgttcaaatgtaaaatgtatattatgtgtgtactggagggtgcatttgtgatgtagatgcattgatctatttcgttgaactaaattgactggtgtcgctgttctttttctgcctgaagtatgtggaaattggtaaacatagccaattcagtgaataatgctgagggttccctctagtatgtttttgtattttcattgaaggtcacatactctttaacccaatggtattgcatttttttgtcatgctttgcctccaattatggtggtagtaagaaataattccatttgaaatacagaactcagaaagattaaagaaatcttttgctcatgattctggattttggagcattttccaaaatgtgttcttcattttagctaggaaccacactttagataactgttttagttaaggagataagaaagtaagtgggttagatatggaaaaattatacaacatcgattaatagagaactttgaaaacgattcttcgtcatgaacttttactggagctcttctcttcattatgtattttacctgagtgggttgttcattggtggtatccaattgctaatctggagtgaatgtttaaggagggtgagtgaattatttcaaagttgagtttagatctacgtttttttctttccaagtgtgagtttagatccatgtgtttttcttttcaagtgtttgagtacattgtgtgctctcttatgattgctgaattaatatcgtgtgtacgttgcttgcagatgcttattgttcgacattattatggagggcagttcattcaagtctgcgagccctctacaatgttaattacttatgaattgctgatatagaaatcaacgtagtgctgttgttactgtatttttgtgatgatatttgaaataattaccattgtgtttttactgttattttcttttcgatttgtgatcatgttattatattttacggggacttaacttgctagatgtgtttgaagaagatttcaagctaaagtttagtaaagaaacaggtgctgaacttactctgtacgagcttcgactgttacaagatcgacttgttacttttctgcttaaaatgtgttgctgatgttggtcttggtggatatttggtttagtattttcattgcttctaaagaatgtatttttcactcgtagcaataaaggaataggcatgactttatatttgtgtgacaaaatcatcttgaaattgtttgatacaagaatgactctactatcatttaagcaaatattacatgtaattctgtactaattacatgtcaggtctctatccaactgcagccaggaaactttctcaacttttttctgtttatagttttcttcaaccttgctacatttgcccagttacctgcatcagcatatagatttgatagcagtagtttgttgcctgcactctcaggctctagctccctcaaatgcttagctgctatttcagcaatatctatattcccgtagttcctgcaagccccaagtaatgctccccatataaacaaatctggctcaattggcattgtcttaaccatgtcataagcttcagtgagttttccagctcgaccgaggagatcaacaacacaagcataatgctcaagtcttggattgattttgtactcttcttgcatcaagttgaacagactttgtccaagatcaaccatgcccatatggctacaagcagtgagaactgcagtgaaagtcaggtgatcaagtttcttctcgtcttcctccatcatctgtttgaaaagctcaattgcttcaccgcagaatccattatttgcgtacccaaaaatcattgagttccaagttactgtgtttctttctgtcatcttgaagaacaatgcccttgcatcatctatgaatccacatttagcatacatgtcaactaaagcacttcttacgaatatattatcttcaacaccagtcaccaatgcataaccatgaatctccttccctcgcgcaacatttgccacaaccgaacaggcagacaagagactactcatagtagctgaagtaggagataacccatgagccaacatctccttaaaagtatcaaatgcttcatcattacgaaaattcttcaccaatccagatataattgaagtccaagacacaacatcaggtttgatctctcgatcaaccatcttcttaaaaagttgggaaaccattacctcatcacccttttgagaaaacccagctaccaaagtgttccaagttactatattaggtgttactgctccttctatttgcattttccctaccaaatctaacgcttgttcaggtaatccacgttgagcatagcctgaaagaagagcattaaacgccaccaaatctttttcctccatggtatcaaaaaccccgcgtgctttctctacttgtccaatctttgagtacatatcaatgagtgaactgttaacaaaaatatcatagtcaaacgagtgtttgagtatcacagcgtgaagattctctcctattcgtgaattggagaggtgaccgcaggctttgagaacgctaggaacgataaatatgttgggcttaatacccattttttgcatttctctgtacagattgagtgcctgttgatgaaatccatatcgagcataggccccaataaggacaatataacggcgaatatttgtttcaggaattttgtcgaacacttttcgtgcattgtttagtttgccacaaacaacgtataatgctataagcttagaagcgatatgggtgcgacgaatcaacccattaataattaggtgagagtggagcactcttcctgagttcaagtctcgatcacggtcatagatttcgatgaccttcgcatatgtatcaactgatgtctgaaacaatttacggtggattatgatgggattgctccgatggattacgaacaacgtcggccctcggatgcaacggcgcattgcataagcagttaccggtggtgaaaactaaagaattaagaacccaacactagaattctgtcagaacgaaaaagaactcattttggcttgttttgacataaaggcaggactcgcatccacctaaaaaaaagaatcagaatcattagatcaatcacaggatcatggactagaaacatcaaattaggaatgtcaatcgggttgagttgggtcggacccagcccaatatcactttggcccgacccgccccggcccgactacacccttcaacctgtcgggtcaggctcggttcgatataaatgggtcggacccgacccgacctgcccattcctatctatttatttgtttttaaagaaaaatagttggattcatttggtagtaaaattcattaggtaaaaatttaatttctttttttgtatgaaaattagtatgattcaattatgcataatagaggaaaatttgagattggacttttgttcctaataatattaggtacaacgataataactactaactgtaaactcaaatactaaacactacattttgtcctccacttatattttgttctcatccatgtcctcactcatatcctaaaaataaaaacaatgtatattctaataatcaagatcaactacgtaaggctcccgcaaaaaattaaaaacaaagaaaagtat

SEQ ID NO: 301304 - DNA, 2215 bp, Cannabis indica
cgtacacttgcgtaataaacataaaattcgtaacaagtattgtgcctggtctggtcaggctgtgaactaccaaaaatccatcgttcatttttcaaaaggagttgaagcgaggagagccactgatattgctgaaatcttgggcatgagaaagatgaaaaaggatgcaagttatctgggcctaccgttatttagatcactaaatcgcacaaaagatctccattttcttgtggataaagtgctctgaagggtgaatggttggaaaatgaaactattgtcaaaggcctgaaggacttgtcttatgcaatcggtgggttcatcggtggccacctatgttgcagcaattgaagtcatccccagatcgatcgttactaaggtggatagatttctcagaaatttctggtggagattggataaggggaaagtgtggcataaaatttcctggagctcaaagtgtaaatctaaattcagaggtggattgggatttagaagattggaaaatgtcaacaaagcgttcttaatgaaatgggcgtggaaagctcttatcaatcaggattcgatatggaacacaatcatcaatgcaaagtatattaggaaaaagtttctggatctagatcgaaatccgtctgactcgggtatgtggaaggctatcctaggggtcgatccgttttcctaagggactgtgccgaaggattggtaatggaaatgatacttccatctggttcgatccctgggtcatatcgattaacagatgcccaactccgcttaaggatgctacttctggtgtatctcaggtttgtcagtttctccaaaataatgagtggaatgttgatatggtatacaattggtttagcgattgggatgttgctgctattatcaatatggctcgaccagagagggatattccggacagttggatgtgggctaaggaaccaaatggtcagttctccataagattagcttgcaagctgatcaatggaatgaaagtgaacaggggccccgaaccaccatggaagatggtgtggaactcgaaattacatccgaggttgaagttcttctggtggcagatttacaggtatgctctcccaacaagaggaaaacttggctcctttatccctttagattctgatgcttgtccttgctgtggaaatgcatccaaatcaatttttcatctttctggaagtgttgctttccaaaggctctttggtttgacacgggatgggggataagaattgatgcggccccagttgagaattggcagcagtggacggattggtttcttgatgctgccaacaggccgacgcagatcagttttgaggaattcatggtcaccactttgtgcataacggaggggatctggagagagaggaacttgcagattcattcggataaggccactcctatgctgcaagtgtccattgcaataaaaggaaaaattttagagcactcgttggttgtcaaaaatgatgttcatgatatcgtaaaatggagccccccctcccccccagattgggtgtgctgtaacactgatatttctagaaatggagatacaaccattctcgcggctgtcctcagggatgatcatggcaccttggtgaagattaaaacctggagtactcgaataactgatctaaagatgggtgaggcgctggctgtctgtatggcaactgagtgtggttggtggagagtgaagtcaaaagggttatttttcagtgcgacaatgcagtggttgttaaggcctttgcatttgagagcgactatgaggctgacttcaatctcctatactcgcaccacagattcaggaattggtgcgacaaattcatggaatgggatattgttcatatatccaggaaatgcaattacgcggcacacaacttagcaaagtgagcgatggtgaacgaccgggtgggcaatatcaatccgagtgatttagcacagggggtgatcgatgattttattgagtggaagcctggagattgagctctggagggctgtttctagccatcttatgcattttttgttagtctctatttgtcctattttagtttgatctatctacttttatgtttttttttctttcagttgtttcggtctgtttgtattgttggattgaagtgttggtaatgaagttttggttgggtgctggtttgcacccaccagtgataaaaatatatatatatttaatatatactagcaaaaaactacgtgcgaagcacgt

SEQ ID NO: 301305 - DNA, 3399 bp, Cannabis indica
aactaatattacgtggacaactaaaagtgtgtcccgtgtacaagtgtgtacacgtggacagtccaccgtgacacttaaatgtgatttttggacgaatgtgtgcagagcaaaacggaaccagggtttaggtagtttagtcgccaaaaatttgatttttgtagttaagtgttacaaaccgtaaagttcaggtggtttagctgccaatatctcttctgaaaaatatagggtctattttgtcatttaacaaaacagatggttcaattagtaacttttgcaaaacacagagtctaaaatagtttattacccatatatcaaacttaaaacttacattatttttttttcttttcctaagctaaagcaattagattaaataaaggtgaagcaattagattaaataaatgcccactaaacttattaaacccaaatattaatagctacctcccattgagaaatttgactgtttatgcatatattaccttaaaattatttccctaaacctatatgtattaaaattggccatatgtgtcaacatttttatttttcccataatatccctcacatttcaaaaaataaattagggttgccttctctctttccctctctctcatactcacgacgcaccccaatagacccacgacatacctacggcagaccccaatcgacccacgatggaccccaatcgatcctatacacgacactcgacgcacgtacaaccaaagtgagacccaacccataacccacggtgcacggaggttcctcggacaaatcggacacaatgtcaaaggtgagttcatgttttgttttttagttttattgattttatttgtgattttacagttaaagatatattatgttagatttagggatagatttaggtttagaatgtcagatctgtgatttcggggcaaggtctgctgcacatccgatgtaggtctgatggggtccgatgggttcaatgaatctgtaaagttgcgaggtaggagacgtagttccaatgggtggccgatgtagggtccaatgtggggtccaatgtgggatccaatgaggggtctgattgctttttgtgtattatttattttggtcccatgtgatgtaaatggggaaggtaatttggggataacattaaagttgacctagattacaaatattagtaattataagtttaggataaaattttatggttatgtaagtatatttagtcaaatttccctaataaaatcgattatctcattataatcataattacataatcaacattataccatacatatagttatttatatatactaatatcgatactgtgtgagcattatttaattaggtaagtcaatataaaatattctaatattatgattaataattatttgggtaatttgcgactaaactcccttaactttgaagtttggcacgatcaaacctctagactggaaaaattatggttaaactccctaacctccacaatcgttttgctatgtactcctttcgtccactttaatttattaagtgtcaaagtagactgtcacagtgtatacaagtgtacaagtgacaaatttttattggtccacctagtattaataatataaatattaaaaaaaaaattaaattaaaaaactagaataaaaataaaaaattctttttttcctcttttttctttccttttcttttcttcttctcattccacgatgcctcctctttgcttggtgcgacgccaaagtcggcttcgatttggcttcgagtctaattgtggtcgacggggatgggatggaaatatttatggcattcgacggtgatgagattcaaaacctgtagcccagatttggggtttcgtcagagcacattacgccattagctctggccacagaccacaatgatttgggaggttcttcttgatttgtctcagccaccaccattgctcttataggtattttgtttttttattgagattgaagaaaaaaaaatgagaaagattgaggaagtgggagttcgtgaggggaattttctgggtttatggggacgaagcttgagaaagagggaggattttctgagttgacgaagaagaagaagaaaaaggaaaaatttaatattttaaattatttgaaaaaaacttgggaaagagactctctttgattgtacaaatatgagatttattgaatttttctggtttagattttggtttctgaaaagaatagatgggcaaaatgtgacttgatctcacaagatttgatgtgtatataatatgcttatggtgttggatttgataagtatatatgtatacggtgttagatttgatatgtatatatgagattcctggattgtttgaagcgtgttagtatatgtatgaatgatatttgtatatgtacacaatagttgcctagaattggtgtgggaagtctgttgttaatgtacacggcaattctaaaggcttcatcccaaaatttgaggggtagggaggcttgagagagaagggcaaggccattctcaactatatgcatgtgttttcgttcagctaaactattttgttgatgtgtggttaggcaagggtgtctatgttggattccattgtctattaggtacttagagaaagacttgaattcaccccaatctgtttgtaggcatttcttccctaattgtaattcagtctcagatttaaagtttaggaacactttaaaggggcatcaaacttgtttttcaataagtatagccatgtaaaccgtgagtacacatctacaaagtggatgtagtacttatagttattatggagagagtgtgggagagtccccaaagatctgaaacaacaagttgcaaaggctcagatatgacagtgttggaagctttggggaaggggaacttatgaatctttccaaggtaacaagttgagcaaacagagtcatgtgagattttattgctaatgtgtatattataagactgtaggacagtttgtacaattcttttaaaaagaatgtcctagtctattgtgccacaaagtaaaatcattttcaacattcgaattacatttgatacatttggatacagagactatggcattgttgagagagaccacgaaggtagttttgacaggtggggaactttggtcatggctgctactgaattgagagacatgagtattgataggctgttcggggcaaaaaggaagaagttgaacttggcttgagtcaaacgaatacaagccattcttgtgaaaccccttcagcaaaataatatgacttgaattgtccttaacataacacatgtcagcatgaaattcaaagaatacatttattatcacaggcaaattttgacacactaataagattctttgtaatttcaggtgttagataaattaacaattaacccaagatctatttgtatataacatagaacacaataataagatataat

SEQ ID NO: 301306 - DNA, 5663 bp, Cannabis indica
tatcctccttgtccatcttaataaggaaaaaatgctaagtgttggaagatataattcgtcttgtcgtattcttttattagcattggttatgctaggtggtcttctcactatgtgtaacgcgagacggtagtgtgttgtcacatttattctgctcgagtgggtgaatatcctcttcttgtctattaatttgagtatatcccgagacagacatgcaactcgtcgataccagtttaatagttactatctttgtctcgcgttagactacctagtgagcgagtttgaacattttctattaaatttatatttaattataatgagttatttaattatagtaatgatacaagatcattattatattctttgagttgactcacgttcctctcatgtgacacatgtcagtttttggtacttaaccgaacttcgagtataacacttgcaaaatggcaacgatgtatcgttagcttaattataatgatggggaggtacatgaagaaaatgatgagggaggatgggatcttgaagatcttgagcttccacctaaagctgaaactccaaaatctgccaacaatgcccgctcaatatttgttgtcccaattcctggtatggccaatagtcaaatttgggtccaaatgtcatctcttgcggctgaacatgcagctgccagtaattttgatactgcaattcggtagtcattctttcttgagttacacaattttgctccattaaaatcattattccttgagttacacatgggtagtcattcttatctaataagggccttctcgtcagctcttgtgatttctgttgcgattgagaggggatggagtgaaacagctagccccaatgccaaaggctcccctgttctagtgttcaaactttctaagctggatgagaagcttaaagatgcatataaggcaacaactaatggaaatttcaagaggctttgtgcctttttctaagtattctacatactattcctctgatatttgtagattcacggagagaggttgatgaaaataaaagaaataattattatcgtaaaggaatatgttctgaatttgaagttggagctcaagaggaaggaaagtgagggtgatccagttcaacaacaagagctggcagcctacttcacccactgtagtttgcaaataattcacttgagattactgtgtgctacaaagctggtaatcttatcactgcaacaaattttgcaagacgcctgttggagaccaatcccaaagataaccaagcaaaaactgttggaggcctcccagttgaactatgagttcaagaacccttttgttgtatgtggggcaacatatgtgcccatatatcggggacagaagaatgcctgctctcatcttgtgcctgcacaagaaggtcagctttgtactgtttgtaatcttgctgtcgttggatcagatgcatcttgtttgctctgttctcctaattcccaaatcagatgatcttaataccgagcaagtaagatcattttttccacccagtaaaggctatatggttttatatgttgtttcatcttctctaccaaagacaatattttgaatagagggattcctttagttcgtgtttatgttgtatttgtgtttttaataatctatgttatcaggtttcatctttctcttccatttgatctggtaggatttcattctatatgttgtcatcatttttactgtaataaacttcagaacttcgacaagtctattaggctgaggtggtggggatataaaatgtttttcatatggtgttggtaagtgaagcttcatttgttataatcaccaatcagttgtataatttatttgtaaacactgaacaagaatagaaaaagtttaatgcccatattctgtctttagcgggttcaaattatgaccagttaatctatatatccattgaaaacaagtttctcttttaaaaattgtgagggcttcttctttgatactcattttaaatctcttattcttgtccctttgggatggtgtcttttgttgcctctttgtctttgaatcttttaaagcgtatcaattatcaatttgctttgtcctttggtaaaggatatgcaccctttgatgagacataaatacatagtttaaatggcaaatgacatcaatataatctactttagaaagggaaacctatgatctataaatcaaaatctatatatataactacgttcttatgatgttctccacatgcactgggcactaccatatacaactcttatgtattaactactaaggtcggcccactctacaaatttttaattaatacatgcccattactattatcgcatttctctactctccccactacaaagcctaaaaggctatatagattaagggtgctattactcttaattgttatttaatagctaataaaagaaaatgactggagactttggaatcataattttgattgagaaatgtaaccaataatactttgcattattttatttttagtgcaagagtacatcacaaaattacgactactgatacggttaattagttaaggaaagaaaacccataaatatagtgaaacatggagctaaacctaaacactaggtaatattttcattacaagtatgggaataagcataggcgaaaagctctacatgtacttcggttaggttgtaacagatgattaaagtaatagttcccctatatatagatttaaggtaattttggcctctctacaaatatcattcgtctcctctctacctatataataggttttctattcagtttttttgaccattcaattgcaatgtataacacatattttaattttcattagttaaatgtaaaacggaaaaaaatgaacctttatttccgtttcaaggggatatatataattagatatatatatatattacatacgttgggattgtttactttttatttgattcatgtatttgctaaaaagatatataggttggtagtcctatctgttcaaaggaaacattgacacttacatgtgttgttggtcttaagttgattccaaaagttgagcgaatgacttgaaaaagacaaccttaagctataagaaatagctaaaactattgctacttttttttttctttcttcctttccccatgtatgtgtataaatcctttcggtaaatggaaataattaaaattcttttttctacctcgataagtgcttgttttatagactaatccatcattaagtaacacaattagctagtcatcatatcttaattgtaactgtatataatcaacactctcatttctatttattgatctttaattaggcccgcaaacacatatcacttttacctttctttgatgataatattacatttacacacaagtagaaggaaatatacgtagctaagatgattataagattagtcataattaagtactactccgtctcgatccttcggtcctacccccaccattggtgaccaattagttatgagtgactaaaatttgtacaaggttgattggtgttattaaatttagaaacatgggaattattaattttaagaatttttattttatttttttaataaaatttaagagcgtggagtggttttggcaattggcgtgatgtgaatgaagggtcaaatgactgaacgtaggagttaatgatttttggctaaagttgaaacttaaagcattaccttttatcggtaaaaaaattgggcttttgggcaatcggcggagatgagcagaaagagagtcaattggaaggagagcactgggctcgagagtttgacagacacagacacagacacaattattggtactcacattattatttttattttttattttttattttttatttttttattttttttcccttaaataaagtagagaagagatctagagagagagaaagaaagaaagaaactctcattaatcatttattcatctcattgcttgttttattctttttccgaaccataattaatgtttaatgtattgtattgaaattattgattatatttaagttaaggttaattaaaatttttgcctattatgctctttaaaattttaaggttttaaatttttttttataaattattgatatttttggatttagaaacttttgttcaattttagtaaggaaaatctaatatagatgaaagtttcaagaagcataatttggtacatgtcgaaattcgagggacataatttagtagatattaaaacatggggagcaggatttagtacatgaataaacacagaattagcaaaattgaattaaattacacaaaagtccttaaatcatacaattttaatagttcaggaggaatttttaacggttagaaaagtttaaaaagcatgatttagtatatttcaaaatgtagagagcaaaaatcttaattaagtttaagttaattaagtactctctttcattaattacttgttacaatgtcaagaatatgatcattctttctttatttatctatttaattatataatttttctaactaattgtcacatctcaaatattttaatgttaatttgatataatcatggtaattgtaaatatagtgttatttaagtggaatactgatgattatatgtttgaatcacacataataactagtcccagatttttctcaatcaaagtaattattaatacaataagttatttaactaattaaactaagcacaattacactatatctagatgatcataatgacttgacatcgacaatatgtaagcacgaagcgattattaatcgaatgcttctttatttatttttgccaagaaataaattgttaagattgaaattacgtatcattttctgacaaaaaaacggctaaggcggattgttgtctccacgtagatattcatatgctaaccccactttattactggaagtctggaatttatatatacagacataaaaccattttttggtccaaatatatattgtgtcataattcttgtccattaaagagttagcattttagtattaataattgttcttatttagtaatatggtaaaaaaaaataaaaatagatgaacaagaattaattaaaacacatttttttttgtcagagataacttaaatcctacatattaatatgtaatatttaagtattgaaaagcaccaataaagcatgcgttattaatttgtagcattctattaattatgtagatatatttatagccacggctctatgtactataatgcttgtaaaatgtatcaattagcatgatgtcgtagcaaattatgaagcttcatttaccccccttatttgttttttaattgataacataaatacttactattcttatttattatcaattattttccaaaaaagtgatcatgtaaatgtttacttaaaatgagttatttagttttgctatccaaaacttttattggtttgaaaagaaaataaaatttatacagttgactaggggtgttcattggatcacatccaatattttgaggcctatccagatccgatccaatcatatattggatattagattttatcatccgatccgatccaattaatttcgtcatccaatcgatccaacatccattggatgttggattggatcggttctatccattggatgtatttcatatgtatttatttatttaatttgggtttattcaatatttaaatctagtattttttggatcggattggatccat

SEQ ID NO: 301307 - DNA, 1973 bp, Cannabis indica
ttctaatttattataaaaaattagatcataatttagactagttataaataaaaataacttctaaattgtaattagttatacattttctaagttattaaaaaagtgtacttctatataagtataattatatatttttttttgactaaagaagaagatttcattaatcaaagacaaagcaaagctacaacaaggccacaaccaaccagccccaaaactcccagcagatactgaagaaggcgcgaaaatatgcctttttcagcttgcataattctcctatttttaagctatacaacctgtatttgactatatctttaatttcctttacagtttttgaaatagtataacatctataattatgcacacactgatttctatttttccatagcaaatacacaatggcagcaacaaccaaattaattaatcacacctgaaatctttcttgttatccaacacaaccagttaatgtagtccaaaggccaagtagagcacccacaccagtcaaaaacttgctgcactactgctttagaaaaccagcacctgaaaaacaaatgatgatgactctcctcttcatcacaacaaacaaggcagccactagtctctaattcaatgtgaaacttagagaaattatccctagtgagaagatgaccatgaaccacctgccataggatgaacctatgcttgggcaaagtaaggttgcaccagaccaccttgtaatacctgtctgtgtcttggtgtagcagcccgttgtaaagccgagcagcaatatattttccttttttaacagtaacaacaatattgttcttgctaaacctcgtccttagttggcatatttttttccaataccaactaatatcccccttcaactcatactcccaaaagtcaactcctttgatataaatgttttttatccacttaacccaaaggatatcattcttgttcatgatcgcccaaattaatttttcaagaatagatttatttcaattaggaccacttttaaatccaagaccaccaaaaggtttaggaagacataccttatcccaagaagccaagtggatcttgcttttttctcccttagtcccccattagaagcccctacaaagtctttcaactttcttgataacactttgggggagaatgactatgctcatccaataattgcgaagccccaaaagcaccgaatggataagctgaattcggccagcataagaaagatacctagtagcccaagtaaccagccacattttaatcttcttaatgattgcatcacaattttctcgcctccacttagtaggtttaagaggcagtccaagacacttgagagggaaagaaccctctccaatatgcacatcatccaaaatcataactttatcactagaggaaactcccccaaaaaagaccaaagacttatccttgttaggaaacaaacctgaaacctccgagaagctctccaaagcaaccttaagatggtggacagccgcacgaatgcccttgctaacgaggataaggtcatccgcaaatcaaaaactaatcaattttaggcttttgcacataggatgaaacctgaatgatttcttagaggattccaacatcactcttcttgagagatactccataataagcacaaacaaaagaggtgacatcggatccccttgtcggagcccctttctccccttaaagttaccttggaatcttctattcatcgtgatagtgtaagatgtgcctctcaaacacatcataatccacaaaatgaacttagaaggaaagtttaattcaacaagtaagtcctctacaaatccccaacccactgtatcataggctttactaagtctatcttgatagcatacctagaagagacaatcttccttccataattctttatcagatattggaaaatcaagatgttatgggcaataaatctctttaaattacatattttttaaatatgtttatcatttataggtacctatatagaa

SEQ ID NO: 301308 - DNA, 6574 bp, Cannabis indica
acataaggaagcaactcggccagaagtttaagtaaaacatcaacattccagcgttctctttcacctaaaacatgaagatacgactccacagatccttcaacccctgatagtggtgggcaatgctgtaatatgacagccattttaacataaagaggttataggaagaagaatctgaaagagaaagtaaaaacaaaaaaaaaacaagttcaaattaacaatacctgcacagaactcaatatatgtgatagaagaactcttaaaacatggtccaatttgtttccccattttaccactgcaggaactaattgcttcagagtagtatccaccactgctccagaaggatcacagaccaattggaacatcagttcctcaacctgtaaaacattaataaactattggagatccttgtcgtaatttacttcagtttatttctcttttaagttattgttttacgtggaaaaggctccatccctagaccatgtgttatcaacctgttctagagcttacattgtagccatttctgtcaagtcagaaatcttctccatgagagcctcgaagcatatttagtgaggctgaccttgaaatatttgtccatatttggaaagagcggtagcagcacagcgagattacgtgcagcggcctcacgaacaatagttgcagaatcctcaatcagttgttgaacaattgataaaataagtgaatcgcgaatctcaggtctgacaaattctgcaagctgtccacatgattgagcaaccagcaatctacgctcctcatacatatgatttatctgcaacccattaaacaaggaaaagttacatcaaaagtttaaaggatacaggaaaaggtcgataaacatggctgtaacttacttgttcccaacactgtggaagcaattctgtttcagttctcatttctcctacattcttagccagagtaacacatgcctgaaaggaagtttaaaagattcaaacatcatggcgaaaattgtatagccacatcacaaaataaatgtattcctacatccataattattcgtctttgctgttcatctggacgttttattagattaaacaaagtgtgggtcaaggaatcccgagtgctgctctctggatggcgctcgattgcacacatgattagaggaagaagttcctgaaagtaaaaaagatgtcttcagaataatagcctagtcttgcagattacaagaaatatattcaaagaaagcaaaaaacaacctctcggtggttgatcaagacataaggaacaatcttgggcaaggcatcagctagaatctgaattgtccctggaccctgccacagtacacacaactttagaattggaaagatatggagagcaacagagaaagctatagttggaggctttaaagctttcaaaaatctaatacagcttcaaaatcaggtataatacaggaaaaatggacaacttggcagcttttaatctgttcacgtgtatctgaggatataatgcctcatacagatcaatttacttgccataatttcagaagcagcttcagaattgaggacagatgactttagaagtagcctgctatcatctgacgaaagctcgctattgagcttagagacactcttactgttcaatgaagaactaatatcactggaaggattctctagcagccctgggacaagttcagcagatttatctttcctgacatcatagatttgagtaatctgtgattgagcatcatctccacctacaactctagaagctgcatcagttggactaggaatcacacttttatcttcatgtatctcaaaatatttctggtatggttattatcaatatcagaatggacagaaaccagagaattcgaagcttctgtagtcttgattttaagttttctatttccatctgcagggacttaatctcttctttgtatctgtctaaggactcaggatgggcttgatcaatatcagtagcagataaatttctcccagaacgaaaaccttcaatttgcattttcagtgccgtgatttcagctctgcaatcattaagatcctttctttggagctccagggactgctttaaattttgaacctgaaacaaaaggtgaattttgtcttatacatacaaatttcactttaagagcagcacatgaaacaaaatcatattgtaacttactaagttctctttgtctttgaggtccttctgaacagcttctaaggctttagttaatgcacttatttgaccttccgctaaatctttatttttgagcaggcttgctttttcatgatttagcctctcattttctttctgtagtgagtctttttctcgaagcattgcaattttctcctgcagaaaggaaggaatccttaaatatgttcagaccagcaaaagttagagagaaaacaatgaataagtggtacagcagaatgcacagctactaataggcctacagtataaataaagtgtctactattagcatctttaaatgcaaaataaagaagacattccccatccatgaactttggtaaattacctcagcagcctctgtagttgatgaaagatactgataataataatgtcgtaaggcatctggtacacatgcaggcgtattctgccaaacatctaaattctgatctgcaacctgcaaagaaaaaagtgaggcagtaattcttcaagattaatcaacagtataagatactatttttggattagcaatatttggtaattcataatctacaatagtgtgcgtactcactttgaggtctcccaaataaaacgggagaagaaacttcagggtaaataaataaataaaactggtcaaaaagttctaatctgataggattttcctctcaaattagattagatcagcaagctcaaatgttttttagtgaactacaaggagaaggaataagaaaaatgagtttttattgaatactccagattccaagagccctgttctctcccaccaaaaggttacaaacccaacaaaattctagacaccctcccaaggagcctctcaacagactattttaaaactcactagactatcgtggacgtcagccacatactaccacaactcacataacaacttacaacctgtacacccataactaacttttaatcccctgctgctgccttgccgtagcctctgaactcaacaaacaattacttaattgagcaaatgaagaatgccatgagcatgagtttacaatcccaaattcttcaaaattttaatgtgaaataatacaatacatgccaaacagttggtggcagaaattcaaagctgatccaaattatctgtgtgcatagtaaagttgcaatcacctatatgagtcaattgcttaacataactggcagaacatcatcagtactcatgaaagaaattcctatgtttaactttatatagtaaaattgataaagcttgcccttatcacctgatactgtaccgatactctgagtgggtagtataaccctctacattttgcactcaaactttaagggttcatataagtacaattttcactctttgatatgccccgttggaatacagctcagaaattatagacaagtagcagcataaacaaaatagagaaccatagaaggagtatctgactttatattgcagcaaatagaagattacagtgaaagaccgtgggcattcaagaggcctaggctctccttgatgctgtgaagaattcacttaattcaagcatgcctttccaattcttcttagcctcctatataattatattgcctcccaaacactacccttagtacaaagacccgtgtacccttttgttgctaccttctcccaagctgtggcaatcttgcggtctaacacacttctactaatggattaaaatatgtacataaaaacaaataaacagaaatgcatgtattatgcacatacataattgtatgtgcatccacaaatatataagtagcaccattaaaaaacacttatccacgagagatgagtcctttctccatgtacacataagaaaaaaaaatataatgttacaaacctcttcataaaatgtcatggcagtgagccggtaacccgctataagcaaatattccttcacagcacagttaagatcctgacgctcattgtccttcaaatgccccaagtcagaaagtacattatttctcttctgtcgcataaattctgggccatggtttacagactcatttacatctgcccctgaatgcaagcccaaattggagaaatgtaaaatagaaattaccaattacctaatgggagaacaatttacatagcgcctaacatacaatgtgccagaaattgcaggatgccaggaacaacacaattttgaaaataagaaattaattccagagctacaatggagactacatttttagcatagtcatctaaccctgccattttactaatatactcatgctggagtacctaagagataagcatatctgtccatgactacttgattgagtcgaccttaacagttatagctttatacaacaaccttggtgttcagaaactcaaactattaaactagaaaactgaaatcaacacatacaaaaggtgtagtcttacgaaaattccaaacaatataaaggaaagcctcttcaaaacccaaacttttgctacctaccatttaaatcatttttaggaaaatcatttttcttctgtaactcggacttaagtttcaaaatgtcctcttgggccaagcggagctcatactcgctgattgctaatttttctactagtgcatctttctcctctagcaaactctggggatcagcgactgctttacaagaatgaacaagaaaataatcggtattagcaatttaaaagttagatgtaatgacaagattataaattttgaaagatgaaatgacaatcatttaaagccatgttttctatttaattaaactatatgttgtaaattgagagattataaggtaccatcccgaaaatacaaacagatatgttagacaaaagatacatagttaagaaattacaaactaaaaaactcgttaatgttttttttttcagattagattctgaaagagaagccaattcaatattccaccaatcaaataccaagaaaatgcaaagaaagtgaagaaacgaatcaattttgagaacaaaacatactaaaactacttgattaaaaattccaaacacactcatgacggtaaaataaaggtaatttcactgggcacatacaatttagaattaacttaggaattaagacagttttacaggaaaattaatctaaaaatgccaatagattcaaaaggtccacctctataaattgcaatctaaaaggcagaaataagtgaataatatccccacatttagtcaatataacacaaagaatttataagaaatatgtgctccattctcaattcttcctccatgtattttcaaatatcatacatcaagtacttgcttaagaaaaactctactccaaatttcttttaacagttttcatcaagccagagaaaaggtgaagcaagcaataccacaatttaaagcctttattttataatttaagctctaacagtttatggttcctagctgcccccaagagcttacatgaaaataagtatcctttttataggctctcaagaacagcaaaccataatatatcaaatgacaagccttatatgatcatgaagagaaacctttttcttttaatatacagcagatcattgtaattgtaattgaaaaggtttccaatcaactccaaataagcaaaatggtcttaatattgtttacatccacttgagaacaattccggttaccgtgtaataacacgagaactaattatgaaaaataaagctgaatataagcaatttaaacttcaatggaaatcgagcagatgacagcagtccaatgtactgtttaccgtatttatcatgacgaaatcaaacaacggatcgtttggaagaacccataatgtagaatcataattacttattatacatgtatatatatatatttatagacacacacttttacatataattaatgggacgggagagagtgaaagaagaaaactttgacctcggagagagttgaagcgagagatctgatcgggagggaagtgggagggattggagaagaactccttgagacgaatggcctgatcgtctcggccatcatcaaggagctcgtgcagaagctcgaatgctgtcaacaagtagttctcctccagtaggaaattcaccacgcaattgcacaatgacgacctctccacgtccatcgagcttctgatacaagaatacctaattccagtttctccaagacgccattgatgagcgaagaaggaagaagtatgaacttgtcttacagtgctggatctctcttgttttgaattttctttagatcgagtctgtcatttgaacggaaactcaaacaggtgtgggtgatgatttcctttgcacccgtacctcattattcattctgaaatttttggggtattattagtagggtgattctacgatacaacctcgtacaaaggatgtactgatgcactcttaatttgtttcgtcattcagaacaattttttagtctaattttttttttcatattcatgtacattat

SEQ ID NO: 301309 - DNA, 1374 bp, Cannabis indica
aaagcatgctctgcggttagacgataagctatcttggttcgaggaggttccaacaccaatggcagacgtggacgtcgtaaattcataagtgattttaatcactttgtcaaaaaaaaaaataataataatattagtgttgcttgtattggatagttttttttttcatattgaaagtttattcaatccgtaattactaattcgtctattttagttttttcttaaaatggatataggaaaaaaaatcaacgttttaaacgagcgaaaagaaagagtacatcaagccttgggccccgcagtcatgaataaatgcacatcgcattaatgtgattgcattgatcatgtaggtgtgtttatcaaggtgcccactgcactaaaatatatggtttacaatttttgcattgcgatatggtttgccatttttaaatttagtcatctttacaccatttttaaattagtgctaaaactatacatataaactaatttaaatttagtacatattaaaaaattatattaaatttaagcataaaatacaatatttattaaattttatgctacaataaatattaattttttatttatttttttctacttaataatgtaattaataattatttatatttctatatttaattactataactaattgtaaaacataaaaaattagcgctttatttttaaatttatagctgtaaaaagttattttttttccaatcaagtctactgaccttctttaggcatcagtgcgatttgatcatagttgtattttgttattgtgattaattttatttttaggatatagttttgaatgttttagtcttgtctttataatatagttttgagtattttaattatgtgtgacgtaattttattttattgtttgttcttattgcggagagaataaaagtgaattttattattgaaattaagtgaaatgaaattataaggaatagtctaactatatatagattgagaacaaatcagagttagttagagcccactaactctaactattaataaaattcacaaaacacattaatagtcttactgaagttaattcacaaactgaagttaattaaccaaacataactaatataaccattaaccacgcatatacattttgtaaattatgttacccctcaccttttaagatggattgtagatgttataaatagacatattggcaatgtgagaggaaagaattgtggaaggcagtagtttagtaaaggcatctgcgagttgcaaagaattattgattggaataagccgaatggtcgagttctttattttatccttaatgaaatgacagtccaattctgttaattccatttttggcatatttaattgcaaaaatattttattatttaatgtatattt

SEQ ID NO: 301310 - DNA, 2471 bp, Cannabis indica
aaaaaaaaaaagaaaaataagaggaaaactctacaaagttcatacttcatccttcatggtgaaaaaaaaaatcccaatttattcaaaaaaaatttaaaaatgaaccatttcattttagtagataatttaacttaccaaactatgctcatatagtgtaattaagtgggcaaaagccaaagaattttgtgataaatatagcatatcgagtcaataattgtatgaacatatcaatacttaactaccattttaataagtcaataaccttgtgtaagcttaatttaaataacattgtaattagatacatcttacaaacaaggcatcttacattaattattaaattaaaatacatgtaaaattttgatacttaattataccatatgagatttcaatattaatattttactcatattgagcactattgatactttttaatatttgtcttgcttaaaatagcaatcaagtagtgagttcatatagataaaatgagagtgattgcccctcataaaaaatggaaaaagatatatttgtatttaattaattacaacttataaaatatttatagttaaaggttatgtttatggacatagtacaattttagtataatacttaagatattttatacacataaaaatattattttattttttaatattttaactttagtttttgaatatctaccattattgaatttaatattttttattgtcactctttttttacttgaaactatatttaatattataaacatttaaatttgtatcaacttttaagatatgatattatatcatgctggaaaaaaacgtacccatgcctcccatatacaaaaaattaccccacatccaacgtacttgagtccagttattgacttttatttggggaagtctacaattattgactttaatctctatttattaagccccattactaaaaacatttcccaaattcaatggttcaatcaaattagatatcttttgctctatgattaagaagagattcactactcattatcgatcactacttatttattaaataaattaatatcttgattgatagtataatttttggagcaaataattttaggggaagaaaataggagaaaagtatgttatattataaaggcataaaaacaacgtggtaaatgaaatgtatttgtatataaatagatgcaataatagtgatactgtccattaagctaggcaccttcgtcccaaaagtaaaatattgattataaaacacttcatatagagtgaaccgaccactacccaagtccctctcttttatttatcatttatttttagccacttatatatacatgacataatgtgagttgtaactttcttaaactagtacggattttggtagtcaaatgatacaattcgtcactcgtttttggttgtttatgagtttagaaataaatatgcaaaacgagtcacacgtttttggtcatattttataaaagtataatagtacttaaattagtgcaacatcattaacttatctcatatataatgtggaaaaaaaaaaaaaaagagaaggaatagttataagtgccacacacaaattctgataattgtaagttacattattattaacaagacttgttttaaataaataaaaaaaattattatatatagggagtgaattttgtccggtaattaatctaatagttgttaatcatagggagcccaatatatatatcaattttgtgtataattattgtgcacttattattataacaatatcatgtgtcactattgatgactacgaacccatcttctttagtcattgcttcttttttggaattattggggttaagagtttgaaattgagatttgcctaactaacgtactatatgggactgtgataacttcttcagtcaatctttctcagattatttatggaatgacccaacttttggtatagggtagctagctttactgattagaaactgtatcatggtcctacttgtagtactagttcaactacatccatttcttgattgaaaacccacttcagatttgataggtttgaaaattttataagcttttctaatctcacaccggcctaatgatcttccgaccactttatgtggctgatttatatatatgcaagttcacattgtttaagtgttagctagagttgcattaatatataacatggattagcatatttgtattaattatggaccgtatttgtatggtgaaaggagttcatgtcactcgtgaccactcctcacatttgtaagaaagagattaaagattttgtggccatgaaaactttccaaatcaaatagagaagatagtacaaacaaaaatgtatagattttggaccctaaagtttagaactaaggccatctccaatgggattttaaaaacccaaatatgatgtaattttttcaataaaagtctccaacccaatactaataatagtgggcaccgtaaacaactgcatttttactttttttttttttt

SEQ ID NO: 301311 - DNA, 1602 bp, Cannabis indica
tgcaaattggattggatctaaaaaaggaaatccgcatttagtgcggatcgaatgcactataagcaaaatagtgcggattggattggatgaacactcttactcattaattactttactagttttcttattcacgcaatctagcgagtgagtatggcttaaaattctagttcagttttctgagtcaccaattttaatcttttgaaattatctattgaatgatgtataatatgtataaaatcaacgagtcaaatttagaatattttaagattgaagttttaggatttatatgatttcgttgtgaaattaattttataatttttgattctattgattataatttaaaattgattaagaatatattattatcaattattttcaataatcttacatgatttattttcaaaattgactgagatatacaacataatcgagtttctttgagtttttaatttttttgaatcacattacaagatctacatacttttatgcgtttatacccaaaattaatagtgtagatctatttgaaattagtttccataagaacccattgttttcctaatgattttcgttcgtttttggcccaaattttgtgctgacctgcttggtgcaaaccaggtggcacgacctacttgggacctggttggaggttgaagacaacctcttccattcaaccccattcttagtgttggccagtgggggcgcgtgcggctgttcccaacatcattttttttatgttttttatttttccagcgtgattataatttaatttatgatttttctatgaaatttaataaattttttgacttcgtttaataattattattaatttaatgataattatatagttaaaaaattattaaaaataatttttaatgatttttgaaatctataaatcatagaatttttttgggtttcttctcgttctatttgacatagtcactttcttattttgatgtatcttgactatgtaatctccactaatattttctctatcgcatcttttcattttttgttgttctaatattgtaaaacttgattgttcgatacaaaaataatatgttatagtgaatactttattttttgattatcgatatattataaccaagtaatatatctctcttagaaatttgtctacatatttattttcaatgattgtttatcaccaaaattcatatgttagtagaaaatattatttatgttggttggctgtatttgtaactacttacccaaagctagtaattatatatattagttcacattccctgaagtaagttaatattaaatgtgtatgtttaaatttctttcccaaaggtgataatataaatatataaatttattattatttttttattttggattaatgtataaagtttaaaaaatatattctctcaaaggtgataaattcttaatttatacatatttttttttattattaatttcatgaaaggagatcatgtgtgtcttatattctcgctctaaatgggagtttataatgaccagtggatgttagactataatgtagtatatgtaatatagcatatacaaacgatatgaaatgcagaaaactaactgtaatcatatcaataatatatgcaatgaaag

SEQ ID NO: 301312 - DNA, 868 bp, Cannabis indica
cacatccaattgatgagaaaaccatcaatggactgcagctaaagcaagtactaatttcacagaatctaatttagtaaatggagaaatgtatcagaatagtcgattcccttttgttggttataaccctcagcaaccaatctagtcttgtacatttctattgtcccatcaacattgtattttatttttataaacccatttgattccatggtatgttggtggggagggagaaaaacaatagaccaagtgtcattggcttgaagagctactaactcagctgccaaggccatcaaacattttttttttacaacaataatattatgaatgatgattgtgttgaattgatgctcttcatatataatttttttttttattatatatatatatagatatttcaccataattgtaccactaaattgataataatacttattgaaattgatttattactagaaggatggagtactaatggaagaattcataattactaatttatagagttactatattatccttatatatttttctaataatatttgttgatggtatttttgtaatttaaattaattgaatagggagaattctaatgaggattttaaattaatggatttgttatgttataattatttatcacctataaaatatgcaatatcaaaattaaatttcatacacaaaaatattacacattattaaaagtatataaccataaatctaaagcttttgatgattcaaataggagaaagaacataaatagcgaagcatacattaattccttcatagaaataattaattcaatgatgatgatctttgggtaataattttccaaaaaagacttaagttctctaattttatatctcaaaaaaaaaaaaaa

SEQ ID NO: 301313 - DNA, 1245 bp, Cannabis indica
ttttttctctctatcactaaaagaaattgtttttgctcatgtgttgtaataaaaataagaacctcatataccctttgtcctagtagcctacactactcctttgtgtggtcgatggatctggaagactacggtatgagtttccaaccaaccaaaaataatacaacatacgaaaaaaaatcaagaataccttgatggacatcaagagataaattttcttttcatgtatttacttttagtttaatatatcaatatatatatatacatatggtgatcctgagcatatgatacaatgataatcagaaacaaactcttttgctgcatacttgatttagtaccataaaactaacaaattaaccaactcacttgaagcattaccataccacccgaacaactgtttaaatctgctacaagaaaaaacaattgctttgagaaaaatagactatcattagcgaaaaaatatgaaaaaatatgagatataggagggcccaatgcaccacaggcaatctcataaagctaacaatcttcacaatcacgacgaataagagcagataaatcctctgcacatatgagaagtaaatagggtgagaggcgtcaccttgtctgagacccttaccaaggacgatatggcccaaaacttcattcagattaaaagcatagtccatcgaggagatagtgaacaccaaagaaatccatctctcatgaaacccaaacttacatataaggtagcagaggaaataccacttcacgcgatcataaacattaggcagcacaaacgccccaatttttcttcagacatgacgtttgagatgattaacaagctcaaaacctatcatagggttaagagtgatcagtcgaccagggagaaaagcgctttgttcctatgaaataatatcccctagaatctcacaatgtctgatagacatagcctttgcaataattttttaaagtacattaaaaagactaatatgtttgaaatgagaagcacacataggtttatcagccttcgagataagggttatcaaagtggaattcataccaacaacacttccatccccatttaagaaaatgagacaaaatgtacacacatctgttagacttttatttgggcttacattaaattttatcggttttattaaaacttgggttgattggatagttctttgctgtgttagcccatgttgttggtgatcaattgttaatgggcttagcatctgtgtgtaaagtctaggtgaaacagaagtgtgg

SEQ ID NO: 301314 - DNA, 1752 bp, Cannabis indica
atccttccccgtcgggtaatacccgcctgctcccgctttaatttaaacgggtattggggcgggtatggggtgaatttaagaagcgggtataggggtgggggagcaatccccgcactcgccccgccccgtttacatccctatttggtggagaagatggcgaggaccttgaaagtttatgtgtgaaccaaataaaggagacgaagccatttgtatttttcttatgaaacattagtagcgatagcgataagtgttgccatgctactctaaaacatcatccctaagaaaacaacactgttttactttaaaatatttggaagcctaaccacattagcatctattgtgtttgccactgcttattaataaacataccactgcagtttcccaaaaaatttaaattattagcggcgatattattacactagtaacgaccgttgttgttgctaacattattaattaattagcgcatggcaacaatatatcgtcgttacatgtacacctacatttcccacctatcttctcatattattatttgcaataatttacacattaatgcgtgtatgtcgtcgctattaatttggcaaaaataaaaaaaaaatacaggattttgatatttagtggcaatatacatctagttgttgcttgcaataacatcatcgtttgcggagataacatgtcgccgcgccacttgtagcgtagcctctttattatcgctcgtagcgataatgatgagaagaatataaataaaattgaggcctagggttatatatatatatatatatataaatgaatgtgactttacatctccgttatggtccacttaagcagggtgaggcaccatgatgtataagctgtcatatatagtattttgtgagcgggataatcgaacttatattactcctgtaaattacatttcccctctgtattgttcccgaataaggttaagatccaatatatattattctctaattaaccacgtacattttccttttcgcttttatataacttccatatgtattctatatccatatgtatttatttctttttttaagggtaatgtagtgaaactttgtacattactttttatagatttgtgtactgcattatataaagtgaaaaataataataacaattagaaaacacgggttcgcacaggcataagtgtacattaatttcctttgattaattatttttatggagatatgttaatagaaactacaaattagacctacttttgatgtcattgatggccctcgctcatctactttcgtaacagttctttgaattctcttaagagattcaacaacgcaaccaccactattatacctatatcgatgcattacttcttcttgtctatggaacatgctaattaatagttatggcatgccaaataattaagaattaaaaatgtaatcccatcttaacattaaaaaataaatagatagagatatagctaataattaaagttcaagctgatcatattgttatacttatatatgcctgtgatacatttattgcatattttttatgtgcttgatttaagatttattaagagtactatctatgaagctaacaagattaataaaaaaaaattcaaaatccacgtaaattttttagacaaataagcttataaattataggctaattagcaatttttcctcccgaactttgacatatacctacccctgaacttttttagccgttaaaaatttcccctgaactattgagattgttagatttaacgacttttgtcta

SEQ ID NO: 301315 - DNA, 2323 bp, Cannabis indica
aaaagaaaagaaataggaaaatccatgtgtatcattggaatttggacatgcaaacttttgtaagttgaagaacaaaaagagagtgagagaaagagagagagaagtgcataatttcaatgtgaccaatgatgttcagccaaatggacttgtattattcatgatccatttcatagtacacattaaaagtgtactaaaattcatacttatattgtggtcggtgtacctagttaactttaccttaactccttcttctcatttttaccaaaatacacaaaccattttacagatttactcacaaatttcgtatgacactcctctacacacctcaacaacaactactgccttttcctatttcaatggcttctctataagaaaaaaaaaaaagcttgatggtggtggtggccctcattttcgacgacctttccctatctactgaagctgtaaaaagggtatatttcaatcttaccattaaacaataaacattacttaatcttgtttttcgattgattacagtgggtgtttatgttttaatcattacaaaaaacaaaaacaaaaaaaaacccttggattggatctcttagatttatctactctggttttttatactatcaacttcctcttgtgatccatggaaagagtaaccatcccacattttgatctgggtctctccattttctcaaaattctcttcattttaatgtgattttttctatcattgttggtgacagaataagggttcaattgagataatgtgtctattgtagttaggggttttcagaaagttgatcttatgcatattcttccttgattcttttccccccttatattttggatagttatgtatatacattgttaaatggcttaagctgggtttagtggaaagtcattaagctattatctctgaatttcatgatggcattgttgagataagattacccttttattcctatcgatattgatgagttttacattgatttggtaaatctgagtacccaagaatcaagttgtttaagatgattcttagctctatttggctcatttgttattatctctggtttgttatttgttttgatcttatacattgttcaatggcttaagcctgttgattttgatgagtattatattgatttgggaaatctgaatgagcactcaaggatcaagacatgtttttatcatctctttttgttatttgttttcagcacatgaaagtgaaggtggagtaatattcaagttgattatcaaaaagaagtggtgtgaatgtatatgtttactactcagaaaacaagtcaacatcgtttgacttgtagtcaaagagctagaattcttgcaagagttccctttcaatcaaagaaacctttctttaagattcttatgcaaccatcatatgttgactctaggaaagaccaaattgtgagattcatagtacattaaatttcatctaatactgtttttttttctcctctttctttctgcatctaataatgttttcattcatgaattgtttgagcagtttataccacttaagtttgccatgacatacattaagaatcaaggtgatgtcattcttaccggtcctaatggcagatattggtcatccgaattcaaaatgaggactgtaaaaaccaagaatcccggtcctagaatctgcaatggttggcgagaattcgcaaagggttacaatttagaaattggtgatgtctgcatttttgagcttcttgatgggattcaaaccacattcgaagtttccatagttcgatttgctgaatatgaatgttgccaatggtctcaaggtgagttagtagcttaaattcataaattccagcttttggggagtcatctaattttgtttagttaccaaaagcatcaaatttttcaatgtgttcagatagtaaatatgcaaatggtggaagcaaggcatacaaagatgtgaaagtaaagattgaaattgagtaactaagtccttattgaaagtttgtggtatgtctgaactagaaccttgtgaatccatgattgtggaccatgttgtcatgtactgatgtggtgctatgagatgttaagtgggttttttctgctacaatagttctatgtgatgagtatataacatgtaatgtacatattatatatatttatataatgtatggtaatgctgcttttgaagtgattttgagtatcttaatattactaagtttttttgccttgaatagtttttgagtgattcatattttaagagggtgttctagcatgttgtatcgtattatcgcattgtattgtatggtattatattaaattattattttatattttataaaatattatattaaatt

SEQ ID NO: 301316 - DNA, 1360 bp, Cannabis indica
ctatacatttttacaaataataaaaaattaaattctatttattttatttataaatatgactaatttttataactaataccaaatatatactaaacaaaaagagaatagtaaaccaaacaaactaatataaatatttataaagatcctactaaatataattttagttttaggatttcccaacaaagtactttaaacttaattttcttttttttttttaacgaaattatatttttttacaaacagaatttacttatatttcttttataaaataatattatttttacgctcttttctcttttcatgcaaactgaagcatgaaaacaacagaataacaatcgtttatatttttatatataaaaaattcataaaaatagtaaaaaaactgtaaatttgtaattttataaactttgtcttaatagatatttataagaatttccctttaatttttgtatatagcataaataagggaaaatgatccatttttctcaactcaagaccatttccaaatgattccatgattttagataattaacttatgaacacaaacatatttatttaaaaatatgcatatatttagacaatttttgatctttgaaattatgcttagttttataattaaagtcattttggtagttagctcatacttttcttttaagtatttatcaaatatgatgtgttcaattatcttataataatgagagctaatatataattttcaaaagttgaattttgtcaagaataattataatataactttgaattacaattataatagtctaaaattttctttgttaatttattttaatacataattgtttttgctccacaccactaactcactaagtatatatacatattattttgtaacattttctctaaataattaaaaataatactcacatgcattgacccaatgactaggattagatatataataatattaaatttaaatatatttcattggtgattatattttcttggttaactttcttgtctttgcaagaaaatctaggtgtcattccttcttaatttaatattaatttacatccaaaataatcaattttctagattatcttcattgatttcaattcctatacccatcttttttcactaatttttaatgtaattgtgattctaattattgtgattgaggtttcataatctttttcttatgattttatttttctataaatttgatatttattattattttttaaagaaaaaagtgtcaaccattaaacacattggtgaaatagccctctttttctttaacaaaataataaaattaaacttctaataataaaggaatttggtagttttgttaggaaaaataaaattagaattaatttttttttttttt

SEQ ID NO: 301317 - DNA, 6258 bp, Cannabis indica
gagggcggcttcatatggggccatttcaattatgagcataagtatttgatcacaatgtgtcacatgaatgagaatattttttagtaaggtaggccatgcattcaatttatagttttgttttgggaaagacttcaacaaacaaaataattaagttggtacctctttttgtaaaaaataaataaacaaatggtatttttagctatacatgcaatattgataatatagcaacacatataatgcaaaactctttttttttttctccctaaaatatatgagataaaatatgctagcttttttcactttcttaatctacattctctgatatatgtttataacaagggtaatattttatttacaagcaataagtttttttttttttaagattctttttgctgaatactttaaaacaaagagttgataaatgaagtttaaaaagtggaaaagattaaacctaaaacagacaaaaggcgccagaggtttaaaacaacatttcttttagcaaaataagagtaggaaactattaattaggtaaattaaaattaaaattttattacttaatttcctataactgatgacaatttagttatattaataaaattttataggaatttaaaatattaataaatactaaataaagtgagaaaatattataacaataacatacatgcttaagattgtcaaagcaaaattatagtataacaattttatttagtgtctatgaaattgtaaacttttgcaaactcaattgaaatatcaaattcactatgcatcattatagtctctatctattgtaagtactaaaagagatcatgtggtgcatatcttaatctcacctctttggcctttgacaatttcttatcaacaaatgtacctcaaaaattccaatccctaaaaataagccttcatcaatagtttgtggcgtcaagtactactgtaaatacagattaaaatttttgacacgatacgaaatcggcataagccagatcagatacgaaaaaaatataaatttggacacgacataatacgatactaaaaattgacacgacacgacaaaaaaaatatatgattaagcatgatagtgacacgacatgtaagtacagatagactagttcgaaaggcacgacatacgactagcctgaaagtcacagtacgcgataagcccaaaaagcacaatacacgacaatctcggaaagcacaaaaaaaaaatattaaaaaaatcttataatttaataataataacaataatatatatatatatgtgtcaattataagtaatttaaaataataataaaacttaaatatttcactcaatatataaaatatcactcaatattataattaattctattaaaaaatataaaactaaagctatatattaatttatttatagagttggatataaaatttttattatttataaggaaatatttaaattttaataaattttttatattactgtatgaaatattgttcaaatatacctatagcttagtaattaagaaaaaataaagtacaaatttgagcctgattatgaaaacaggttagcctgataaaaaaaatgggttagcgcgagcaaagcatgacatgaatccaagtacaacacgaaaatatcggtctacgggctatctcaggcctattctttaaaaatattggcacgacatggtcaggggagaagctagaaataaaattcaggtggggtgattaattgattatatatttttatagtgaaatgctaaaaggcacttgtggtgcctagcaccattatgaggtgttataccactattagtgtaattcaatatcgaattccacttattttactcttaattataatgattataaaaaattgttaactatttatagagcactacttcatagtaatgctaaatatcatggagcttataacaatgctcattttcatattaggtggacttcaacattttaataaagattatagaattgagtataataaaatataaaataatataattatgttaaaataaatttaatataatcatatcttacattaattgctcggtttaaatcccaataatcatagaaaaaaataaaggacctaaaggtatacaaaacttgtgacctccttaaattttaaaaatatttttatcactacaccaaataatactattaataatgtttaactagactagtatttgtatatatgcccaaaacaatttatttaggtacaagtttcaaattacttagaattgagtcaaatttcaagtgaggtgacggccctatttaggctcaatgtgactttgtccataggtacgatacgatctatattttttagagcacaatacgacatgactaattttagaaagcacaaaaaaatattggtacacacaaatttatacacttataacattataacatgaagtagtgtataacctttaagactatgatggaatttgattttttttttattagctcaatatatacaaaataaatgtaactttggataaattaggctatttaattatgggtatatattataatgtatatttttttatggctttaggcgcccataatggctattacatacctagctatccgtagtaataaaaaggagatatgccacttaaattaattaattatgagaattttgtttaaattaaagctagcgtgcgaaaaagaaacgacgtaaaaaaataaaataaaaaaaaagtgtcttcataaagcaaaaaaataaaaagtgtattatttgatacaaaatatccaaataatactgaataaataatgtaattaattagttaattgtgtaatatataatggagaccatgaccagacaacaaagccaaaaactgaaattactggatttgttgtctataattagttacaaaaaaataatatttaagagagctatattgtcttgtcattaaataaagttttgactacttaattcttcaattaattaatttaaaattatgtgttagttataaatattagaatattaagcatgctggtttaatgggtttgcatgttatgatgaagttcaaaagcaaagcaaacccatcaactggcaagtactaaaatattattgtcgtttttcaagttgtttgtcgtttcttatcaaattgtagtgtatttaatttgtgataaatatttatatttatttgatagtgtatcttatgaatctagtagtagagcacgtgttctgcacgagctcctacattgttagttaaaaaagaatggttaatggtgtgagattttaagttttgcaaaaggttaaatattcaccaagtaatggacttcaaatctatttttatttttatttttgtagacatgttagttcattcaaattaagctgatcactcaaaattattagaaaagtcaattaaattagactaattagaatttttaactcccaaactttgacatgtactatatcatgtcttttgaatgtttaaggtcgttaaaatttttctctaaattattcagattattggatttaggacttttgtcaaattttagtaaaaaaaatctaacataaattaaagttcaagggatatgatttggtacatattagaatttgaaaggcataatttgatagatatcaaagtctgtaaaatataatttagtatatggataatcactaaattagtaaaattgaatgaaataagacaaaaatatttaaatccaacaatctcaatagtttatgaaaaaaatttaacgtcgagaaaaatttaaggagcataatttaatacatgtcaaagttcagaagataaaaattttaattggtctttaaattatatgtataaagtacaaccaaatacttgagaaatcaacatagaaaattattcaataagaagctttttagtttcattgaaagatctaatgattgtaattgagtcatcttaatacaaatatatttttcctttccgaggagaacaacatcaaccaatgaagtgaatagggtagagactataacatataagaatgagatcaaatttcatcaacaattcttattttctatttatgtatatattcatacacgtatcaattagtttacctagcatattagtcactctaaaattattgtgatagtcagtatcgtgattcgtaagaaaaaatatcagataagttgtgcaactccacattgccaaaaaaaaatagcatattagcatattttgttgtgctacctgaggtgccaaaaaaagtgccaaaacaggggcaagacaagcatgttgctttcttaggtcccgaatatgctcccctgcctaattatattttgcatgccaacaaacacttgttcccagttttgaggcaatggagggttctcttcctcgccacccatcacgagcccaagtttgcagttcaatcggcacgatcgttgtggttgcataatctaatgcacttgcaatccataatttctaatcacttaaaactcaaccagatatcaatgttaataagtatattccacacatataatcatatcacaataattgcaatgttacttttctagcatgcttcattaaaaatagacaggtgagtaaataacaaaaaaatacaaaacacgtactataccacgagtcgacctatcttcgcagtaaatgcacatattcgaccagttttcaagaccttcaaaaccatagttgttttggaaagcagagaacgagatctaaaaattttatgttcaacaccaaatctaattcttcttttaaagttgtaaaaattcaatttaaatttatcaaaccgagctattcaactttcactttttcaccaaatatattaaaacccttccaaatgactccaaatgcataattagtctttaaaatcctaacaaattaaaatttgaagagttaatttaattattataacacaaataatcttcttaggtttcagattaaattgatctatgataaactaagtgatattgtcttagaataggtataatgataagtttataatatcttttctactgttaatatcggtctagtccaatgtaaatctatatatttgatacaagtctactttaccaatattctaaaaaagacatatcacttgccatactataagtaaatcacatcgttgattatcacgtcattgtaaattcggtgcactgataaatttcgggactaaataagtttaaagtacataatcaaaattaattttcattgcaatgacgtcagtctaattatgaataattatatatttaggaaattaaatttataatcatataaataaacatgtgaactaaccaattgtggtattgatcttcttgataatccttttggaaggatcattgattgagcccaattaaaatgcaaagctaccaaaagggattgcactaccatgttgtcgtttatgctcacatcacaacttttatcattgtcgtttctacatgtttttgtcgttttctttggtgaaattaaagcagtccgtacgtgtgttgaatgtcgagttttgttgttgtcgtttttcaatatttttgataattttcaaagtggtttttaggcttttgtgtcgtttttctgttttcaactttgtgtccaaattgataattaacactagtttaacatatataggcctggcctggttggtaacggtttgaagaacccaattattgtttttaaacaagacattatttcaactttatattgatatgctatttgagaattatatatataataataataaaaaaaaatctattattattattttttagctgaatgaaattgtgtcataatttgtgttacgtagttgaaaagatttgaaattctaattatccaaatattttgaccatgaactagaaaattttcaaaaataccaaaaaattataatttatgcgtatgttagtcacggtcggttctaagttgcaagacatacaaaataaaaatatgttttttttttttcgtttttcatatgtagaaagtgataaaaaaatggagtatttgtgcaagtaaaaataactacccttttcctttaattttaacacctttttcgtgttagggcagcacaaaaaagttctgaagaaataaatctggcccatttatgcttataatcaagcttgaagtttagtgtttgatgacaagttgaagtgtcactccatgagtcgagcactaggcaggcccgaccctgggaataggcgggttaggcctgtgcctaggggcccacctatccccagggggccaaaaaaaaaaactatttaccttttaaaattatattattttttttacttgatttttgaaaaattaccatatttttttctaaattaagggccctaaaataaattttttttct

SEQ ID NO: 301318 - DNA, 2815 bp, Cannabis indica
tttatgattccaatttacaaaatcatcaaatacactgatgcaatcacaaccaatattccaatacacacatatatgtatagaaaataatacaattacatatacacacgcacacataatgatattaatatataccttccctgcgtgaccctgcaacgttctacagcataccagatccgtaggtccaaagcggaccggagttcttccctgagacctcgcataccctgcaactgcaaatccgagaaaagaagaaagcaattagatccgaaaatacgcaaatcccaataacgaaaattcttaagccctacaaccgaacaaaaatgaaagaatcaaaaagtccctcaccatcagtatcgagcaaagcaagtcgcctctgcttcaatcgctctctgagagagttgaccgtctcgttcgccgctacgtggcgctctttcagctcggccacagacattttttccttccttacaaaaacctttctcgtcgaaaattgaaattagaagactgccatagacgaaggtaaaagaaaaaagaaaagtcaaaccagatgctatagtaacatgaatgattcttcaggaaaaaagctcagaccaccccgccatccataacttcagagcgtcagattagggttttccgttcgcctcctttccggcgaattttatataattgtttttcccagttggtgtctagaaagaagactgagaaggaaatagtgtgtatgcaagtgattgaaagagaggtcagaaactgaagagattgcactttgcaggtgtgagctgcgccggtgtctcctcctacagcggaagcactgctctccctcgctctcctcagatgggagagatacaaagaaaaagaaagagacagattgagccggtcacttctcaaactcaaaaaacttaggcgcgtggctatggagcgtgtgatgattagagtgaattggtgtattttttcactgacaaaattaggtcccttgtccacgtgctctttaacggctacttctgctccagtatattgctagacacgttgtccaaaattttggtttgtgacggtgtttataaaatagttgatcaaatttaacgtacaaatctaatttaatttgtaaagtatgtatatttataattaacatttaaagtaatcgctctaattaaattcacagtttatacatattttaaaatatatatatttaagtgatcaaaataagaggataaaaaatataattctggagtactaaaacggagaatgagctaataatgtaatgtggcagagttaagaaaaaagtgcatgttttactaaaagagaagtagagtagaaagcttagaggcagaagagcagcttagtgaaagaaagaacaaggcgcttgaggagctctaaaagtagggagaggaaaagcactgggagaagcgaatgataattaatacaagtgaacaaaatagagtaaataaaagaagggaagctaaatattttccgcacctataaatagaaggctccctcattcgaaaagtgtgacaaattcttgattacaccaaactagtcgaaactttgttggaatacatcctcaagaaatacatttaagctcacgaattagcatacataccaaattgagatagagattgtactttgattagatcaaacatggtgtaaagaattcaaagtaatgatacaattttgttgttgagccaattttcagcatcaacagctagcgccatccgtgagaatctctaggatgaaaagctgaagttcaggataggaattaagatgggttctaagaaggtgtcagagaaggcaatagctccaagtgaaggagatacatcgaatctagttgttgattcgactactactgcattggcgttggagataagagaaatgaatcaaagaatgaatccgtgagacaaacataatgaggatatgtggcatctcgcagaagagaaattctagcaagagcagtgtgcgactgaagagaaacgttagcaggatcaagatgagaacatacaacatcaagaggatgttaaccataccatgcgagaatttatggctgaaatggctgatatgcgggccaaaatgaacaaaattcatattcattacgaacatggacaaacaagtgggtttaaacctcaacatatcgccaacaagttgcagtgcataaaaatatctcagaattctaagaaagaaatgagaaatcaaccgacgcaagtgctcaaagagaaaaaagtgctagaaggagaaagaaaggcacacaaaataagcaaaagttatgatctcataccagattcagttaatgccgcaagcacagagcaggtgctccagaagcacttcaatcaggaaaggaggaatgagtaagtaaggctagagtgcgatccaaatccaatagggaggaatgctcaagagtttggatcttcttcttagattcctccactttctcttccagatgagagactcaagagtggacctttgtgtacaactccttgtatttgtcaccatggtccttttctctcctggcttcctccttttagttggccacaacatcatttagagaagtctcaaacttgcacttaaccaggtcatcagcttgagccttggcatcatttaaagccttgatcctttttctttccctccaacctgtctcgctcatccttcaatgtctccacttcgagagttagcttgttcaccaagtcaaaacacctttccaccagcagatgtgtttgaagaaggtaatgaatcatgactaaattgcaagaaaaaataataagattaccatcaagtaagattagagtatttactgttggaaattattttaccaagatcttagatctactcacaagta

SEQ ID NO: 301319 - DNA, 1273 bp, Cannabis indica
atattcttttatttttaagtatattctgttaaaccaaaaaataccgttagatagacacttttaatatataaagatattttgatgattttttttaagtttttcacttattttttacacattgtttcgtaatagtaacttgaaaataataaaataataacactccgtatatttatataaaaaaattaaaatttgtaaatttgtaattgttatagttttataaatgttattttcttcgttaagactataaattttaaagggcgaaactcatgttgttatagaatatatttggaaagaattttgttcttgaattggtctcggtgtgggaaatgtattatactatacattactatcatatacaccgacaccgagaccagtttcaagaacgaaattacatccgaaacctatatatatataaataaataagtaaaatataattaaatataactcacctgtatcaccagagagagccatttcttcatctctcaaaaacctagcatgaccaaaatccccaactctaacatgcaaatcattgtccaaaaaaatattactgggctttaaatctctatggatcactttgggcctttgctcatgtagatactgcattgcctgggctatttccaaggctctagcaagtctcaagcccaatgaaggaacaggcccaggtcttctcgttgtcatcggctgtttgggcctgccgcccggcccatgaagccactcctcaagcgtcatggtcaagagctccgtcacaaaccacgcgcgattgggcgggtcgaaacacgcgcccgttagttgtaacacgaaacggtgtcgttgcttagctaaagtctcgatttcttgggcgaagaaagtcacggccttgtcgttggaggtgaagaagtgtgggttcatacatttgactgccacgtcagatcctcgccatgttcctctgtaaatattggccgtacttccttcccctattttctcgtgtaattcaatctgatccgttgataattatttatttatttattaattaatacatacgtataatataagtagaaaaaaaaataaatgctttgataatctatatattgtaatttttgtaattgtcattactaaattaataaattgctacaaatgtaatgaggattagggtttttcggtagatcattatttgcttttgcatatggatgaattttttagtcaatttttttatatctgggtaagttaaaaataggatctcataaaaaagaactaatataaatacagtagaacctctatttaagaatactctatt

SEQ ID NO: 301320 - DNA, 682 bp, Cannabis indica
ttttcgcatttatattgcttattgaggctaaaaattcatgacaataatttgattctaatcaaacaagatttgacataaacgtgaaacttgaaaacataattcttgtgaaacttacctgacaattcgaaggcacatgagtacgtcgaaaacatgagcgacaagctagttaattaattaagctaaatcagtggtagggcaactctcctttggcaagtacttattattactagcatttacatgtactgctagatcgtatcacaaaatacgtgccaagaaagagaagccctataactggttttcttatagattttaccaactctatgatcttcatctccaatacttgctgtgtatttttaatgcaacaaattatggatcctttatatagaataaaagtctagcatcagtagatatgtatcatggaataaacctaggaagaaatggcatatgcttagatcaagaattatatctattgatagacttatctctttaccattaattattttgtacttttagtgcgtggttggattccgcataagcttttggtcgaagaatatagagatttttgttcattatatttcagctgcatgagaagaggaaaataggagctgtaaggagaatgaaaaagatatatgcttgcagatattgtctgtgtggttgtcaaaattataagtggcatatatag

SEQ ID NO: 301321 - DNA, 1399 bp, Cannabis indica
ccgaatcggctcagtacgttcttatggcaaaaagcacgaacgctgtgtcgctctgaatcacactgctctgtttacatcactggtcgatttatacacctcactcttcatgtccgatttacgccattttcgtttcttaactgaaatcttcactattccacctgacacaaatccttgtcttcacttggctcgagcttacatttcagcttggtttcacgatttatattcctgcattagagaagtagctagaaatctctacccttcagtgtatttagatcattatcaaacagaattgggattattaagttttgaatatgatgattttcttgttcttgttaactcagcgattagacccacacacattaagggtactttacaagataccctttatgtacccatattcagtactgatacagaaacccccattgattggaattcgagtaatcctctcaatatacccaattttaatctagattacgacttggtttgtaagattatttctatgatgaagcagagtaagaattggcgaatctcgaatctggtgaagaagaacaacaacaaccccggacgacctttctggttgtttgattggcacgatgacttttgttgctgctcgtggtttccacctgaacaaggtaactacacaatggaagatgttacaatggcgtatattattggagtgagttgttcgccaatgcttgcccctagagatgttgatgattggcagccgttttctgttgatgtaaactcaaaagaaagagttaccaaacgaagcttttatggtgggtatgaagtaaggacttttgaggttcgcaagaagatttgtcctcagaatcagaagcagaagcaggtgacaaagaaattgaagaggaaaaggaaaggtacagagattgttgaagaagaagaagaagaagaagagtttagggtgatcgattggacttactatcatatggttttgatgggatatcatcagcatgagagatcacaggcactgaggtcaattgctctcaataatattaatctttatccttaattatatgtactctctactacctagcattttgttttggactttcagaatttcattatatattaatatgcatttgaagttttgaactttatttgagtttcaatataaatatttagaggaaaatatggttcacttttgtctatagtacaactgatttttgatcttatttttaggtttaaatgtaaattatttgaatagaatggttgtaataactactagggtaaatattatggttgcaaaaattatcaattggactttgtgttttgcaaagttactaattggactctctgttttgttaaatgacaaaatgaacactgtattttctaaaatagtataaataggatcctgaactaatttttagtcgaaataaaa

SEQ ID NO: 301322 - DNA, 2127 bp, Cannabis indica
aaaatgacctgttagagctttactcttattatgtcctaaacataatgtaaatgctacttttgaaatattgtatttttatataatatatgtatatatatcggtaaatatatctaatatttgttgtaaaaataatgctcaatggaataaaactaacaaaatgcaactcaactcaaataaagtttatacgaagaggagaaagaagtacaacaccaaactaaaagttacaaatgaataaaacacaaaaatgaatatcaaaaaataaaagaaatgtgagagtaatctcaacaccacatatatttcaaggtgtataatagaaaaatcactaaacttcaacaaggttttacacttttgttaataaacttatttctccttacaacaagcacttaagtaaaagaagaaaatgaaaataattttttggatttatcaaagcttaaataaagtttctaacaaagtgttctcaggatagaaactaaatgtactatcttgatagaaattaaagtattcacaagtaaactaaagatctctatttttagtgtttgagaaccatatttgagcttcaagctttcctacaccccatgactgttactagtcgaaatatgggagtaaatgagattcaagatgttggttttaccggctgttctgggcccagaaattgaaacaactcatcctatcgatggagatagtacggtagagggtatgaatggccagtcgaatttggatggtggtaatgttgaggtgcaagcgaatgttgggatgtcagagaacatggcttaggagtccttgatttttggtggtcttagtatgaaataggacaatgtgatttcaggcctaaccataaaaattctcactgaagataaacttagatatggtgtttaaggggtttgttgatccaaaccacaggccggcccacaaagctgctaagcccaatactaaaagcagggtcaaatgtgctcctaattgttttggtgggcctagcatttcttcttcttctaatgggtctgcagtagaaaaaagaggcgtatcgaggagattgagggcccatgtaattggatgggagacttaatgatttcaaatcaggatgggaaagggaagaaatcgtgtttgaccccctgctctacggtccgtcttgcaaacaactccattctggatagtggctccattcctatcaatgaagatggttcaaaaggaggtcatcaagaggaaactcaggagtactgtgagtccaagaaagatgtggatgaaaacaagatggtgcagagtgagaaggattttctcaaggctgaggaggtgggcctatacaaaccccctaacccctcatgttaatcctagggcttggaaggcatcaggctctaaattcactaggcaacttgattcgtagtgaaaatcctgatctagttttctaaatgtagaccaagagatcaagcaatgagatgaatgtcttaagtagatagctgggattttttggggtggcggttgtctctgctataggggcttctggtggagtggctttgatgtggcgtagaggttgggatttacaaattattagcactgaaattaacaaaattctagttcatgtgttaggtgagttaaacataaaaatctgggtagggtgtttcgtttatgctcctccccatcgcgatcattgtgataccgtttgggttgaacttgctagggagatgaattcgtgtttagacccctgggttattttggaagatcttaattttgtgttcactcaagatgagaagtgtggtggtaggtcgatgatggatagagaaggaaggggattgcatgaatttatttttaatactagtgcgatgaatatgaatgcgtaggggccttttccacggagtagaatggtcagaaatggcaaaatctcatcagagaaaaacttgattgagtgttggggtctgtaaaatgggtgatccagtttaagaaagttgatatgaagactttatctactaggcactctgaccatgcgatggttgtgttagacactttttgtgaccgggatcacattaacatgcctttttcagtttattgatgcatgatctagagatgagagttatggcaagtcattgaagaagcttggggtaagtgttgggttttgtgccctaaataaaacccttt

SEQ ID NO: 301323 - DNA, 1535 bp, Cannabis indica
catcaccatcaccatcatcatccccatcaccatcatcatcatgttgttgtagtgatgatgacctctttctcttcttcttcttcttcttcttattgttattgttttcattattattattaatgccactttttgatatctccactcctccaacagctgatactacaactttttcagtcatctcatcagagtagtactccttcgaattcccaccaagcagtagtactgtttcgtttcttgtcgagtctgatatttccaattcttccaattccaaaccttgtcgattattcccatttcttttcatcacttctaattcatcacttggattttcctccacactttgatggtccttttcatccccagctgtagtaccattgtgatgattctgattctgatgatgaccaccttggttattttggccatggtagagctcttctagctcactcagctgattacacaacctactatagcttttgctacagttactgttattatttgtggtggtgaagtactgactttcctcttcaaatttctctttacacttctctgcactccttttaaatccaagctctgctagctttctgtgtccactcacataataacacaaaacatatgcaaaacatcattaattaaaaccctaattaactacatacatatatataacaattttttagtttgtatttttgttgttcttaattttctaatgaaattctgtcactcttgtatacaattaattttccttttctttttacactataaaatttctagataattccaaacaaaaggaaacaaaacaaaacagttggacacacacatatatgtatatatatatgtatagtatcacataccttgatacatgttcccaagtgaaatccgggaaccaattctccatagtagatctgatccctaacagtgccagaacttcatcttcactccagggctgctgcagatgaagttgatgatgatgatgatgatgatcaacggttggtattaattctgggattggtgtatgggtttgcatcatctccaaatcaacatgggagaccaagttgttcggtcccgaggcagcggaggcggtggcttgttcatcaatttgtttatgaagatggtggttaataagcttggggtgttgcacatggtgcaacatggggtgtaagaagttgttggggtggtgaagaggaggaaggagttgatgatgatgaaaaggattatgatgatgatgatgatgagattcatgggcatggttaggggtaatagtagtggtgtaattggcatgaatgatatgatcaatggaagaattagaagaagagaagggagtagtagtagtggtggtggtattagtggttgtggtggtggagagagggagtagtgctgctactgaattgggtcttgaagaggctatgaattggtgcaactggtctggtactccaccattgaacatctttgtaggaattttgtgtgtagatagataagagtttactactctctaatgattcttttttttttctctctctctcttttttgcttttttttttttt

SEQ ID NO: 301324 - DNA, 961 bp, Cannabis indica
taagatcctggtaaaataacttccaacagaacttgcccatgaccttcactgaagatgatgcgcgacatgtgtatttctcacataatgatccgctagtgattgaagctcagatagccaacaagagagtttccagaattctggtggacaatggaagttctgtgaacattatcttcaaaggagcctttcatgctataggattaccctgtccaatacaattacaaggcttcaatggagatacgctgatttctatgggcaaaatacaactctcgatgaccataaatggagtagttcctggcaggaacacaataacatccttcaaatacagcacattcgtgatcatcgactgcccaactatttataacgccatcctggggaggccatttttaatggattttggagcagtgacatcaatccaacatctatgtttaaagttcctcagcgactccagaagcataggaaacagcagaggagaccaacggagtgcgcagagctactacaacgtctcaactagaacatgcctcatgttccgagaaagaaataactctgatgccagaacatcttcccagaccacactgggggtagtcccagaagatgagcttgacccatgaatcggtgtggaatgtgtcatagaacccatggaagaagtagaggaagtctgtattgatgatcaagatcccactaaagtcattcgagtggggaagaacttgcgtccaacagtgaaagaacagattgtccccgtgatcaaagcaaataatgacgtgttggcttggagtcatgttgatatgattgctatcagtccaaaggtcaattttccatgcattaaacatagaccccaattgtaacgccctaaataattaggcacgctacccaaaatgcttatggaatcctaatcccctactcgggattactaattaaaacagcgcagaatttaaaattttatattaaacagactgaaaataaa

SEQ ID NO: 301325 - DNA, 2587 bp, Cannabis indica
gaattttaagtggattagtgcataaattacattttgtgcaaaattcttcacacgggcctcgacactacatggtagtgttggggcgcttaaagtttgatttttggcaacaagcttcctggtgtgatgactgataatgttttggtcataagtctttcaatattgcttggaattggacgattgaagatgttttggaaagttgaaagagagatctatatcttcatgttttgactttttcaaaaatatgataagaacatagtcgaaattaggcttgaagtttcagctttattttcttacaaatttttctctattttatagatcgccgtttttgaaatttgaccaatttatatattccaagtgttgaaacttgaaaccaaagattacaagcgtaattctattccaaaaagtgaaaatgaagaaaaaaattaactctacaaattgcacaaataataggctaaaaatagcctaataaattttcccaaactaaatatttactcgaggaactaacaactaaaaacaaccaacttaaatgaaataagtcaatctaccgaaacatgagtcacattttttcaagtaagccaaataatatggttttgtacaaaaaaaattcatttatatactttaattcagaatttcagttcaatcacacgttagattcgcttcaatctttcattctgttcatgaaaccataatcacactctagcaatttatgcatgccaaatacaactatcgatccactaacttaatatattccataagcttgcaatattcattattctctactaatataaatatatgcataatcaagaatcaaaaagtctttttaggcttgtaatgataggcttaggtacaggtagatggaatagtcatttaagcttgcctataccataagcttctctaaccagatcacccaataatttttttcacaaacaatctcggtatcccttttttttttttttttcaaattacacgtgagatttttttttcttcaacattgcaacaactttattattctttttcttttcgaatttgactctttattgtcagattttttaagttgttgccaatcgatttttcacatctttcaatttcactcttatttcccacacacatatatataaaactttccattaaagttttcccaaacttaagatccatttatagtataattagggtcaactttggataataatggttttatgttgttttggctcaaaatgtatagaaacaaagaatcaagttaaaactcaaaaaatggtaactaagataaaaattacaaggatggtttgaaagacttaatcgatccaaagaatgcctaaatcactttcctaaccatgcatcatttattatttcgtctcaaatagcaagcaagttctagaattttataaacaactttccacatttcacctttagcatacataaaccaattcaattgctaaatatttaccttttatgattctatgtttttttaaagcacaaaattaaaattaatcaagaatgtaatctcaccaagcacacggatttttcgaaaaataaatagaattttcaaaaccataatatacacttaactttcaaattgactcacatttagaacattgactcataacacacaaacaacacaaaaaataactaaaatgaaaactaaaaatttttaagttcactcccaaacttaactgacacattgtctccaatgtgacactaaagactaaagaagagaacatacctggggtgcctccaaaaagcattgtcgttaacgtcatataaccggacgctgatttcctcttgcaaaattcaactaggataaagtccacctcttgtattcataaggacccttgtaccaaatgacaaaaaatgtcctatagtgtacaccaggcgtccacctcctccacctcctgtttcgtgtcatgcacctgcattttcatcattagattcggaactcaaagatgatctcaaagatgatctttccattgcactatgtaaaggtaaacgccaatgtatatatcatatttcttcttttgtttcttataatcatctctcctcttcttcttactcttttattacttcatgaagtaatgtctcatcttggttagcttgctgcaatgatagaagagattaatactttagttgcaaatagtacttgggacttgttaatttacttttaggaaaatgggtcatgcaattgggtgtttacagttaaattcaatcaagatagaacaattgctcacttaaaggtctgccttgttgccaaaggttatgctcaaacctatggagtggactattgtgatacttcttctcctgttgctaaactcacatttgttcgactgttcatttccatgacagttactcatcattgacctttgcatcagtttgatattaaaaatgtttttttatggagatcttgaggaagaagtgtatatggagcaaccttttgggtttgttgctcaaggggagttagggcaagtttgttgtcttcgcaaatctttacatggattgaactaatatcctcgtgcttggtttggtaaatttagtcagactgttgagaaatttggtttgttgaaaagtaagtaagatcattttgtgttctataaaa

SEQ ID NO: 301326 - DNA, 1412 bp, Cannabis indica
tttccttccacagcagccagctgccgtactttgagtgactgagacgaaattgttgatgtggataagtgaaagtcgttttttagactttttccacgtcacttcccaaactgcccagaatgctgtagcattgcttcagcatttttgtccaattttcagcttttgttccaacttttcctttacatcacttcatttttcctagcaagttaattcttctttcccacaacaaacaagcaacatttaaataaaaaaaaacacaattaacacaataatttttacaagactcaaaagttagcttactaaacagaaattaaactaaaactacttaaaagtaagcaaccaaacacattttcactactctcctcgcaatattttcagctttaaagcataaaaaataactatataccatagagttatcaaatttgtataaagcatatctcaatcctaatccaattcatatatttatatatataaatcaattgagcagaagtttaattattgaaaataataaaattttatatacttaaatactagcaaaatgttcaagtttaccttcatattcttgcaattaatgaatcttcttttaggattaacttctgtccaagtttgaacccatggttctttacggtcacaattattaggatcccttaattttgaaaaatctttcttcatgccataattactacaagggcttaatctatgcagattgcttacatgagatgaagaggaagcatctcccatatttctgctagttcgtctgaacaataataggagtgagtcgagttgggggctgttcttgagaatgagaaagggggaaagggtggaggtttgtttagggcttgctcttatgattgagaatggagagggaggtcgattggagtcgaagctctggttcttcaaagcttcaaagctcagttcttccactttgaaaatggcaaggggatcaactgaaaatggcaggggtagattaggatagagtcaaagctctaggtttggttcgagaagaagggtcgacaatgatgattcttttaggttgaagtttgcttttttattttcttttgttttaattcattaaaataaatctagaaaaattgatttcaagttattagagatattaggattaattagtttaagttttttttttatttaagcgtttatatattacaacatgttttacctgaaactcaaactcaggacctccaacactcacacacccacctatggccacttgagctagcctgaagtggttaattagtttaagttttaaatacttaaaaaaattaagatttaatttagaccttacatgcgtacatattcttacatctaataggatagtagtaaaagggatttaaaatacaacgtttggtatttaatccaataaaaaaaaaaaaaaaaaaaaaaaaaaaaaaaagtag

SEQ ID NO: 301327 - DNA, 4973 bp, Cannabis indica
ccatcacgaaagaactccacagttaagcgtgcttgacctgaagcaatttcaggatgggtgacctcctgggaagttttcccaggaagcgtgcgagtgaggacaaacacgcttcctcactcgcacgctgaaaacactcgtgttggtatgtaaggtcattcatcagtccatgaagcagccagagtggcgtactcgttgaagcggagacattacaacttaacttctcttggtcctacttttgcttcgagtatgttacacatagtatgcagtttaaaccctatcttgcttgtattttctcgcaagtttccatcatgcgagattagctctgttggaggtatccattgacatgctatccttttccaatcgagactgtactcttatttttaagcgaaaacttggcactataacacctgagtttcatacttcattaccaaattagtttagtctttggtgtccctggcttgctatattaatagaatcctttggacttagtataaaatggagaaataataaaattttaattataatatagcaagaaaaacaatttttttacaccttttcacagttcacatatagctgcttattgcataataataagcaaaagctaagaaaacagacagaggcgccaaaagaaactcttaacatttatttcttccaggaaatttgtaatttaatccagtaacttatgcaatggggttcctcttctaactctctgaccagtacttgtgctgagatagtggttagtacaactcagcctgtcttgaataaaaagcaaatcaagccattcaaggcttagactggtaaccccatggatttttgcttgcccactcccactgatcccggcacatctcttctatgccatattttgccctgtaaaaaagatgcagaattagcttgagaacaaggctaaaacagttcagtgttagttgacttgttatatgaatttgtacaaatttctaaattgtgttttatttgttttcttcatagggatgtaaagagttttagtatacatacttccaacccaattctttttcagcctttgcagttgatgcataaacagctgtagcatctccaggcctccttggacagagtttgatgggaattttctaaaacatgtaatagaaattaatacaaaaaaagagaaaaactaaactctagaaggggtagagactagagagggagaaagtaaagaagggcgcaagtcaccttgccagaagctttctcaaatccagcaaccatttcaagcacagatgttccttgtccagtacccaagttgtaagcagtgcaacctaagacatccaaccattccgtaaaaaatccaagccctaacatctacttttggtcctattagagtttcttaagaaattttgtatgtatcttaactgttcatagtcaattaatttatttataaccatgttctcaaatttttgatagagaaacgtaccaatgtcatctgatgtaaaaagctttcgaagagcagcaatgtggccatctgccaagtccataacatgtatgtagtcccggacctgcaaaccagaaaagattgatgtctaagaaatagccaacatgaattaagataacactacgtacacagtaatttccaaagattcaggctgatgggtatacttactgcagtaccatcctttgttgggtaatcatgaccatatacgttaagctcgggtaaccttccaacagctacctgctgtatataaggcatcaaattgtttggtatgccttttggatcctcaccaatcttaccactttcatgagcaccaactgggttgaagtacctcaacaagataattttccaatctggctctgcgttatgaatatctctagcaatttcttccaggaaaagctggaaaggttgaattaacatatattagtcaagacagaaagctctaaccgacccattatgttcactctcatcttttgatgctcaaaagaagcatcatgacacaatacctttgttcgtccatatggattcaaagcaaccaacgggaaatcctcaacacatggtatcttttcgggttgaccatatacagttgcagaagatgaaaaaaccatctaaatgcccacaaaaacaaattgctgttatgatatgacaaaatcaaaacaggcaaaagtgttacatttgaagacaaatcgctactacatgacaaaaaacaaaattgatgattgtaaaaattggatggcaaacctttttacaatcgtatttggtcataacctcataaaggttaatagtgccaatcaaattattatcgaaataacgacgagggtatgcaacactctcgcctacagctttcaggccagcaaaatggataacagcatcaaatctgtcagcccagatcaccaaagttagaacccaaaacaatatactcttctaggatttggaacactaaaacacaagatgcaagtaaaaattgaaaatataaagattaattatcatattctacacacctagtttgagaaaacaacttctccagatcatccttattccttagatcaccctaaatacaacccaatctcagtaatccatataatttaatctaaagcacatttgtagtgaatataatgactattaagaagaatcaatctgaaacaaaatttccaaattttgaaactcacttcctctagaaaaattaatcataaaacttaccaatgaaacatatgtagaaagttatttttttccccttttttttttattattattaatattatcaatttcctgggaaccaaacactcctaatcagtaagagaaagaagctaaaggcatatataccagatgaaaacgaagctttttggagagagcaggtcccaccaattctttaaccctatcaacagcttcaatgacggaattgtcgagattatcgataattgaaaccgaaaaaccttcttcgaggagctgaaccactgtgtggcttccgataaatccagcgccgccggtcacgagaatcctctgctccaccgaacccattactgatattttcccaattcacaatcgaaaccaaacaaacgaataggagtttttaaggaggaagaaaacagaataactgttagggagggattcggatgagaaaggaagatatggacgatgatatagagagagaaagtaggatcttttgtttgtttctcgagaatcagttttacgattttagtatatttgtactgtttatcagtaaagttagttttgttggcgcgctttttccaatttttttttctgtgattctaatttttatttttgattatttttatttttgattaattattatttttatcaaaaaaaaaaaatatatacattataaatatttttaatacgagtttatcgcttaaagttttttttttctttttgtttttacttttttgaaactcaatttatgattttcttttttcaaccaaaaaaacaattattatgaataatcatatttggggaacaatgttattaaaattgacgagctggaacaataaatctacaatcaattatcaaaaaaaaaaaaattgaggaaattcatttgtgaagttttctactttagatttacgattttgtaggcagaggactagtagttagtgatatcaatcttcaaagtatactaaaaaaagcattttcttttcagataagatcaaatcaaatacagttgtgattctatctttatgtctttctggaaatttaattcaattattagagtacggactgataaatttctaaattaattgtatgtattttaaataattaatttatgatttttcttttaatttctatgtataattccattttgataagattaaaaataaaaagacagcttggaattctatcttcatgtcttgtatttgatggaaaaatgcaatcagctgctttatgagtagtacaatatagaagctacaccgcttaaagaaaatgatagtgaaatgagtcccacacgtttattgatatctctttcaatctataattaattatgtttctctattaaattataatgtattttaataagtaacaaatttgtaacccatcatatcaatatatcttttaggtagattttagtttagttgacaggtttatgtaaccttattttatatgatgatttaataatatttatatatatgtgttgtaatcatgtatggttgatttgtggctgaaagatccatttttgtgttcacctaaaaacacccaactataagaaatctagaaccagttttacataacattattataaaaagttgtatattcataattagtttgaacttgcgaaacgaaaactgagtcataatactaacaaacactcaacacaatcaagaaacaataaattaagagatctcaagttttaagtaatgaattaagcaataaacagaaaaaaataacacaaagtttaacgagttcgagccatgtgcaatggtcagaacaacaactaccatatctttattgatatcagtgttaacaaggttataaaaattctcacaaactgttaaagattacgagaaaaagttgttaggatttatgttctaaaaagccaataaagatatttctgatattagagaaagagttaaacatttgatgtgtgtgtgaatgttaaattgttaatatatgacaagggctgatatgaataaagttctctttattaacatgcctgttgacctcgcttttagctaaggacagtgagtcaaataataaatcaattaagtaatgtaattaaaagaaaacgaaaacaataaagtaaagtgaacaccaaattttaaagaggttcggccctgtaagtgtggtaatagcctactccactagtattgtattgacttaagagaaggaacaaagtcttcttcctcctgaaagctcttataattgatctctgagtaattttctctctagagtatatttctacaacaattctctcgatccctttcatagtgaggctaggtcactatttatagggacttaatgcatgagggatggttttccttttcctttggcagtaacttcattcgaa

SEQ ID NO: 301328 - DNA, 2083 bp, Cannabis indica
aatgtcattggatctgctcgatgaaaaatacaccaagtcacaaattacaaatgctgctcatcaacattgaatcacaagacactttaacaaaagagtttgaaaaagactttaaagtaggataattagtgttaagacatttgtttactaatacacgagattctgtagcaggagtatttaaccctaactgggaaggaccttgcattgtagaagtttttgtggaaacaggattgtacaaattagcatggctcaatggctcgtggagaaaaaacacctagatcagcaagtacgtaaggtcttattaccagtagcttgttctgttgtgttttattcatttattatgtaagaatatttaattttaataaagatgtatatttcaagtaatcataaagatttttcttaaaaattacttggggacatataaatatacattaagaaggctcgataaggcttagaaatatattctaaattataactaggctcaataatgcttaggaacaacaaaaattgcaaaagtaaaagtgtttgattaaagttggcccacaaaagtagaaaacaaataattgaatcttttttaagtagaaatgaaaatagcatttgttgtgaacgagattattaaagtcttccaatcaacatcaagttaaatgcgatctggataaataataatttgcatatatagcatgtactatttacgagaccttatagtgagccttgataaatagtacataagctaagatgtgaatagaggattaactattcacacgagtaataaaaaatatttaatacaagtactatttaaaagtatttaaggtttctctttacttgataaattggagagtataaactactaacacacaagttatcaaaaatgttcaaaaacagtcaactgtacaaagacattcaagtttgctcctcatttgatatttaaacttagaaaatatgttttgatgaagttatgtaaacaaagtttattcatgagaaaaaatatgtaacatattcaaaatattgataactcaaataaaattttctcgccagaatagtggaaatacatatatcatgatggaagaaaattattgtgtaatcaaagtaaagttggcaatccaacaaagcaaaataaaattaatcacatttataataaatgccatggaaggccaaagattgtctcgaccaaaaggtcattgttcaaaaattgatgttaataaaaattaagtctatatagtaggagatttagagggaatgtcttcttcttcctcttcagcaacctcggcctcattttccttgtcggagccaactctgttctcttccttacttttcttaaaatacttcaacatctcctcggtagcttcacccaaaaaactgagatccatgcctagattcattaaccaagctttataaatgcaacacttggccaccaaagtaacccttgcatgagtttcttccttagcctcgtcaaggactctcttagcctcatcaaggtctatctaggatttttggctagagttgagaagtttctgtttcaattcgttgaacttagtcttcaatgccctctcaaatttttctagatcttcaatgcacttgttttggcgagaactctttgattgggaatcattcctctaattagccaggagctcgtgatgtttcttggccttgtaaagctccaggcctatgtgattaagattttgaaaacctttctagtgagccataaatgctagaaaagaggtttgcataaaatatgaagacagaaagagaatgtgaagaaactattaagttgaaaaactaaccgactacataagatcaacaattcttgctaagagttcattgtaggcaccatcgttgatcaggttccaatcctctaattgaaaagtcctgaagtggcgcctgatttagttacatgccgcaagcaagccttggagcattcaatgctagcatccacttccaatagataagtgggctccaacagtatacttctggctgggccgtagaaaaggtaacttgatggacagaccctaaaggttgcccatctgtgctagcagatgcaagagctggagtgttgtattttatgccgtaaataaaactctatttcaat

SEQ ID NO: 301329 - DNA, 1483 bp, Cannabis indica
tatatatatatatataagcattttaaaagaacataaaatatatatagtggacaccatcattaaaattaaagaaaaaagttaaagatagtatgatgatgtttttacacaaattaataatgaaattattagtttaaagactatgcatggatctcattaccatgatgatcatcatatgtgataagaattctccacatatatataactaatattaatgcttttaatagtataaaacttattattaatatttataataatataataatataatatatattcgtagttaaaatacttaataatatgctagcttgcaatattttattattctttaataatttaatttttttagttactaaagtatccaaattattacttataatacaactacatatataaattattttagtataataactgcaaaaataatcatattatttgtagaattcaaaaacccaaattattttcttggtcctattataataacttgagtatttaatttactcgaaaactaaataactaactattaagcactaccaaattaacaatttaagtagtaaaaaaatgataattttatacaaacattcacatataatataatacattataaatgttataaacataatataatcaaaattaagattaatattataaattataataattaattgagagacttgcctgaaaaataagatgaagatagaagaaaactttggctcgagtggatccactttcttctccacttgaaattcttattaatagtattccaattggcattaaaaatcccattgaaatccatagaagaattccatgaactctaatatgagatatcaatctaggactcaactgaaaatacatatataatttatttaaaaaaaaacaagaagacatggatccaagaatgaacacacataatttataaattaaattacatatatatataagtgtgagtatatgacttgaaatcaaattatctttcttaatatatattatataaactaagtacctcattagagttgtttttgaggctcttgttgtgaatggtatcatcatatgaaatgcagcaaactaatggaagaaaatattggaagatagtaaaagaagctagcttcccaaaactcttcattctcaattgatgatgaaagtatacactaagaaaaacaaaacttctcattattattaatatatagagataatattatatatagccacattttctttctctctatcctctttactttacttttatgcttatagtgacttttttagtgacacactagacatatacttttagagaaaaaattaataaggtaaagtttttgaagagagatcattacattagttgcatttaattagttagagataaatataatttaaacattcttgatatatattaatttgtttatagttagctagatttaattgtatacttttttttttttaaatttgtaagagtattcatctaatttaatctgtattattttgctta

SEQ ID NO: 301330 - DNA, 1286 bp, Cannabis indica
aaagtatattttgttaatttttttccttttttgtatttttttgtttttttcccaatttctaatagaatactaattttaaaggttatgcggcaaaaaaaaatatgtttgagagttaattaataaggaagtaaattttttgaagattttacgggcaatcaactacattttattatcgcttgaaaagcttcaaagaaactgttgcttagccaatgcggccccaaacattaatgtacaagagttgcttagccagagcggccccaaagttgtgtagctaaataaggagttagttactaaccttacccactcttaattttgagaaagtcatggtttggtttattattttaaaacgtaatacatatgtttttcactcaacagatgaaaaagaaaaaaaaaaaaagaaatgaaaaaagtgagttggacaaagctggattgaaataagccttgctgaattttttttattattattactttattttattgaacaaaagttgtaagccttagttaaatcaaatttcactttttattgtttgaaaaagtgtcagtgaggtgcttgcttttggaaaatgaactaaagctaaatttgtcttgagaaacacgtcaaaaaaaaaattgccttgaaattaaagaaataatgattttactaaagccaatttagtttctcgaacataaaggagatggaaaccaatctaatccagtgtacaaattgatcaaatttaattaaaatttatcatcaaatttaaattggatattacttttgaaaattcaattagattaaatcaaatatctatagggtgtgtaaatatttaatattcttatttaatacatctaacatctaatcataataattagtatttttatttaattcaaatgattaattaaattttattattttacttaaaatatagaataattaatattttttattgaaatatttatactatgaagttgtgcccctaagatataaaacttgttaataatacctattaaaatataatttttacattaaggtagtctttccatgacaattcatttaattttttttttattaaaatgagtgacgtggtggatgatagttaataaataaatgcatattatattatttttcgctctttttaccgtaatgaataataaaaataaattttataaatataataaaaataatatcttttgaaggtttgcaaaagttaaatatcattttgtattgtattttgcaaaagttatcagatggactttttgttttattaaataataaattggaatatgtttattatgacatatattgatgc

SEQ ID NO: 301331 - DNA, 859 bp, Cannabis indica
ctctcttcaactgtgtagtcccatacctacacagtctcagaatcatcccaattgaccttcctcaggcgatgtgggattgcacagcttacccggtatttccccttacggatcacgggactaatgactgtcacatgaggcttgggacctcgacgccagctgcaccaccctatgtctggccctacttaggctacataaaacttaaaaagtctatccttagtttgtaatcagttcggacaacaagccaaacaataaatctttattttgggatgttatatcttccctaaatttgtccacaccaatgaccctgctctagacaagatactaaccagccatatccctcactaatcaagtaagaattagcaagaaaagtttattcaatgcatacttgtttaatactttctttcactctcacaatctgtctctaataccaactactattaactatagatttgtaattccaccaagagttgttctttaaataaacgttatgtacccattttacccatagtgtcttgtttcgtagccacaacccaagtatatttacccaaagcaaccatgttccaagtaataattttttgaaaccccaagccaccttccttcaccttataaagatcagactaagagatgtatcctagctcccatattccgctacacctttccatagaaaagatctgcagattgaattgtgttcaggctgaaagaaagagattgagattgagttttatttttcttagggttagaggctctgcatataacgcatcaagaatgtgacagatttaggttttataatctatttaaacctataaaagaaaataatacaataacccctataatctgatgctaatttaactctaaatag

SEQ ID NO: 301332 - DNA, 5788 bp, Cannabis indica
aagattcaacccaagtctttatttcaagctcatctcatttaaacctaaccctaagtgaagcttataaatgaaagagaagagagctttgtatgatgatgagtttctaaaatagaaactcctaaaatctcacttcttcttctctttaattttcgaacatttagaggctattttttcttggatttttttatgaaattttgtgccctttagtgttgagaacttgtgtacacatttcaaagcaatacccagcatagtgaggaagactatgtagtccaattgtcaccagaaagagaattcaagttcagatcttgatcatattctacaatagaaaggatatcaagggttagagttctgaacggaaggagtcatattattctgttaccatcaatgtaagggtttttataccttaatgtgtttatttgtcgttttttgggaattttatatttagaatgttagattatagaattataatccaacataatctagatcctggtaaataaattttcaacacacatttcataacctggatgagcaattctactcctaacgaaccatacatgaagatttaatgctcaaggtcacaatcagaagttgtgacatctgagtagagtacgcataaacatttgaccaacttccatcaagcaggtggctcgcatgcaccgaccaggggatgcgagttagcaattttaaagatatatcctatatattttcatgcttgcaggacatgacattattcctaaatttgtgggagagattcatatcattagagaagatagacaacctgcttagttttctattttgcttattgtaattatagaaaataaactagtttctcattttatttttttactaattttaaaaaaccaatttgatgtcattaatccttataaaagtggattatcggactatttagagggacgaattttattctgaaaaaacactgatgagagaaatctagatttaagagttaattattcagagatcactataataattttagagaaagatcaagagtttcttacttttcctctcacaaatcaatacaactaaataggagtagattattaacctctataattatggtattctctttactttacattatttaatttattctgttatttgattatcttaaatttcactcactgcctaggtcaacacttcttaaaggacttttaaattaaaaaaaaaacttttcatttttatccaaacatcaacaaaatttttttaattctaaaaactaaaaaaaaacttataaaagctaaaccaaacagcttcagaaattaaaaaagaaattataccaccattttaaaataataataataataataaaataaagtcaagattctatcctactgaatcaatgcaatatacacagatttgaaaatcacagtgaatttctttgcagctcaacaaaccatgccgggccccggtccgcacctaatgtacgccatgagctcgggcctgggcttgactaccctctccaatggccggtttactccacaccataccttaacgtacaccattaacgccttttttggtccggacatcggctccttctccgagtggctcagctccaccgttggcatcggcttcggttcggccctcgccgatgccatacatcaccccttctattacgtcctcatccttggtcttcctctttctttcttctactcttggctctccagattttttatcctaaagggtgtccttcattcaatttctggggtaagtttctctgttgtccctttcgtttgtttaagtaattaatgttttgggaaattggccagtttgagcatattctaattgagctagtttgatctttgttatctttgtatttttggggtttgctcaatttctgtgtatcatcgataatcaaccaagttggttgtatttttaattaattatgaataaacaacttgtgcatataaatttggaccttttgggttgttttattgctaccatgtgtactgggtttgagtggaattgctgatctgggttttggtttagctaagctaagtagaatattgcttgcagtgtttggaaatatattgggttgtgttctgatggctgaagttctttcttttttgacaaagatgttttgcgtgattattgctatattacatcacatttttgatcttaaactcctgttggttgtttttgattgtacaggtacccctttctaaaaggcagtgtttgcttttggtgtcagctggttctttatcccattttttcttagatcacttgtttgaggtaataatatttgaagttgatatgctttgttgtttaaccttctggttctacttcttcagaatattgaatagcataatactaagcttaaccttctgtagttggctaaatgtttagacttcaatttcaagtcaaacgaaaagaacagtttctcctatgatctttttatacttgaaagtccttggaagaaaagagttatgttgtaaaccgttgtggacttagacctgtgtttgacatctacaaagagatcagtttaggaaaattaactatgtttttgctgctttgtggaagtggtagggactgccttacatttgacattgctggtcattgtggatagccaaggagatggatttaagtatactttggcttatcataattttctttgcccatctgttttcaattccaaattttatactggtttatcactcatagtgtgattcaaatggtatggtttttttttttttttaatctttctctctttctatcatgcaggaaatggacacacaactatgtatacttggatattaagcactggttggtggaagaaccgagcacctaataacccagatgctattgttatagttggtattttatgtacttgcctaatcggtggcttcatctacatcaataggtatttcctttttaattttcatatcgagtttagtttttgttttgccattcttattatggttcttgacatttgcgtttcaattcctttgttacgcagagttaaacccttcaacgcaataaaacaacaatcaaaccagtctgtgaaacttattcttgttgtagctagcttgtactgcttatggtgttttagccagatatactgggtaaatcctcgccgagccgcagttggtgaagaggctgatcttggagttcttgtgttcttagccacatttttctttcttcctcactacttctgtatatcgtcaatgcacacaaaagatcttgaagcagagcaaatccctttatagcacttatttatcttcacaggaagaggaccttacactcctatgcttcattattcttctgtacagcaatgatcataatttcaaaggtgtatacaaactcctatgtcttctcatattacaagctttctaaacctgtgaattttctttagattctggttcacttctggttgtaactttgtgatttattagaattggaacttagaccttctaacatattctacatttgagaaaatcacatcacattgaattaaattaataaacagatatattatattgcagttcttaattagatatacaagccaaccatattcaaatgtgaaaatatataaataatattatttgatcgtaattgtttctctttcttaatattaatattaattaatgcttttttgttattaaaaatgcacaatattgtcatttcctaaatatgtaatactaaaaggtaaaaccattaattggcgcgcaatttccgtaataatgtgatgatcatcatcctaacagaaaaaacaaccaagagacttgttcctttcattcaccattggctcaaatctctcaaattctttctctttcgaaaaagaatgaagtaattcataattaaggccacgatgctcagttcacgtccttacactgcgacagcggctgcaacagtcatctcgtcctcctcatctaagttccgccactttgtgaggccacctctacagccattatcgacactgaggaaaaagatcccttggtggaaccaaattttggaccctggttcagaggttgtggccaaatggaaccatgtgttcctcgtgacctgcctaattgccatgttcatcgaccctctctacttctacttgccggtcattggcggaccggtctgcatggagatagatttgggccttggcattctcgtcaccttcttccgcaccgtagccgacaccttctatttcctccacattgtcatgaagttccgaacagccttcgtcgcccctagttctcgtgtctttggccgtggcgagctcgtcactgacccttgggccatcgcggttcggtacctcaagtctgacttcttcattgatctggcagcttcccttcctctcccccaggtcagacttctcatcaattattagtaatttgatcgattatatggtattgttgattaaaaatgtgtactttttgggtgtagattatgatatggtttgtaattccagcagtgaaaaatccgacagcggctcatgctaatcacaccctatctcttattgttctcgttcaatatgttcctcggttctttcttatatttcctctaaaccaaaggatcatcaaaacaacaggtgctatagccaagactgcttgggcaggggcagcatacaatctcctcctctacaatctagctagtcatgtaagtaatttaatgctttaacatataataacattaattaatactatttctaaaatagacatatattcacatgaacattaaaatgttaggtttcttatatccttttaaaaatttctctagtatttttaggatgtgtacaggggtgtgtttgagaaaaaggggataccttaaagagtagggaggtagctagttcgtcttggtgatttggttttagctacatattaataaaaatattttatgattgtggtcagtgcaggttgttggagcatgttggtacgtattgtcgattcaaagacagtaccaatgttggaagcaagaatgtgacaaggaaataaatttcacacattctccttcgtgtcagcctaaatttcttgattgcaaaaatatgggcgaccccgaacgccgattttggctgcagagaacccaagttctttctagctgtgatgcacttaacgatgctaacaacttcgagtttggaatgtttgctgatgctttcaccagtgaaattgcttcttcacatttcatcgaaaagtatttctattgtctttggtggggtttgagaagtttaaggtacgtatgattttcatttattagttcgatcgtcaattagctttcccacgtaagataagtacaattatacattgtaacgtatagttcaaaaacgtatggctaggtaggaaaaaagacaaacaattactaaagccaataggagaatttatagtaaacagttacaataaagtttgatgtgctagctatctattgattttgattgattggacttaataatttactacactttatctatttcatcatgtttgagataggaaaacaaaagtaattcaatttagttaggatcggatattaagttcggtgtcttttataaagtgaaaattacatgaaatatgggatttcataacaaagttagaaaaatatggcatttttaggtttgccacttttctatggcattttttcacatttaagttttttatggtatttgatatgccatatttttataaacttattatccaatcccatattttatgtttttgtttttagcttaattagttttatttatttttttaatttattttacacttacattttagggtttctttttatttgaaaaatttacaccaaatactacattttttttcaaacattacatttttaatttgacaagaac

SEQ ID NO: 301333 - DNA, 3663 bp, Cannabis indica
ctttttgggttttgggtccgtgtgggttttgatcgggttttgggttggcctggctttttttttctttttcaaaaatataatttttcataaaaagaaaatgaaagaaagaatataaaaagaagaagaaaataaagggatttttataaaaatactttgaacaaaaaattataattttactgtcacacggaattttttacaaaaatattgcctttttataaaacaatcgtaaaacaatacaaaacaaaataattaaaacaacaaatgaacagctaaaaaacaaccttaaaaacttacatagtacacagtataaaacttacacattatttttgaaaaaaaaaaaaatcgctccacagtaaaaagataaaaaaataaatttcagtatgtggtgtaaaaattccaaaataaaaacaatatatcattgttgagaattagttttttttttctttaaatttatgtttttaggactgaatagaaaatgtatacaaaaaaaattaaaaataaaataaaataatatacatctaggtttcaggcaagatagggtgtaacctggttttttcgggtgttaaattaatgaaactcgattccgacggacctggtgggtagccaggtgtaacccgattttttcgagtgttaaattaataaaactcaaactcaaccgagtggttaaccagaggcgacttgaacccagcttattaatttttgaaacttttgttttttttttttttttttattttttttttagttttttgggtttcgattgggtgggttttcagttgtaaatgagatgcccttactctcatgtttcatcaaatagtaattttgttttcaaaactttttaaataataccatttttacttttcataactcttaagcttctacaccaaactcttttaatcaactttattgggcctacaactgggctgatgaaatcataaatatataaagagtaattatcacaaatatcatttgatgagcttttcttaatttttaatttttaaaaaataaattgtaatactaaccaatattcctttttcaatattgattgtgaaattaatgtgaatattcaaataagacactaagatatgtaattaatatttatcatgaatatttttaaatgatgatcacattatatttaattatttgattgaaatcaattgtaaattatagtgtctaatttgagtgtgtaaaaaattgaaagtatatttatatacaaataaagttataagacatatatttacaccctatcaacatgtatatctctaaaaataaaactatttggatggacacattaagtataaggagatataagcggggagtttcgacaaatagggcaagaggcattcaatctgagccattcatcaatgcagttcgagtggaaatagtgaaagcaattcggaagagttcttactatatcattagcttgatattcagttaaacatatcgaacaactattgtaatcagacttcagaagtcgtcgactctctccaaacaatcttttcgggtacatttcaataatcgttttgtcaattccagtggatggtagtccaccggaattggcttcattatgatgaggaagagttgtagtagtagtagtagaactaatactagtgttagtattgggcaattggtgattatgattactatttctccaacgattattgctaaaaatcctattttcttcgtcttggcatttgggtcgacaattatagcacaaaaaccctaatattccaagaaatgtgatgaagtatagggcatattgaactccctttgacaaacctacattaagaaaaatcatattatttaattatttgtatgaatatgattgagaattaaagagtattattcatatttatttattcaattatataatatatgaataaaatttgttaaaattatagtacaaatgggcattaactatacacttatagctatttatgaatagtgagtaatagtagctcataattatagcaataattccacataattatagcaattattgcatataattaagtgttgtaattaattaaaaaataaaacaaaattatataaactaattattaaaccacatgcattctaaaacatatacgagtgctcactcactactaataatttaataaacctattccataatgaaacataaaataataaaataaaaacaataattaaagttaggtaaaattttgaataagagatttacaaatacaagcaatcctccttaatatgtatataataattttaatcaccattaccaagctaaaactcttcttaaatattaatatactaatatattaatggagcagttaagttatgttactactaaaaaaatcaaatttggtatctaaatatgtattaatttatattaattttcctagctaattcctctttctatattttaaaaaaaaaaactaattcctctaactaatataaaaaggaaagttttagttgtacctcaaaaagatatcccattttattattttattttgtataaagtatatatttttaatttatactcattcttgtttttaaaaataataatcttacttctaagatcctaatatttatatataaaaaataatattaaatatattttaaacattttttataataaaaacatacaaaatcattcattatctaaaaatatatattaaaaaatattaaaattaacaatgtgaaaatttttaaatatacataaataataaattttttctaaaaaaaatcattttttttcctctttcaatactatagtagttatataatttgtgtaaataataataataattataattataattagtacataccatgcttatttggaagattaaagcatccaatttccaaatcattactactactcacaaagccacaatctccaccacgtttttcacattctccacaattgggttcttgccacgtcagccctacataactcctcagataaaacccccactcctcctcccaccacttttccgacgccgtcaccggaaccataaccgccgtcgaaacaaccctacaaaacgccggaggcgtcgacaaaaactccgtcgcaaaaatctccgtgggcaccgccgcaaccgtgtaaccgttcccgctgaggcacggaacggccaacggctttactccggcgccggcgccggtcaccggctccggcgaacagttgaagaaagtgaagctgccaaggtttcggacccgaaaaggggtgccggaaacgctgaacttggtgtcgagaaaccgtttgggaagacagttatctgggtcgtcgatggttaatacttgggagccatagactatctctctgacggcgaaatcgccggcgggaagggagataatggcgtcggcgccggcgcccgtggtggtggtggtggtgtttctgcaagagaggtcgaaacctgggtagccacaacgagttgggtagtgtattttgatcggaaatttgaaatgggaatttgacagttaattcagttggagaaatacagttatttctgttacagatttgagcaactgtggttgtgaaattcatgatgattaaaatcgaatatggtaataagaagaatgataaaattttagaagaaacagacattttttttgtgtgtgtaatattattcattgatatagaaatctagtgtgtatatataatatatattgaattattatatatatatatat

SEQ ID NO: 301334 - DNA, 3274 bp, Cannabis indica
agtttaatatatacatatgataatttggggcatatggtacaatgataatcaacacaactcttccattacgacctaattagtaccataaataacacgtcgaccacgggaccagagggtctggtcgaccaccgtcgtacaagccacgagacatcatgtcccttcaggggttgttcaacaagcacatgcatggacttgcatggcctatgcacacgtgaattttgggtgctttcgactctcacagcttgaagctcagacctcttaggttttgggtcgttgttcgagggttgaaatcaccatctcgatgaggtcggggttcacactttaaacccgagctcactcatcaatggagattttgaaggtttttgaattacaatatataaccaaaaattacaaataaaattttgtattacattgtataaatcatgtaccaaaaaaatagtgtacatattttctaataaaaacatataaaatttgttagagattttattacaatggagaaaattaagacattacaactccattacaatataatacgagaatcaacaaagagattaaataaatgttacaatgacatatatacaatatatacactatatatattatatataagaaagatagaagatgaatatgcacaaaatatattatataacatataatgtaataagagaagaatatgtatacattcactcacaaccgtgtgtgtagataagtgaagatcgtccatgacttgaacaaggtattacaaatttgtctaaaagattatttccccctatctcaaagcattgagggaactctctaggaaatagctttgggaattatcaagccttgtgtttcccaagcaagtgcttgttgtagaaaactgattgtcacaaaatgagcactttagacctctatttatagtgtttgaggatcactttagaaaattaatttcccttcatctcatggctattatcggcactttaataggcgtttaatagagatatatgtgtttttgacaaggatagatggacacaatacagattaataaagcccattagtaggtcctaaacgacaagaattgggccaagcccaatatcaagctagccttttgggaaggcactcaccttgtgcgattagccttcgccaagcacaattcgtatgcggagaacttcaagctccatgtagccgaaaagacccatcagcgtgtgtctggaagccatcaatagtttcccgttttccaattcacacataataaggaagttaccttccacgaatattggacaaaaaataatatcaaacttaaaaaggaaactacgtaattgaagatcaaataattaatgcacaattaattatccaaaatcaaagaatacgacataaataactatcatcgtaattaacctgctaagtcagcatacagtcactgtctcatgggctaggcttcacatgataagaccaaagtacaatatgatttataaacaccccattagagggaaataaggtaactaagtataacctctattactgtataaatactcacaaaacccttcatgcaaagggttgaaattcctcaactcacaaacttaagaagagaatagaggaactatactcactgtaatccttttgcttttctagcctaacaaataataaaactaacttgtggactaaggctctttaacgccccaaccacataaaaactctgggtgttttttcctgaccttttcttttaattgtttttctttagttcttacattaaataattcgttttctaaaactctcaataaatattttagtgctttcattaaaagttgaaggaagcagtgataccatctcgagattacattcagtaattatggtactcactcaaaataaatctggtcttcattaaactgatcctaatgctaagacaggagatatagaatatttgaatgaggtgactagtcaccataaggatcaactcaataaaggccaaaatcttgacaatcttatagtaaaagacgatgaatcggtagaaaatagttataatgatcttgaagatgatcaccaagatacacggaaagatgattaccaagacatgcttgctgacggtggtgatccagacgagtcacatcctgtggtcattatggccaagaagttacaaatacctaaaagtaaattaacttggcaagaagatttttctttacaactacttgagaaagtgtcgagaatggaagatgtattaatagcaatgacctttggagacaaaaccaaacaaacaactcctgagaataaaaccactgaaaaagctgatcttataaatcctagagcttatgattcacataaggataaaggaaaagcaaaagtgaaagaaacctcgaagaagcctcctaaggctgaacagcaaaagaaatctaaatttgccagaaaggaaaccatgcctcagggtagggtaaccaaactgattctagacgcagctacgttgaaagataagtctaatgctaaagctaaaatgcctactactcagaagattacgaatcactgcaatgactctatcagtcaaagtgatagtgttgaagaagtgcatccagtatcagacaataatagtggaagtctctccacaaatgatcttcgaagaatgttgaatgcaaagaaagaaaaggccagaataaagaaagtcagacctcgagaaaatgatttgaggaatcatatcaatgaccgagttcgcagaagagaatcttcaaatgattaaactcgacgcttggaatgcaaagtcgaagagtttacaaagctcatgaaaaagatctcccaaaggcaaaatagaattgtgtctgattcagaagaagaggatacaaaaccatatgtgaagagaattataaatgcatcactgtcggagcgcttcaaaatacctcaaatggaattgtatgaaagtagaacagatccagggaccatttatccaagtataatcaaatgatggaaattgctaaggctaatgatgatacaaagtgtcttttcttttcactaactctgacaaaatccgtagatgattggtagaagagcttatctccaggatcaatccataactggagagacctacaagtaatgttcaagaagcaattcataggagcgaaggacttcgacttgaaagttagtattgaaaagtattggacctacatgtaattaataaaaattagaatgcctaagagaagaaaagtattgaaaaatagaatgtatgtatattggaaaatgaattaataaaagaaaaggctaattagtaatttttcctcctgaactttgacatgtactaaatcgtgttcctgaa

SEQ ID NO: 301335 - DNA, 682 bp, Cannabis indica
caaaaaaaaaaaaatcaataacacatatatgaaactattatatgtcacaagaagtagcagtagaaaagaacaataatgaaaataataataacgtaaataataatcagatattttataatgaaaactttttattcacatgacaccaaactacaaaattatacacattgcattccccaatccaaatttaggtaaactgtgtagtagaatcacgaattatttcttcttaagattaattatataaatgtatagatcatttccactcctcctcactaaataaaaaccagtattacatggtagaaagaaagtagctctatgaaataaataatttatataatttgtgttgttgcacaatttgtctgcaagcaaacaaaacaaaagcacagttgtgaacatataacaattctacattacgcagagtgatgaacaagtgatatttcacattgatatatccaaatgatcactgttcatgtgagtagcaaaataatgagttttaattaattaaattaactaaaaatgagtacaaaaagatgtcaaaatttcttagataataagttatatcacaacaggcttagaaaactaagcaattggatcaacttttgcatttttatactcattcctacactgtaaactctaaaattaaaagggaaatttcatattttggccttaataatacaacccatat

SEQ ID NO: 301336 - DNA, 735 bp, Cannabis indica
tttatttatttttctttttttaggcacgaaaatatgagttattatgggaaagattaaaccgtatttatagctctactttgtatcaactgagagattgaaaagtatttttggcgcaattttactctatgtcatactattaaaaaacatgaataatcactcttaaaaaaagttctccaccgaaccttgcttatggattaaaaaactataactagtaattggtaggctgcatgtggaattcaaacctaaaccttataagagcaaatttcacaaacttaaccatttgagctattttttttttggaataactctcaacataacttaagaattaatttcattgcaaatatcactataatatgtatgttatatgactaatgatgaataattagaacaagagtgtttatcacaaccaacccttaatctcgtgcgcttcaagtactagagaattaaactatgttgtatccaaaattacaatgacaactctgaaatagtattttcttgcgattccaacttcataacaatatctctcctattcttaatttgtattagtgaagcgtttgcttactcgcaaacactgtagatatcaaaactcgatagcactagggctggccttaggcataggcatgctaggctcgtgcctagagctcatacttttcggtgcccaaaataaaaataaaaagttttattaggcttttatttacgtaaaattaaatgtattataaacaataaatattcata

SEQ ID NO: 301337 - DNA, 905 bp, Cannabis indica
aagttttattaggcttttatttacgtaaaattaaatgtattataaacaataaatattcatatatagcttagttggctagagtgcatgatatattatacgtttgaatctcatgacactcatttttaatattttttaatatataactttgaaatgtaagggtctaaaaatctaattcgccttaagtctatatattctcaagaccggtcgatcttagatagcacatgtcatgttgatgattaaaattttagtgcaccaatcattattaattggatacattattaatgggaatgttaaattgcataagagactaacatcacaagaatggaaacacatatttcgtagatatgaagtagtactggttatttgtttcctggttttattaattgtaacaaaaattttaaaaggaaagtattgttaaaaaaaagtaagtagtttaattgactttgctaaatcgaaggttgacaaaatagaatgtacgacctatttttgtacttaattagcaaaattttgtcaatccaatattatactttaaagaaaacttagtgcattatgtttggtagaatggaatattgaaaaattgtatttcaatatttgctttgtattttaagctcgtataataattaatgtaccattctaatggaattacaattccactcaatagtggaatgagtaatgatacatatattttttatttggacactcaaatctcacactataataataataataatatgtaattcacttttgattatacggttaaatattgatactttgtatttggtaccctatttataataatgtttatttggtattctatatattttgaaattgtatatatgtagtactctaattaaagttaaatttaatttaataaaatttaattcaattgatgtcttaaatgtaag

SEQ ID NO: 301338 - DNA, 4172 bp, Cannabis indica
gagaagcaccttctttgtgtccatgtccttcacaaaacagattgagcaaagaattccacaaaaacattattatcggctgtcaactttgaaatactcaataaattcttggtaatctttggaacatgtaaaacattactaagaattaatggacatttatttttaccattcagccaactagtacccacatgagtgatatcaagtttattaccatttccaacagttagagtttcctgaccattgtaatcggtctttttattcatgttgttgacatccgcagtaacatgattactagctcccgaattcacgtaccaagcaatatcttccaccatttctggtgttgcaacaaaagtcgaggctcctccaccaccagtgttagcagattgagagtttttgccagcagagtttgaactagaaggatccgaacccatgtatgattcatcataccggttgtagcagtacgctgcactatgaccatatctcccacatacttgacatgttggtttggagttgttttgatttctaccacctcctctgcctctgaattgaccagggcctcttcctcctctctattaggatgaatttccacgatttccaggtccaaactgacctgtgtgagctcctctatttcctgcaggatgagatggtctggtagcagcaagattagcagaggggttagttaaaccagtatttttcattgcaccagaaagagtagttagacgatccagtttactatcgaagcttaggaggatgtcttgcagctcctgccacgaagtagagacccttgcttcaacctgaagaactatgggcagatattcgatatccaaaccagataacacattcgacaccagttgcttttcaaggtagggatccccagcaagagtgagaacatcagcccactaacgtttttgacgaagataattggccatggacatggctccttttctggaggtttgaatcttggttcgatactcatccattttgacacaagaatgagcaccaaaaagagtctcgagcgcctgccataagctagttgaagagtcacaacccatgacctctgtagctatgctttcggtcatggatccatacagccaaccaaggaggagttgatcatggacaatccatgtttcaaaatctgggtttacaacaactgaatttccacctgagatttctgagggtaagaactcgagcgttttaccttagtagcattcaagtagccatccaaccggtgaccacggacaatggcagagaccattgtcctccacaaggtgtaattattcctgtccagctttagagcgaaaggttgagttagcgtgctaccaacatgaggtcctggcatcgatgtagtaggagctgagggttgagcaacaaaactggaagcacttcttccagctgagccgtcttattcaccttgagcagtaggagttgaagggtctgccatggaggagaaaaagaaatgaacaccaccggtgtacggattgctctgataccaacttaaagaaaataacaaacagagaaacttgaaaaatgctcagctcaatgaataacagagctggccaattaaatttatataccaatcatttacagcagagaatcctatacaatcattacacaatcaaataccttttacatatattaaagaatattctaacggtacacaaaaaggacagagtttgttacaacaactaggaccaccacgtgcggtaaatacacctaaatttacagagggtaaaaatcatttcttcacaagcaccactagtaccatatcaatattcttttttaaaatacatttttctagaatttttggctctgacagttcgatcgaaaagtctcatctagtggccccaagttcttttctttccaagactcttctttactactaggtcaccccttagggttttatcttttaaaaattactactgtgtgaaatatatatttgggattgttttaaaaatatacgtaaatacaagtcggtaatatattatgtgttgtatacttttcttattgagtctgtcgactcacatatattatttgcatgtgtaggtaaaggaaaggctaaggctgagcagcagtgagtccagagctcgggaatgattatacatgtcaagagggtacgacctggagagtttggtctcgggacgacttaggcttcattttgtagtcgttgtgtgacatatttgtaaagtgtattttatattcaaagaaatgtttgaaagcaggattctgactttgtgtatgaatatgagtataaaattataaaagttaaaaagtttaagcaaaagtttaaatttatcacgattatcaataaaaccctttaattatcaaaggtgtgcactgtaattaaaaagtcaatgtagcgtgcttcattattaggatgttacaacaaccgtcaactactcgaaaaaatttctaaatccacaacattgcaaaacccaaaaattaaacacccaaaaatcactagttgtaaaagtcacaaaaggggggacttacatgttgaagtcgagattaggggtgttgggttctaagttgcacagtgaagcttcgcctgaaaaactcgccaacatttttatcaattcatcggtgttcgatcaaaaatccaacgagaacgatgcaatgggcaaaattacttctaaaagcgaggcaatgtccagaaaaagtttcatacggagtggtagaaggtggttatgtatattggtagcaagttcgaaaattcatcgtagttcttttgagttttttcttagttgagttttctctttgaaaatttaggcaagaatggcgagaagatgaaaaatgtcaagtgggttttctttctcttatttatatgaaaagttatgattcacgtattcatgatccaacaacttagatcaatcttgagaaagcatagatcacatgaatccagcggtctaggaatgccaaaagacatcattaatgtcattaatgacaacatttgcctcggatatcccactgacataactaaccatcagtccataacccgaggcatcatgtgcttccacgagtcgcaagacacacacaaaccaatgaatattgacacgtgtactccactcacaaaatacaaagggttggggtcaataaacctctgcgactcaccccttctggaatttcaaagggttccaactgttcatggccctgcatattgttaccgattcagatgaaggttgcaagcccccacgactctctagtctcgaaggcttgggggtaaatgttatttgcatttacgagagcatgacacatgtaaagcctatcatttcaaacctgcttgtgggcccattcacaaggcccaagtaaggcaatgactcggtccaaaagcaaagcaaggttgggattcggatttgacccttactctgttacgggtaaaactggacaaatagatctagaggattgatacttaactaaattattgtgcatctgaggaatcataaacggatacccttaggggtatcctagaagaggagtcgaaggggtgtcatggagcgtcgaccgtctgggactaatccgacatggcatgcttctgacactaaatcccaaagaattaggggtttgtcccctatgtcaggccttggaaatgaacacataaaaaattaatttttgcccaacatccattactctgaaattcactgttaactattgacggcgcacacctagttgtcactatcaagtgttacaacaccatacatacgaaggttatctctcgaattgggctcacctatccgacccaaagtcaatattacaatttattttaccccatcattagacatttttacatgcaaaccctatcaggttcatatttactcaaaaatatgactctagcccataattaaggccctaactctcactacaagaaataatgcgccgacaaaagtacactatatgcgccaataaacttttataaacatttgtgttttataaagtggaaattacgtgcagtatggttttttagaatgttttatgataaatatggcatagtttagtttggacattttttatggcttttttaaactttggccatgctttatgggtttttaaagcccatacgtgtatcatgtatgtttaaaaagcccatatgttgttgtttgtagtttctcgaggtaatttttgtaattttatatatttttaaatttttgtatcagtttttttattgtttacagtgttttttt

SEQ ID NO: 301339 - DNA, 2900 bp, Cannabis indica
ttatgtactaaaccatgcccccaaacttatatatctattaaatcatgcccctcgaattttgacatatactaaattatgtttactgaattttcatctatgttagactttttttaataaaattagacaaaaatctttaaaagccaataatctcaataaatcagagagcatttttaacgacattaaaaattcagaaaatataatttaatacatttcaaaatttaaggtataaaaatcctaattagcttttcttttttttttttatatccacttctctcctaccaaacattttgtaaagtctcgtccacaagactaacatctatactaaaacaaaagcctatcctcaaatccaaaatcaacaaaatggaaaacttgataagtttccagcttctaccttctcttttcttttgttttctgaaatttattttatgatgttattaactttttttttttacacaagttaatgtcaaatttctttaaaataaaaaggacaaaagaagtaatatttaccacacagacagaacataataaaaaaatatataaaaaaacaaaattaaagaaaaaaacatcaaatggaaaaagcttggaaaggaaactgattcagctttcttccaatcttttcaaccatggcccttggtcattaaggcttattatttattctttttattactaatagtgttatttccatggcctcaatgcttgtacaaccactattcccagcttttcctgtaaatcctcaaatacagagaaccaccaacaagataagaactcacagattattcacaaccctgcatcaaagaactaagacctctatatttggtgagtgcccacctgggaccatccccattttcatagccagagatgcagaacaaagctctggcctaattggggaagaatcacttacccagttaaaagctgagcttttccaagctcttacaggtacgtttttatgtatttcagccccctacgaatactaatatgagatcccattaactgaaataggacttttgttcttaatttttcaaggaatcaatagaggtatttttggagtcccctctgcgaaaaaatctgagattgaaaatctggttaggcagctggagtctcagaatccaactccaaatcccactagaaatttagaaaaggttcatctctattaatatattgtatgttgtgctgaccttagtttgtgattttatctttctttttttcaattttctatgaaaggtagctggaaactggaagcttgtgtatagtacaataacagtattaggagcaaagagaacaaaactaggattaagagacttcatctccttgggagatttcttccagaccattgatgttgctaaggtaggattctatgaatattcctaagaattttccctcacaaacagaatctttgttcattttctaaatttttgtcaaaattgaccttcagtgaaatagaaatagaattcttattgttactgttattttttgtgttttgtttgaacatctacttagttcaccattacagtgtaaaatattattttctgcatcatgaatagtgagatgatttcctttatctttcataaattgttcttttcaactggagagcaaagcagttaatgtaatcaagttcaatgtgagaggtttcaaaatgctagatgggcagctgactattgaggcttccttcaagattgcatccagatcagttaaaactcttctatccttttttctcctttttttacatataatattctattgttcttagctcaagaatctcaactctaactccaactcatttgttggaaaaactatttttccaagacaaaaattgaatgtatgtatgcaaattgacatttcatagttttttagtccccaaatatagtagggttaggcgagcatcctaatttcggaaaaaaaaaacatcatacacctaactttctgctgttcaaattctacagagagtagagatcaattatgatcactcaacaattattccagatcaggtattctgaaagcttagttgacattgcatataaatatgatatgctctgaggtgttgtttttcccactctttttaaccttagctttctcttttttgaacactatagttaatgaatatgttccggaaaaattatgatcttctgcttggcatcttcaatccagagggttggctggaaatcacgtatccttattcaacgagtctatttgattttgattacattttgtgattgccatttttttttcttctgaagttcaagaatattacataatttgttaccttcattcaatcactctagttatgttgatgatatcttgaggatagggagggatgacaaaggcaacattttcatattagagagatcagaagaaaattaactctatgcttctttagggttaaagaagatcaactctaaatgttttattttcattaatgtaaccttttctctgttcttatcactttttgctccacttccattgtaattatagatttatatagataaatggtcacttcacctctttgcagccaatttttgaagagaaataacaaagatgaaatccatgccgtggttacttattttgcatacttcatggtaccctgtatctacataattcctaggactttcacttcgttagcaattaaccctcaatacctaaattttgatgattaaatctcaaaacgcacgttctgttagcatttagttattttcatctatttttggcagttaattaccaggttgactgtccatgtgtacaaagggtattgtctacataaatacagtatacacatgacacaatattattagcccacgtaaataaatatttaaaaataatttaatttaaaataaaagaaaataaaaaaaacatttttttattttattttttttctttttcttcccttttcttctctctctctctct

SEQ ID NO: 301340 - DNA, 1659 bp, Cannabis indica
tttcggtttcggtttttatgaacacccctagtcactgaacaaaagcaatataacaggaaatacataaactataataaaaggatgagctcacaagcatagatgatcttggcaagttagtaaacttattagcagatcttcagccaagtttagaacatttctgaatgttgataaataattaagcctagggtttgaaatcaagacatgggtaatatatatggtctataatttcattaatttttgttaatggtggatattagtaatttaattattttattttattgttattattgtactaatgaaaagtattgttgatataattagataaatactatgtttggtgtgattttatataacaaataaataatgaaaattattccttattgcaaaaaaaattaatgaaaattatcccctcgctgaatatatgaccaacataatattgagactgtctcacaagaaaatgcgtagctattagcagaccgtttaacaaaatataaaacaacattgttcaaagattataataaatccttacaatcttcaaccactaaactaaaattagaaagcattataaaagaactatgaatagcttgaataacaacaagcctatttgactcaaccttcactctaaaataactttgagtcttcaaccaactaagaacatcattaatccccatcacttctgctaaagaaggagacaccaccccttgcgaataagaagcagtatgctagcaactctcccctcaaatcccgaatcatagaagcagaatcaaagtgcatatcttcctcaaaaatagttgcatctacattaatctcgcatgttttctccaatacttcacccccatcacaagctagtagggttaagctgcatcttgagtaccaatccacattaatcaagatttaataaagaaaatgacaccacatactcccctctctgtatttttcgattccacattagaagataaattgcccaacaaagcatcacaactatttattctcatctaccctactcatcaccacaccaagccaagaaaaaaacataatgaaacaaaatccaaccccacatcaactcaacaactcttataaaactcacaagacactaaataatgaaatattatttcattaaaagcatcacaaaaaggataggcagtgtcaagttatcatcatcacggttctcaacttgcaaagactgaagccaccataagcactcttgacaaaataataaattgtttctttcttccataaccaattatccttctcctgagataaactttaatgaatgtctaagataatctcagcatcactgtcattaaacatgtcccaaaccaaattcacatctcactcccgactctactcctgaaacaaatcacacaccatatggccttccaaccctgtaaaagaagaggtgacatatggattcgaatccaccgagaagcataggtcatgaaaaataggaaatagaggctccggacccgacccgacgtctaagcccatctttgagaatacattgggcttccctcagacttctccaaataatttgtttaacatctttaaaaatataatgagaaatttacagagtatactaacttttgacattttttttacacaaatactgtcaggcaatattttttacttttttactgtatttttttataagttttatac

SEQ ID NO: 301341 - DNA, 2791 bp, Cannabis indica
tagagattcttcaagagggtgtttagtagccaaatatgcctttggtttccttatgccactttgagaacgtgttctcatggaatgagttcgagagggctgctatacaccaataacaggttgggactgagtgttttgtgaggaaatgacaggttgctcaggatcctgctggggtgggggaggtattgtagatggtaaaagtgtctcaggtgaattaggattggatagtataggcatattttgggtggtagttgcaggatgttggtttataggtgaggaactggtttggtgagtatcggcctgatgtggtagctcaatggtagaacctgtgatactggtgctgggttaggaaactcagcaacagcagtagcaataggagcattagtgtatataggagcagatacagtagagaaggtagcaataggatcagatgatgaagaatgtacatgtacaggtgttggagatgtggtgtcagagctttggctggaaacaatttttcatcaaacaccacatttcgagcaatgtaaatcctgccttcagaactctcacaaacatagcctttgtgatgagaagaataccccaaaaagaggcattgcttggatctgaaatcgagtttgtgctgattgtatggcctcaaatgtggataacatgcacatccaaaaggtttgagaatgctatactctggtttgctgtcaaagagcacttcatatggagacaagaaatctagtatcttggtaggcaacctgttattggtgaactcagcataactgaaagcataccaccaatatgttagatccaaaccagactgagctaaaagtgtaaggccagtttcattgatgtgcctatattttcgttcagcccttccattttgttcatgagtatgaggacaagggtgttggaaatgaatgccttgggtttctaaataccttttgaagggtctatactcaccaccccaatcggcttggacagactttataggtaaactaaattgtttttccacttggcttttccatttcagaaagacatcaaaagcttgagatttttggacaagtgggaatatccatgtatatctgctatagtcatataagaagtggacataatacctatacccttcctttgacagagcatgaggagggccccataaatctgtatgaacaagagctaaaggttgggaagctctacttgtagatgcaggaaagggtagagtatgactcttcccttgaacacaggcaacacagaagtgtagatcttttatggagcctgtatgagggagctgggggaagtaatctagccagagtgctagtggccggatggccaagtttgtatgccaatatttcatcactgctagcagaagtattaaattcaacatgttgtacagaattagactgagaagcagaagatgttttatgatattggaatggttacaagtagtttatttcatgatcacatgatcagtacaagattagatggaaaaaagtattggcattagtaggtgtgtagggcaagatgacattgtaaaacagaatcacagggtgtagaagatttctctccaagaaggtaaagtccatccttaagtctccctttcaacaggacctggccattgtccttgtccttaatgaaacaccaatttttatgaaattcaagaaaaacattattgtcattagtcaatttagagacactaactaaacttttggtcatagatggcactttaaggacagagtgtaagtgtaaaggagatgaattaaaggaaggtaaagaggttgaacctatgtgagatatatgcaatttcttaccatttccaacatcaattgtcttagtaccatgataaggagtggcaacatcaagattggtggtggtattggttacatgatttgtagctccagtatccacaaaccatccagaatcatctccaaaatcgggcaaaacctcaggggagtagtaggatgtgtcatgatcaggatcactttcagcaagaaaggcacggggttgataagggccagacttgggagttacccaatttttatcaaatcggtagtggcaaattgctgcagtatgaccacttttaaggcaaacttgacagatcaatcgagatgtagagggaaagttcctggtaaacccatggccagttgatcgattttggatatcttgagaattgcctcgactgctaggttgattggatcgaaaagaaccagttttggagctccatgagtcaagttggcttgcatctgaatgtttaaatcggtgagagtgttgtgttgttcaaggcgactctcatgagccatgagaagggcctgaacttcctcaagacttaaaagatcactgcgagaagtgattccagatattgcatttccagttagtgttatcagtcagttcatgtcttctccaacaattcatcattgggcagcattagaacaaattttatgttacttaaaaggagcaccaggacgaggtatagtttacaaggatcatggacatacccagattgagtgtttttctgatgcagattgggcaggctccaaggtagatagacgatccacttcaggatattgtgtatttgttgggggcaatctggtctcttggaagagtaagaaacaaaatgttgtatctagatccagtgctgaatcagaatatagagctatggcccagtccgtgtgtgaggtaatatggatttatcagcttttgactgaattcgggtttaagacttctattccagcaaaattatggtgtgataatcaagctgctcttcatattgcctcgaatcccgtattccacgagcgaactaagcacattgaga

SEQ ID NO: 301342 - DNA, 1441 bp, Cannabis indica
  modified_base (1385)..(1385): a, c, t, g, unknown or other
aattcatatttaggatgttaaccgacatacatggcagtaaatctagatcttggtaaaatgattcccaacatagaattccttggccaatcaaggtaacccaattttaaacctaatttttctttgatttcaggttatgttgaagctttgccatgcccatgcaaaggccgagggctctgctgctgctcacaagaaggaacaagaggccaacgaggctgaacttaaggcggaaggatgctcgtgccaaggtgcaacctaacgtcgacaattattagctcacttgggtgaggttcaggaccaatgtgatggcttggaccaactgcttagcctccacaaccatgaggtggcttggttgaccgcttggcttatccttagaggttctttacgaggtttatctacacaaccccaacgttcatctgaggtatataaagtctccattttatgagagtctgattcaacaagggaaggagctttgtgagagtaggctcttggcagagtatgtcggccaagatgttgacatgatggctggccagggtgaggaggtaccaatcaatgagcttgaggagacagtggtcgacagacttgttgagactttagccgaccagccaggactatggtcggccagcctacggagactatggctagccatcctattggacgccaggctgtagagccttctttagaggctccacatgcccaagcgaatgctgctatccaagatccagctagtttgaacctacctagtgttatagtgagatttctctcacctagaaactcgagaccagactcctgtttggaggacacgtgtattcagttttccaagaaaagctgagatgtccatgagagactcctcgagtttaaacctcgcctgagctagaatcagcgagatgatgtgaatatgaccaaagtctaatcgcattcgtgtgactcgcattatgtgggaccaaagaatggatttaactcgcatgtaccaggatatgtgcgagtatcctttccatcctcctgcgagaacatagagatcgactctctataatgcgagctggtcccgatgacccaaaagcctcgataaaccaatatagactcgtgcatctaggttctatcggctcgttatatgatgtccgtaaatgcgactatctaagaacgcagacatcctagacttaactaaatgttaggtatatcttaagcccgcgagcttacaccggaatatgaacagccaacttgaacattagaagtcgcatacgttactgtatttagtgaatagaaattgttattcatttattaatgttttacgtttttagttaaatcactataaatcaatgtataaacggattgacaatgaaatgcaatccttgtgtaactaactggacacttgctttgtatataaaggngtgatccaccatgaaataggacctacgaaactcttacaacagtgcactaagcagac

SEQ ID NO: 301343 - DNA, 1867 bp, Cannabis indica
atatggttatgtcaggtctaaattgcctgtacccactactaacaaagtcaacaagaagcccatttacatcaaggatcagtagcttcttctgagaacgggataccaattttctttccggtaaggatccaggtatgtgaaaaagattgccttcttcagtggtagcatccaaaagaattccatcttttgcttcattcctttgtgatgaaggggcttcttccatcgtggtatctacgttgacagtgtctaaattcaggagatcactaggaccatcactaggatcaccattattcttgcagcaatcatttccatctagatttaatgcatcatgtcccctcacaagattttttgccactcttctgatcataactttcctcagaaacatctatcataacattcagagtttcgtttccacaagcactatcccttttatcaatcgtttttttaaccttcttccttttctgcgatgcagatttaatatctgaacagttaacagagtctttgtcacaaaaaatgtcaacagcctgttgtgagacagcctctattacagaggatgtagttccaatattttccacaaatccagatgtattatttccaaccaaactctgagatgaagtgtcatcaatgttattgtccacagccagttccaatgttcttcctgattcagatgaatttcccttttttgggtgatgttttggtttcttcctctggtacgtttcaattttcttaccttcagggacatggctaacctcagtggagccatcctgttgcattattgaagcagtatttactccacttggaaaaccacttttctcatcagtgtttggagaaatatcctttgtatctgaatggttaacagagtctttctcacataaaatgtctacagcctgtttattatcctccacgagatccctagtatttcctaattcagatgacttccttttttctggatgacatttttgtttcttcctcttgttcgttttaatttcctgaatttcaggattgtgaccagtaacctcaatgcagtcatcctgtttcattacagaagcagtctttactccactggaaaaaccaatttgctcatcattggttggagagatcctctttgtatcacttgagtttgaccctgcaacattcttcatatcagtaccttcatgaagtttatcaatagattcacagtcattcagctcattgttctttttccgtctctttttcttcttctttcccttggagtcattgtctgcattacgtatgggactttccaaatttgcagttccgtcaacaataggatcatcctcaagctgttgttctctctctttggaagtagactctgaagtggcaccattcagattctcatgctcagtattatttctctctgggctgacggttttagtttgttcacccttattattccttcttgaacgtctcagttccctgttgtcctcaggctcattcttatctataggctctggggagcaccccccccaaacttgtctctccactaataccaactacagattctgaatgcaagtctcctccagattcaatgctcttcagtgagacgctttcacgatctgtgctatcaattttagtgctatcaccactctttaacttttttccccttcttttcttttttgttgaagttggcaccaactctgtattaacattggcctcagtcatctcctcctttgtatcgttaatgacctcagtagcctcctctgctttaacatcgatctcggctgcctccttgtattaacattgactgcagtctctattggtgtagcctccatagagcccaatgcactaccagtttctgaatgcaagtctcctccagaatcaatgttcttcagtgagatgttttcatgatttg

SEQ ID NO: 301344 - DNA, 4854 bp, Cannabis indica
aagcaaaagtagtcatatattacctatagtataacatttatgtttagaaaaataattttagggttttttaaatatagaaaatcaaatttcccattattaacaccataaacttatatcaattattttattctgcataatatatatttatatttaatttgtattctttttttctttcttttatattctgaaaaaaaaaatacatacatcaaattttgaatatttggtgtaaaattgtcttaaaatcgatatatagttatatatatatatatatatatatatgcttgttatacatcactttctcagtacatataaacatttatataacatgtatatataatccataataaaacaaattcagttaattccgaaacataatttgttaaagagtaggtatatgcatatgccagatttaatcaacaacatatatacacatgaaattattatatagccaaaaatatattccaaaatattaaaatattaacaaagaaaaaagtcattacacattatctatacatgtacggaacttataatatgaattatacatttgtatttttattaataatctctctctatatatatatgattatgattaatataagaaaaagaaaaaagaaatttaactacagccgttggattatcatgattatgattatgcatgatcttataagctatatatgatcagagttaactatagtataagagctaattaaactacagccgttggatcaatcaatcaatctaagcacatgaaataccgattgaagttgcaggcgcgaaccgctccgaaccagttctcctcactaacgatccaatctccggcgaaaatccacctccgaaatcaatctcaggaacttcaggaatcgtcgtaagagtacttgatttgtcgtaaacaacgaggaatccatctttcgattgctccgtgttaactcggaagatcggactcgagttcagtagtttcggtctaaaaaccgatcggagaaatttgttcagagaacgagagatcttcgacgatttcttcgccgccgccgccgacggtgtaggttcaggtaccgcctgtaacggtggattcaccgggtgaggacgaggaagacctcgtcgatctgataagtgaggcatcgagaagcttctggaagagttaataatggcggaatcgagctggcgtttgaaggaattgagctcgaatgaatcgtaaagtgagctcccgcaatcccaaacctgattattattactcttcgccgtgaccttagtctgataattttgctttgatttctccatagtataacaggaaattaaagaagtagtagagagataagtagtgtttggttcgcgagaaaacgatggaaaatttttagagagagagagagagaaaagagaaaattggagcgagttagttatgatgttggaacctaaaaggagtttgtatagtcacgtccttgccttcttcaccatgattttattatttatatttaattttgaaggacttttcgtgtttttgtaataactttttatttatttatttatttatttataaaaggctgcatttaatgaaaataaaagatgtgtagttggcttcattagattattagagatatgacaatttttttaatatacatattaaagttttaagaaaattctacaatgcataatagagaatttcaaaaagaaaaaattaatctaacttttttaattattatatatattttaattatttaagatattttttaaattttaagacattcaaataaatttaatatgttaaaaatagagtttgaatattattttatattataaattattttaaattttttaatattttagagaagagaaatggtaaatgaccttcttatgtgttaatatagtctaactaactattgagtctcatataatttaatataatagcttgtagggagtattgctagccaatcgtaacgcgacatgtcgagaaaatactaagcactactggtgtctaataacaatgctctttacaaaatatcttaaacaattataacaataataatttttttcatataaaataaatataaaatgcattagtggggttttagaactacacccaaagttgtgtaaatattgttacaacacatatatagtttttgacattatcttaactgatttatatattataaagtattcgatcacattttcttcaagtgtactaaaataataaaggtattttatgtgatgcgacacacatgagctgtaacaaaacattattaattaataaacaaaatatatacatatatatatataagaaataaattatcttcacccttacaattcaaatcatggcactctacacaattggttaggaacttgaaaaaattgttgcttgatcgtcttttgcaagctcctgaaaagctaaagagcataaatatgatacttaatatttaaaatagataaaaatattaaattaacattagtattaagagttttatcattaaaatctaaattttagattaaatataaccaaaataaatctattaagtgttttgctacaattcactctaatactttttatttctccctcaagctaacccatacaaccacgtggcaaatatattattatttttcatgtgactttacacgtgtcctattgtgtaaatcttcacccttaattcttcccatcataataatgcatattaattaattaattaaaaagcagcatatataattcacaagataagaccaaattgttagttgaaaattagtggatatgatcgtgactagtagtggcaaatatgtggtattattattaatgtcttatttttttttttagtactatattatcagtgtaattaaatattaaatatcatatttaaaataataaattttaaaaaaaatttataagtaattatataggacattactaataaatgtgtcaaaactaataatactctggtactcaatatgatctatgttatatgttggaatccaaagaggtaattgcaatgtgttctttcccaagaactttatattttaattgatccaattaatattaaaaaaatggtaaagtaaaaaaacttgaaaaataatatatagtcatgttaatagaataacttggtaaataaatacataaagtagtaaagtcaaagtcaaacttgtacttgatgtaaatatggcttaagtctaaaagattagttgtactggtcatataattaagatcacgaattggatattaatattattatacctgtaaatatatatatatatttatataatatgtattagttttacttgcaaaccaagattgtgaaccaacattaattacattaattaaaaaaaagttaaataagatctttaaaggtgatagtgatcggacaacgtgactataagatgaatatttataaataatatattatatttatctatatctcagtttcttgtactgtaagtaatttagcatatttgtctttaaactacaaaatttaacaaacaatacctccataatattattgtcaaacaaataataattaagtcttaatttatatgttatttttcttttaattattgatgaaattaaaagttgacgtacgtgcatggaagatgcaaaaataaaaaaatatatattgtttgtcctgattaataaatgtatgatgggtctctttaattaaaagacaaaaataataaaagaaattagaatgttatttaatttatatcttttatcccctattaattcaattctaaaaaatatgttagttaaacattaactagagaatacatggttataaaaagaaaatagaaatatttaagttatacaatataaatttaattagttttgattattttatgtatatatatgttacaataatgatccaaataattatttatttatttattaattttttgctgaatataaggacccaaataattgatgaaatatttaatagataatttttcattctgtttgaccctaagtatacgggtatagatttcttatttaagcaataatatatatacgaattttatgatgttaaattacttaatcaaattaagagggtgggaaccagatataaattaagattttcttttatttaataagaaaataaaattaaatataaacataaacataaaaataaaataaaataggaatgaaaaatataatttggtgtcctgtactatatcatcctctatgtatagcctgtaaggagagttaattatatgagaaatgtatttatagtgtttttgttctcacttattttattttaataaatattataaaaaatcgttagccaataatattatgacactttatcgtagtactagtcatcataagtgtctcatagcaatgctttaaattatataatgaaagagagttattttgtagatcagggtatcatactattagtagtgtctacctagcaccttctaaatgtgtcactttatatctgattagcgatacttcttataaattattacatgtaagattggtttgctatactccctaaaagctattatattaacttatatgggatccgatacttagtttgattaatagcgatattgacacataagaagtgctaggcaccactaattccttttagcatttctttaatattttttttagttgtattatagttttgtcaggttgtattaattagtggtcaccaagtcataagcaattaattagttattattattatattataaatttgggattcattataacaatttggcattggggacgcaatcaaagtgtagatttttttttttgaaggaaaatggtaaactttattagaatgaactttcaaccattacaatagataaaagatcagcaggagcagtactctcactgaaaatacgatctgaatacaaacaagagctacgagcaagacaatg

SEQ ID NO: 301345 - DNA, 3664 bp, Cannabis indica
aataaaaaatatagctccatgagtaaaagctctctcataataaatggtgcaatgtattaccttgattacaatttggcaacccattctctatctatacaactaattttctctacatgtatatgagaaaatttatcactaagtgctcttttaattttatatacaacctatttatagtataaattttttggctccataaagtgtcatttctagaacttcaaattatggtatactatattttttactatttcaaaagatattatttacaagatgtgtactataaaagtacaatttggtattgtaaaaattcaaagacaaaaatagtaattatatatatatatgtaaacacaatcttagtttagtaagatgtaattaagtttgaagactttggtgttgatcttgacttggttgtgttaagatgtaattaaatttttagtcggcggtcctattattttgtttgtttgttttatttcttgacagaaatgttgtgaaagtcataaatgtgagtggggctaagtctcaaaggcaccatgtgcgcatatcactttcttagtgttgtattatttgtcacattcacatatgtatatcatatattagacccaccaatatatatatttacaaagccattgtatcctcatatcaatatgcctcccacccataaaaggccaacttcttttgatggctccctctcttcccctacccaaaagctaaatattcactatatattcaccactagttacatatatacatatatatacatatatatatacacaaacacacagctcagcaccaaaaaccttttctttcttgatctcttatattctcttttccccaccattttctacccattcattactacttccccacatctaatcttcttttctcttaaggcacctcaacctactttttacaagtgtctttaaagcttttctcttttcaacctatcttttagcatttttttttttgtaaagaaatttcattacattttttagaaatcaaaaaacaatttgtgtaagattttgagattactaataaagccaatgaataatatccatcaaaaccttatcaaaattattatgttattaaaatattactattgtggtaaacatacacctttcgtgattatctgaattcatattaacttaagtgatgttagcactttatagtgcctcttttgtatagttaaatctgcatttaattacttgaatttgttaagttgatgagaaccataattatatagtggtaaatatttctattttgaaaaatgcccttttcctctatataaaaatgttagttatttaactgattattagacttaatttcgtttatttttcattgtataaaagtgaatataactaaaaaaatatcacataatgaaatacaaacaataatcaagtctcacttatttggctaaagtcaaaatgctaaaaagaaaaacataatcatatgaactagaccaccaaaaaccctcacatatcacaaatggagacccccaagaatccataaaaatatacaaaaaaaaaaattaacagaaacaagaacaatatgtttctaaataagaaaaagaatacacaaataaatatttaaatctacatcaatttaatctccacacctcacaacggtgctccattattattattcaatttatttagttattcttttagaaaagaagtactgctgctactcctcccaaaattaccatcatacccatcttacttcccttaacgcacgcgctgccaccggccggcgtcgattccactggtgactcgctcccactgtcaggtcccgggccagctgccggtgaccccataggtgtcattgggcccggcggtgtctcaactgggctttccgtaggtgagctacccatggtcggtgggcttgccatcattgttggtgggcttgccatcatagttggtgggctggccatcatagttggtgggctcgccatcattgttggtgggcttgccatcattgttggtgggcttgccatggtactcggcggcgtggcactgacaggtggcggtgttgaaggagttgaaggggttgagggtggcatcgacatggaaccggttggggcagtagccggtggcatcatcatttgagcagtggaaaatgctgcaagagttagggagacagctaggaagagggtggcgcgtgtgagacccatttctccggccgccagagcgcgtcggtatatatatatttatatatttatagagagagagagaagagagagaggaataggaataagagtaggagctggagtgaggtgaggtttgatatatagaggaaaattttaggagaatttgatctttaattgtggacacaattgtaaagctcatcaaaattgagtgtcactcatcgtaatattgtgacacgtgttattccagaatggaattttagaaagtaaaagaatataataaattttgtatttatttatttttgtcttaagatgatcattatgtataactataaagataatgattgtcactttatattgttaataataagattacatcattaagtcttcttttctttttttttttatcttcatattggcttgacacgtaggaaggaaataattgttttttaaccacactaataataacactatcattaaagagcacattctaatactttatgttaattaagtttagggatatatgaggtaacaatcgtgagaacatatcatactagtttataatatgatattagtacaaggcataaattttcatgttgaagaattgatattaaaatgctttgagcataatggaaagttaattgttcaaaaggaaaaaaaaagtgttttgagcataattttataaatatacatttattttttggcatttgtaaaagttataatatatatggaacatttttaatggttacaataaatattaatttaaaaaataatatattattaaattttgatcgataaattataaaatagaaattagagttaactacttaaaaaaatatttatttttacactatcaaaaatattctattttgtccatcattctgtgttaagtacggtgatgagtggggtggtgtaggatgatgtggacccatttcgatgtcctaagacaattgtacttgcctccttttgtgaggattcaaaatcatcttcattttcccattgagtaaaagtgagctttcgccgaatttcgtgacttctaacctaataatctcgttttgtggtggctctgagattgataaatgtattcaacagaggtgttatcagggtgttttgtttaggactgggagtatggcgtctttggttactctagaggatttttccttatggataccgactgatgatagctctgccaaagatatcatctcctgatctttggttgggtgattctttgcgaagagactggttcctaaggttcagatgagagatgtcattaagggtatgtggaagctatctcaaggatggaagatgcaaggtggccaaaaatacttttgtgttttgcctcaacaaagcttcaaaggctcacactattttaacaaatgctccttggtctccatgtgatggtcttatcttggttaatgcgataccaaaagacgggcgatggcaattggctgacttggataccttatgttggaagttgttttatcagaatctagatttactaacatgtatgttgattataattctata

SEQ ID NO: 301346 - DNA, 880 bp, Cannabis indica
tcgtattaataaaatatacctctatatattcttggatagaggttttactatattattaacgaactaaatcaactgttataaggacactaataaatttaggagaagcatcagtccaagtacgaactcttaacgcatacgtaatagactttgccagtgcatgggccacactatttgcagcatgtgaaatggcttgacacgaaccaccactaacagcagttaaaagagaaacaatctcctcaacaataggtctaacccaattgcaaacacataatgaatcaatctcaacgacactaaaaaacccaaattaaaagcgcatatgagccccaactgaagagccatgagctcagcaatctcaaccttaaaatcacccacacacccaactgcacaggtcgcccaaataacccttgcaccatccctgatcacaccaccacaaccaacgaaacctcgacccagagtgacagcagcatcagtgaacaaagagaaagaaccctgcaacggaggcacccaactcctgctcctatgcctcacacccgactccacaccacaaacaccattaaaaccaatagacgcaccatttaaaccagaaataccagcaaccacaccagccctcgcaccatttaaaccaacaattgcaccatttaaaccagcaactgcaccagttaaaccaacaaatatcagcaaccacaccaacacccatgaactccaacagagcagagaaagctagctcctcaatcacctttagatgcgactgcttcttcccaaacaaaactaagttcctgtcatgtaacgtccccgcttcaagcctccattaggcccttacacccacagactaatggctcttatacacgggtacgccacactccggctgcttcctggatcg

SEQ ID NO: 301347 - DNA, 3336 bp, Cannabis indica
ttttttgtgtcttggacttccaccagcagagcatctccttgactctctgggaaactgaaattcatcaatgtaagagattttcttcctttcaacacaaatgtatcaagaaactgtatatagagcttttgtagagtactaatctagaacatgtatcgttcaaaaaattctactattacagggcattcatgttttctttttcaatactaaacaagaaaaagaaaatgacatttatggatcgtattgttacttaagctaaaagacaatcaaatttcttcattcatgtttgctttttcaataataaacaagaaaaagaagatgacatttatggatcgtatcgttactcaagctaaaagacaatcaaatttcttcattcgtagaaatagaacctctcagcaagttcactaccaacagaaattttatttcataacatttttttaagatgaaaaacaaagaaaattcctcaatagcatattactgccccagatgagtaaaatgaaaacttacaacacatgataatcaccagttccagggtgcaaacaaatggccgagtctgaatccattttattattttctgtggcgctggtcagttgaaacaagcataattgtggctctgcacaaccaaaaaagttaaatgttatgacttttcctagcaaaagttatttccttctccttttttattttggagcatgaagcttttcgttgggaagttgatgtttttttcccctttcttgtttcaagtacaccacaactatattatttctttctttctcctttttattttggggagagcatgaacatttttgttgggaagttcatgtttttcccctttcttgtttcaagtaaaccacaattaagatatcgacttcaaaactttgagcaacaataattaaaacaaacatttgcaagctctaaagaacaaaccttgtgatgaaacagacaatgaggcttttttcaaactactcacgccagtttttacaacattttgaacatactccatccctgcatgcatggagattgcaccccactgcgaatatgtcattttaagtttccgccttgttattacacgaatttttttcactgtcatacaccaaaaatcagcattaatttgtataagaaatacttcaggaatcaattcattctcaatttaaacatggttaccatatccatatgtaagagatagaggtgttaaaattttgttcaagattcttagtagtatttatttataaatttgagatctcaccttctactctaatttttcccacaactttctttgcctttggacacttttgttctgcattattggtatgcctgtcttctataggctgtgccccacgaggttgcaacaaataattgtgcagtctatacattgtcaaaaagacaaaaagtccctttagagtttgataaagaactatgaaactaaaacatatctatgattaaatcaaatacgaatgtcaagcatcaggcatagtgcaactaacccaaatgcatttcggagaaccatgcattcactaagaagaaactcaggagcttcagtgcagccacttgcccatgcctggaggcataatcgtatacaagcatcatacgcaatcaaagtttgccaggcatattgactgctgcaatgacataaggcatatccatgttgtcatgagaaagaacatttgagttgcttaaatctctcagtgtaaagtatttgtggcgaaatttcagactaatcaaactctcatgtagctctaagaaaacaattggaaggggccagaaatgatatggggtcccagctgactttccaaatttattaagataaacagagagaaagaaagagaatgcaaggagcgaatagacagatggtgatataccatgatgccgggtaaggaaaaaaaaattaaatacgtaaattaatatcgaaacatacactacaacaagtacatggaaaagtagataaaaccaacaaagcaaacatagtagaaaattataattggatataaatcgaaccttgtactataataagacgaatggtccatttggtttgccagcaaaacaggattatgcatcttcctctcctctcctggaaaagatttgtctactgatctgcagaattcagtcccgccaaaaaaaaatgaatttaactagatactaaaataagatatcctaaaatatcctagaatttacataatacaagcatgagaaaatgatagaagttcctttggcaatacctttccccaagttcagcagttctcagagaatctgacttgagatgttcatatccttccttattcgcatcaaaaccaactgattctcttgaaggacatgtcccattgtcagattggtcattttctgaaacgaagacttcaggagctcccatttcttgttgattgtccacctcagtactatttcttccatcatcacttggaccataaaatataggaggtgcacttggagttcccaagtcaactgaatctctaagcatactacattccctacttaatgtaccctaaaaatcaacaccagtattatcataagaatactaaacaatgccacctattctttttggttttactattaacacgttaattataacaagtaatcagaaagagaaatttaactaggcctaacaacttcaaatactcaaccaacgcaaacaactcttacttgacaatttctcaagtgaattcgtttctgaagatgatttgcagaacctggggtttcatttttatgaacactagttttcctgaaacccaattctccatctgtaaatcttctcaaattatcaggaacttcaatccggagactttgattcaacaaccctttattcaacgacgacccgttatggccttctaatccaatgttaacatttttcctcatcgaatacgaactaggtttgtaaccaaatatctcttcatcatcaaacaaatgctccctttgcttcgaatcattgaaacccataagtgcttcttcgtaagaataagtgctatcggaaacagaagaaatgctttcaccgtcattgtcgtcgttttcttcttcgtcgtcgttttggaatgccgggacgaccaatgtactgcggggtacaggcagcaagccagagtggagtttgagtgggggcagagcatgggaagaaggggttaagctaccattgttattaaagatagaaggagatttgggaaatgggtctggggcagttctctctgctagaggagatctcacgtttggtcgattatcttcagcttcagcttcagcttctgttccctgtaaaaaagaaaccagagcaatatcaatacagcaagacagggcaaacaattttgtcaatttatatatatatatatatataatatatacacacac

SEQ ID NO: 301348 - DNA, 2245 bp, Cannabis indica
ttcgtaaaataaaaaccgtaaccgtccggtcggttataaaattttaaaaaccgaccataaccgaccgattttcacccctaataagaacatggactactccattcattaccaattagttttactaattagtttcgagatagaacatcatgcatcttaaaccacatcttaccaaattctatcatggtatcagagtcatatttctagcgaactttcgatccacacctatccagatagttagccatccgcacgagatccagatagtgcaaggacgcttgagatccgaataataatatgcgagccatacataagaacatgggctactccactcattaccaattgattttgagatggaactccatatttctaactaattattaactagtaacaattatatatgttattctaaattttacacatctgatatggcacctacacgtgacataatccagttgactcttaacatgaaaagggacttccggacataagtgtgcctaagaggttccatatgaggctgatgtccataaattgaagattgacttccaagaagcatccagctcgactatcaatatgttggccaaataagggaagattgtcacaccatacaagagtgtttcataaatcatcccataaaaaagacaagtctcaagaagggcatggccggggtgtcaacatgtcgggcagtatgaacgatgccaggactgtcagacaaggttatataagccttgatttctttttcagcaacttcaacaaatacctctaactacatcctacaaatacggatctgactgttttgtccaagattgtgggatcttcaacaaatcgtaactgtaccctagaatatagaaatatttatttttcagtcactccttttacagagctaattgtaataacctttcaattataaatggtgaataaatctataaagagaaggacctgaaatctttatctcgcatcttaaagcacttagttgaaatatattttctgtaacatcttgagagtcctagctagaattcactttgtctaccttagtaatttacacgacattatctcataattaatacaactaaaagaaaagtaaaccactactcatatctaaagggactgaatctctataatttatgtgttctttctatttattcattattggtgattaatcaacgtttattaaattcctgataattttcccattcaacaatatatttattaattatcacctaatgtttgaacaaagaaattggaaaaaagacaaaatttaaaataagaaaggataggaggagcatattttatttatacaaataaccattgagagtagaaaatttaaattaacacatttttcatacataatattgtgcaattaatcttaactattcaacttagttgaattattaaaaatttaattgtttacacaggtgggctttgatagctggtagactccctggacgaacagataatgaaataaagaattattggaattctcacttaagcaagaaaataaatcaatcacagcatcaaccttcactatcacaacaacaacaattacaaccgccaccgccgccacagccaccacaagagaatgttccaccaccgccaccgccgaaaatccaagaagaagaaagcaaaggaaactactttgaatttaactttgacacaattgagttcattgacttctcagcagaaggtaatttctgtgagatagagtgggtgaatacgtttcttgagctcgatgatgagcttcaccagttaccatcttaataatgctcataattaatgggtgatatttttacttttttttagtggattttattgttttcattaaaccacttccaatgcataatttattttattttttatttttttaaaatgattttacacaaaaatatgaacaaatattacaattttttacagttaagctctaaaacacaatagaattgaggatacaaattgatataaaaagtaactatcagataattaataaactaataaattgatataaacacaatattttaatgataatattgaaattgaaaaatgtacattaacgtctcattattgtttatcaacactattgtaaacaattaataattaaaaaaaacatatttactgcgtattaaatttaacaatgttacgttaaatttgataaaacttttattgaacaattatttttgtaagactacattgaatgctgcattggatgatcttccaatctatatatataaataaaggaaagcataagagcattgatgtg

SEQ ID NO: 301349 - DNA, 1652 bp, Cannabis indica
aaaaaaaaaaactttaaaatgtataaataaaaaaaagtaaaaaaccccaactgagtctcaaatggtattatcattttaatataaaacatgttgggccatctattaagaaaaattatttaaaaataatttgaatataaggagtttgaattgagtttcttattgtacttggtaactgtaatggtagcttggccaatctcatcgttatatttttgttttttgaagaagcttttcttgataacaacaccttaagatgcttcacaccttatttttagcattttcctacttgaatgtcttaagattaaattccaaatgataaatgagcgacatttacaatgaacatacattattttgcttttaatatttatatatttcatctcagccctcttcttccccattccccatttgacactcagctaattagcctaatttaatgatttctcttttctccttttcttttcatggtttcttcattcaattggtgataataaacatgttttagtgttatgaatatgtgctatgttttgttattttagttttcataatggtttcttcatgccatctcttattattgatcatgatgctctgtgtttgaattgatgctctgtacaaaaacttagaatttaagaaatttttgggtttttggaccatcaataaatttgatgctaaagtttcgatgtggaatgatccaattgtgttgtttgtgaaaagagcagagaatccttcatatcttcaagatggatgtatccgaagcaggttcttgttcttggaccgaatatgttcatgctaacccagtaaaatgtttttacaagacgacattttggaagaatgatgagattctaatgcagctttggaacgaagtaaataaattggagtcatttaacattcatacacgaaatatacgagacattgtttgtgatcgaaatggagatgaaatcgagttattttattggaaatctttttatgtaaagagtttagttcatgttaggaggaggtgaattaggtgattgaaaaatagtaatgacttgtcctaagatggttttgactctaattttcacatggctgtttagttagtctaacacacaatgctctacaaagacccttcgttgagtatataaagaaaagtaaatgcatgctttaacttaatttaatttaataatcgggtgctacaaatattttctttggtgtaataaatgttggaacctgccaaaggttgaatttgctatttctctttcccattttgattttaaaccgcgtattggactataaatagtacaaaaatcagtaaaaattcactgaatcaatcaaaagctccattaaagatcataaattataataacaattcaagcttctcaatccatataatacgcaattaagaagaacaatgtcagtcaaaatttgaattatcaaacttaataaagaaggtgtcttgacctcataaagttaaacacaccaatagctatgcaaaatgcaaccaaaaaatgtacaaacatatatctttatatattaaaagtgcatatctaacggcatttcttagtttaacattcttggtttaacagaatatacttaaaaataaaaaaatattctgttatctagaaaagataatataaaagaagattgattgtgttagcttagagatttttgggcttgggctt

SEQ ID NO: 301350 - DNA, 986 bp, Cannabis indica
aattataattataagttagagagtcttgtagagagagagatacggattcgccggggtcataggacggggttccaatctgacatggcagagagagaaagagagagaaggagggagagagagagagtggttgtgctgttggtattgttggtgatgtcgttgttgttgaacccaaacgcacccttccactcatacctcgccacgtggcataccccagtcctttacctccctcctcgaccaaatttcatttttcggtcttctaattctaaaagctctgctctttctctctctctctcatgaagaagaaaaaagtgtaattgattgcttgctgggtttttgtaattgagtgatgttttttctggtttttttcttctcctattttgcagccttattttgcttttactttgcaagtggggagcccttgtttcttcttataaggtttcctcgcctttgtttaagtcttagaaaataagaaactttcatttgttaagtagttttgcagtgatagattccttaacccatctttcctttctatgctcttttctattttaggcatcaccttcttgttttatgttaagaaaaatttgcaaccatcctttttaattatgggcaccttgtactaaaactctttaaatggttatttgttagttattcatatttatgttactaagaatgtgatgtgaaggagaagcttaaattagtgttttaatcattatttattacattttcaaaaaattatatattatttattaagtttggttactatctgaaagccaagatttatatattctttcataattctttttaattattattcgaagtggttattaaagtataaacttattattccttttattttaaactgttattcttttcgggaactaattaaattgtattcagaaaggactaattgataactctaatgtcatgtttatcaatggtaaggtaattatttccttacatttgtttatttacattattaaaattag

SEQ ID NO: 301351 - DNA, 3650 bp, Cannabis indica
ggctaccagaaaaagatgcaccttgttgatataggtagtaaaaataaatctacctaagctctcttcaactatgtaatctcatacctacacaatctcaaaatcatcacacttgaccttcttcaagcaatgtgagattgtacagctcccgatattttcccttgcgaatcacgggactctgactgtcacaatcacctcccttttgggggtctgacatcctcatcgaccacactttcggttgggtgaaggctcttataccattttgtaacgttctcgcttcaagcctccattaggccttctctcatagaagaatgattcttatacatgagtacgtcactcttagttacttcatggaatgacgattggacctacaaaccaatacgagtgtttctagcatgctttatcctcactcgcatgcttcttgagaaaacttcccaggaggtcacccatcttaaaattatcccaggtcaggcacgtttaactgcgaatttctttcatgatgggctacgagaaaataagaggcaccttgttgatataagtagtaccaatcaatccatttaaaacctcttcaactatgtaggcccatacctacacagtcttacaatcatcacaaatgaccttccccaagagatgtgggattttacagctcattgtctttccctttgcggattacaggactctgactatcacaatgcccactgttatgttaaaatggaagggcataaggagcctttctgtgtcacttttgtgtatggtttgaataatttagaagaaaggaaggctttgtggaaaggtttagaaaggttgaaatttcatgttaagccttaaatcattatggaagattttaatgtattcttccattatgaagataaaataggaggtaatccagttggcttggttgaaattgaggactcaaatcaatggcttacttttggaatggtagataagctttctagaattggttcaaacttcacttggactaataatcaagatgatcagtgcatttattctcgaatcgatcatgtgcctaaaaatgaggattggatagacttatttcccaattcttatgcctcaatacaatgggagactatctcggatcattgttcttgtatggtgacttctactgttatgcaagatataggagtaaaattgtttagattttttaagttttggatagatcataaggacttaaaaaagttgtcatggtgagttggattaagcatgttcgtggtaaggggttgtatgttaattactacaaaatcttaaggttgaagcacattttgaaggtgttaataaacaaactattggggatattaaggtgatgtatgttgctgctaaagaaaactacctaatggccaagacttaaggtcaaataagaccaggtgatacttctttgatttaggatgaaagattgctactgatcagttttgtactcgtgcaaaaatattgcatagttttctagttcaaaagagtaaagttacccaaatgaaaaaaggtgatgagataaagtgtatttttatgcttacttaaagaaaagaagagaaaagaatcacattgctaactttgtaaatgatcagggacaagtaatcgataattactcggatgttgttaatcactttgttggtcattttaaaagatatatggatagcaatagttctatctctttaggcattaatcttgattgtattaattatggtgctaaactctttttgaatcactagctacaacttatttcgcctttcactcacaaggagatcaaaattgtaatgtttagtatttcgagtagtaaaagtcttggccctgacggattcgactctgaattctacaaggtgttatggcctgaaataggttcaaaagtgtgtaaatctattttgaaatttcttgacaatggaatcattttgacatagtagaataaaatttccatttctcttgttccaaaggtagatgttcctggtaaagctattaattataggtcggccgcctgctgtactataatttataaatgtataattaagttgatctgcttaagcctagctgatgttcttcatcatcttgttcaccagagtaaaggagcgtttgtgaagaatagaacaacaactcacaacattcttattcttcaagatcttatcaagaattatggaaggatgaatgtttctcctcggtgtgctattaaaatagatctctgtaaaacttatgacacagttgattggggctttcttgaagattttctcaaggctctttgttttcccacccgtttcttaagatggataatgacttgtttgaagatcacctcttactctctaatgatgaatggtcgacttcaagggaattttattgggaagaaagggcttaggcaaggcgatccttcctatgtccccttgctttttgttcacattatagaatacttgactagaagacttaaaatggaaccaacataaaagactttttgctaccatccaatgtgtaagagtcttaatctaataagtttttgtctgatcatctaattcttttttgcaaagggacaaaacaagcagttcatcacttgaagcttgctcttgaagattttagttgtgctacttgtttaatagccagcaaatctaaatcccaaatttattttggaggagtagatatggtcaaaaagtaggctatattacaagatattcattttgaggagggaacatttcctttaaaatatttggtgattcctttgagacctactaaatggtggaaggaggattgtggagctattattagtaagataaagcttaggttgctcatttggaaaactaggcaggtcaagtgcaactgattcattttagtgcttttaggccgtagaaattattggatgaatattatcatccttccttaaagtatcttcaggaaaattgagaagctttgctggggtttcttatgggggcagaatggtactaaaagtaaggctcatgttgcttcttgggagaaggtttgcttacccaaagcttttggtggtttggggttttggagatagtgcaaattggaatcgatctattcttaccagatacgtgtgggcgattatggagaagcacgatttgttgtgggtcaagtgggttaaggctatctatctaaaaggctctgagtttttggattaaaagcttagacatgatactagctggtattagcgtaaactttgtcagttgagattgaagttcagcaagcatagtattcaagcagcatgtaatgaggcaagattcgaactaccaaactttataacagtctgcttcagcaaactcctatcttttataaggaagttgtttggtgtaggataagtcttcctaacatagatttatgttatggcaggttgtcaactctcatctacttactagaaatattcttattggagaacattgtcccacatggattaaatgtaaaagtattgagccatatataagaacatggtctactccactcattgccaattggttttcagatggaaccctatgattctcaacatggtatcagagccatatccctagcgggctttcgatccacacctatccagatggtgcaaagacgcctgagatccgaacaaaaataagcgagcaactgacatgacctgtgataagttgattcaagattggtgagaaaaaatagccaccatcttgaggggggatatt

SEQ ID NO: 301352 - DNA, 2525 bp, Cannabis indica
ctttttaatatatatataaatatatttatatatttttttttcttcttcaggaatttcttgtatggataatatagattatgatttgtctaaattgttatcttcttagtagcatttatgaaattgtaataacgtgtatgtatccaattcatttcataaattataataccatttaaggttttctcttcctctaactaacattattttctattgttttcatctttttattaattaaaattcatatatttgatggatatgttatgcagcaaccaattaaagtaagataatactgtgtccatcataaataataataataataataatgctttatccttcttattgatatttgtagctgaaaatttggtattattttataattaacgggttcattttacaagttgtggattatatatagttattataaagcaaatgatggaactaatgacatacaatagctctttcaaggacattattattaccagaaataactagttacactgtaaattattgatagataaaagttaaaaatccttgatgaacactttacttaggaatgtaaccatacaagttgaccatcaacttgataagaagataagacgagttgaattggttggagatagagatttattatgtgggataggtttatatacttagcgtaaagactttatttctataaaaagaaagactttaacttagaagcttagaagaatatctttaaaaaattagctctcatcctataattgttcctcttttacgtagaagttcttatagagaaccatcccatctcatcatttctttcttacacataaccaataaataagcaacacttttttgctctaataatttgttaaagagtcccacattattaatgtgtagaaaaataatagaatatataagatgacgagctactcttcccattgataattagttttgagatagaacccattcaccttatttcaaattctaacataattttaattaaacacactactcacttttactataactttcataagcctctaaatttattaagctcgttcactaattataagttcttctattcataacttttatacaattatatcatttaatcatcacgttacttatttaaattgtcggataattagatatgtcatactctgattttaatgagattagaaaccatttgttgttagcagcattgcttattattaagtaacagattcccatttgtactaaatgattttctaggattttctagttcgatttcagtcatatccaatttatttaccaaataaactaaaaaaaaaaacctaatctaggttatcatattcatatgttgccaaatttatcactttgtacaaaagtagacattatttactcttgatttttgtaattgtcttcagtactgactatttactattgtgtaaatagtaggcaaacaaaatttgttaaaactacataaattcgtatctcattttatttaaactaatatatatattattaaatgtttagctagaaccgagaaaataatttaaagagtcttactaaagaaatgttgatcatctccataatatcattcttttcagactaaacaacaatgtttttttaaagtttacaaagcaaccgatttaacatccttgatacaagatcatatcaatcgagaaatcaatgaacttgttcctataatgaagctctattataacacacaatatttgactacatctttcttcatggccaaagaacatagccataaatacccagaaaatgtcataactttctattctcctttgattctttgataatttccaagtcattttggataagaaactgcatgcattaggaatacagactgcctcattatagtttggccatttggttgccataggttggatcgatgcaaacaactacctgttaaattttgtattgtgtaaaattatcaggaaaagaaaaaacaaatatgtacagacaagttcaacagtgataaactgataatggtatgaagaaataccttcccaacacttttgccagagtggagatactcaactgcgtcagccacagagttgactcccaaaaattgtttcggatcaacaacaacctacaacaagaacgaagaacgaaaaggattgaggattaaagttctatagctcagcttgttccagggatagaaatttgaataatatagagtcaacttgacatgtaacaaagtgaaaactaaaaaccattaccttcagcttccccatagagaaaagattaactagtttgtccaaatgttgttgccataagtaactatattgtaccaagaaaaaaccagcctgaaagaaaaaaaagagttgtctctagaattaatcaaaatgggaaacatagggtgtgttcggtaacccttttaaaaatggttttttgtttttaaaattaaaaatttaaaaatacaaatataaattgtgtttgataactctattttattttttatttttaaaattaaaaaacagaatggagtgaattttaaaaacatattttagatgattttaaaaatttttaaaaacactttt

SEQ ID NO: 301353 - DNA, 3775 bp, Cannabis indica
ttgattgagcttattttataaattgtggctgataggttccatcttaggaccaaattgacatacttattagaagcttgaataggttttactaagaattttcaagtacacatgagcttttgatgattttttttctcttcgtgttaacaaatgcaaggaatctttatgatatattgtcattcttcacaggcgaggctaaagcgacacaggtggcacaagaaagtactcaaaacaagagatcctattattgtttctgtagggtggaggcgataccaaaccatgcctgtttatgctattgaagatgccaacgaaaggcatcgcatgcttaagtatactcctgaacacatgcattgccttgcaatgttttgggggcctcttgcccctcctaacaccggagtggttgctttccaaaatttatctaacaaccaggtacgcatatgctcttttgcgcttttcaactcaaatgaggatatgatctagttcataacataaggttgttgttttgtgttcatgtcacgattaattggttggaggttttgtctctcaaaagattgtcagaattaggatgagaagtattatgctctaagtggttccgattatcttatattttgtttttatttggttgttcaggcttcgtttaggattacagcgactgcagttattctcgagtccaaacatgaaaccaagatagtgaagaagctgaagctagttgggtatccctgtaagatcttcaagaagacagcatttataaaggacatgtttacttcggatcatgaaatagctcgattcgaaggtgctgctgtcactacagtctctaagattagagggcaagtgaagaaggtatgcctcctgctgagtgcaaagtcaatatcttggtggttatcatatattaacgaacaagtttaattttcgtttatatgaaatgttaattaatttttatttgttttaacccgaccaggctgcaaaggaagaaatcggtaaccatcccaagaagatgggaggacaagtaaaggaaggaatcgttaggtgcacttttgaagataagattaaaatgagcgacattgtctttttacgagcttggacccgagttgatgttcctcaatttttcaacccgttgacaacatctttgcaacctcgtcaacaaacctggcaaggaatgaaaactctagctgaattgaggagagaacacaatcttcctatccctgttaacaaggattcactctataaggtaactcaatctcgttttgatattctttttcttgttctgtttcgccacttatgtaattatttttttttctttctcaacagccaattgaaaggaaggttaaaaaattcaatcccatggtggtacctaagtctttacaagcagctcttccatttgcgtcgaagcctaaggacatacccagccgaagaaaacctcttcttgagaacagaagagctgttgtcatggagcctcacgagagaaaagttcatgctctggttcagcatcttcggcttatcagacacgagaaggtataattagtttttataaaattatttacagattgaatatttgagttgtgaaaatcttgattgttatgtgtttttgaattctgcagacgaaaaagcggaagatcaaagatgacaagaaaagaaaagaactcgaaactcagaaagccaaagacgacgagatagcaagaaagcggcagagagaggagagacgcgagagatatcgtgaacaagagaaacaaacaaagaaacttaagagaaactcagataggtgaaagtagtaagtgggatttgtctactgctcacagttaactttattcacattgcaattttgctttgatcatccatttttgattgtatttttttaccttgctcacatacaagcctcaattttgtccctttgatgtattatatattaagttaatatataaactatgtttcactttcaagttgtggattagtaagaacactagttttcgtgtaccctcttataaaactaattataataataatcaaggattgttttactaatttttgtgtgtatataataaatacaaaattattagtggctgcaaatttggtataagatatatttgaggcataattcccaatcgttttgggagtttgaaaatttcgggacacaatttagtacatgtgaatgtttgagtggtttagggtacaaattagtacatggagaagttttaaagggtttaaaaagtacgggacataatttatagtacatgtaaaagtttaaagagtttttaaaggtttgaaaagtttgggacacaatttacaatttaatatatgtgaatgttcgagtgaagtttttaatggtttgaaagatttaggatacaatttagtacatgtgaaagttcaataaaagtttttaagtgtttgaaaagtttggatttggggcacaatttagtacacttttatcggcaaaagtttgcaacagcttgaaaagtttggagcacaatttagtataggggagaaaattgtaatgaatgttttggtgttatctgtatgtgatagatattccttggcatgagtatgacattcacatgtatggaaatgtgtatgtgtgagaaatgtttgagtgagtcatcattgttttcgacaaagcttgtgcttgatacgacgttggattttgtccaccacccaaatcatgatccatcctaacttctaagtcctcatcctttattcattcattcattctattatatcatttttatcatttgtactttggctggctctcactgtccttatcttatgccattatgtgaccccaatcatacacatatatgctcaaactttaatgtagtgaaaagaaaaaaataagtagaaaatgttaaatcttgtttatggtatggtcacatgtaatcttttttctatttagcaacaagtggtatttatttaccataacaatgaaataaagcttctaacaataacaatagtacttaatatgaaaaaactaacaacaaagaacaaagttaatatttttttggacgattattatgttatgttctaactactctaattatattttttggatactagttttcctcaaaagttttcttagtgggtgtactcaagtggttttaatgaaaaaaaggtgtagatttttctttttttagtcataaacttccaaagtaagaaccttttgatatgaaggaatgttttgaggaaaattattgatttttcatgcgatcaaggtgaataggtggtcatctttcttagaacaatttgacttaaatcgacttgagaatcactggcggcggacttagaattttattcgagggcaaaataaaatattaaaacaatataatatataaatgtacttatatatatttatttgtgaggggtaaacacctatttattctacataattaatttaattttaattttgtgtacatgtaagaacaccacttatctattattgggtttgccactattgagagcaaaatcttattcttaaattaatgatgtaagtgggtgcttcgacgcttataattttagaaaatttgaacttgagatgtcttgtatgtaatgaaaagtgtggttatatgtttgataaaaggcattggattaaaatgaaaaattaaattttagttaaaaacaataaaactcaaatacttttgttcaaaaacaataacaaattttcattaatttttttatttagtaataaaaacttgatcaaattataacaacactgcacgtttatcaaattgtatctcaaatcaatataatcactgagatattttattatattatttagggtaaatactatttt

SEQ ID NO: 301354 - DNA, 1393 bp, Cannabis indica
ataaaagaaaaatattttgccatctaacttgccaaaaaaggactttacagaatgaaactgaatgtcgttgttgggatgtttagttcagattgtataggttgggttatggagctttgatcagggaccatgctgggacttgtcttgcctctgtagtaactcagcacgaggctctctttcaccaccggttgctgaagaaatgaccattttttatgggttttttctttgctcttggttggggtatgctgagattgatttggaattagattgccaaaagatcaaccttgcattgtcgaaaaaagaaattgttttggctgaatttagatctgttttatctgatattctttttatttgtgtaaatgttaaaggtgttaattttttgcattgtaaataaactgaggacaccataactcgtagtcttgctgagatgggtaattctttagactatgctatgctttggtggtcaaatttatcgaattgtgtttgaatcgtggtatttttggctgatgccttacaaaaaaataactttgtaactttacattatacacacaatattttagaaaaatctctctcctctagcatcatgccatcatacacaattagtttaacgtacgtgattatcatgtgagagttagacctcgataaattactaataaatataaatatgcagcataatttttaaattatttaatgatattttatcatgtacaaatacaaataaggtcgaggataaaatatacttatgtcagaaaattgggagaagcaaaagaattcttttttcttataatcaatcaagtagactccccactgttttatttttcctcttgttttaaagtgccactggttttttatagttcatatctatctctacatacatccctttctcacctatcaatattattgttttttatttgtctttttgtttctttcttctagcttgcacacctatgctttttggatattatttttaatttttatttttgttgtaaacgatacactttattataatatgtatacattcacattagacatataattatgtgttggatatgaagaagcttcattgaactattacactaggcttatcatagataaattgtataagtgcagtatatattgattattatattaaatcttattattgaattaattattatatttgttctattattatggatatgtgtaagtgtcattattatgaataaattaagagttgaataattatacttcacaaattctacttctataaattattcacgttactaaaaaataagacttttgttagattatgtccaatatgactaagctaatgtggcacttttaatattaataatattgttactgttagactttttatttaggcttacattaaattttattggttttattaaaattt

SEQ ID NO: 301355 - DNA, 3451 bp, Cannabis indica
aggggcaaaattagtacaatgtttaaaaaagaaggtaaaaatgatagattttaaaaaagaaggtaaaaataaaagaggagaatataaaaagggtatagagtgtaatttcctccctaaaaatattatgggcccaattaaattggcccataatggcccataaacaaagagataggtagaatttggaagtagaagaagcagtgaccaaattttgagagaacagagaaaagagagaaattccaagtttgagagaattgaagatcgaagaagacgatgccttgccttaacctctccactaacgtcaccctcgaaggcgtagacacctcctctattctctccgaagctacctctgccgtcgccaagctcattggcaagcctgaatccgtacaacaattctctctctttctctaaactcatacaaatgatttattgttattttgtctgtgaattttggtttatcgtattttgattagactgtttcgtcgttattattgcccgtgtgttaatttttgttttttttttctgggaaattgttggtataataatggttaaatatttaattttctcctttttgatgttttagttcatatctgaaaccctaaacaagttggttttgggtatacatttttcaattacagaagtaggggttaagacccataaaccagttgttatgtttatgttgttcttttcttaggggaattgtatagttttggttatgagtgaagtaactgagtatttttcatttgaaactgttaggagaatatgtaaactaaaagggtatatgggtaattgagtattttaccttttgtcttaagaaatgaagtttcgagaatagtgagattgtatctcctcaacaagctcaaagtaaagtaaatatatattactgttttctgggtaaatatttaggtgacttttggttggagatgatgaaatggaatggagtttctattcatttgtttagttgcattttaaagtattgaaatgtcttaatcattttggtagaatgaatgactattctatcttaaaattagaggaaagactattgcaatagatgaaaaaaagttaaaatgatttttttatcaattttttttatgcattttatatttcattctatttgattcctctttccatcattcatattcttatgtttttatttctcccaaccaaacaccacttagtgttttgaacttgagctaaaacattaactttgctgtgtttctttgtgtgtgtgtgtgtttgaaacgaattgaatagctgtacaattatacaacaaaagaactaaaagaaaactatccattttttattagagaccttgagtgttttgtaaaaatagtcatcatggcaatttttattagcaaaatagccaatatttggcgaccaaaaattacactgcactaccataaaaagaccattatggttgttttgtgaccataaatgtgtttatttaactaatttaacattttcatgttgttagtttggcaaatttcccaacattaattctgtcccttacttattaatgctgtgttttttttgctgtacacagtatgtgatgattgtgctgaagggctcaattccaatctcatttggtgggaaagaagaccctgcagcatatggtgagttggtctcaattggtggccttaaccctgatgtgaacaagaagctaagtgctgcagtggctgagattcttgagaccaagttgtctgtacccaaaaaccgattcttcctcaaattctatgacaccaaggtgagcctctcaacttcttgaatttactataatagatcatggagtgtggtaattctcctgcacactttcatttctcattgcattcttcctgtttgtttaggccaaccaaactcaagaacatgcacagtgtttacatgcattacaccagaactagagatcatgtaaatagttatacccttactgctgaaacccccagctaaaattgttcgagcattctttaatccataggctactttcgatcacttagctagccgtttgttcatgctgtaagttacatcctctttcgcgattctgatgcttgtgttattatttttgcagggttccaactttggatggaatggaagtaccttctaaaatcatatgtcaaaatcaatagttttaggtgaatcctgatggagattacgtatttcgaattggtcacttcaccttcctaagactggtaattaagacaattatatagagtatttctgtattcacttaggtgtggctgaacaaacttgtatgcttctatggtaatggtatgtgttcttgggaaaacttgtgttgtgtttcattgacattaaatcaaatgatgtttaccactccatagggtttggtatcccaagctaaaatggtttatttttacaatcaaattcaaagagaaatactatgggacactaattcatttcattaggtgtcatattgctatcaaccaatttaaatttattttaatttaataattattatagaaaatcaatactcaaattgaaatgcttcttcatgaagttatagcctagtctccttaatatatttattaaaccttgaaactatattttaagatccaatttgaccataaaatcctatttgacttcttgcaatttttattattagtattattatatggtcttgggatacaacaaaaagtttgttcaatcttttggttaaatttaacaatccccctcatataggatcaagattagattagattagattgcatattattttttttattttttattttttatttttgaaaaaaaagattagattgtattattttatcctataaataatacatttcccacatcatatgtcaaatatccatctaaaacatgaaacttaaaatgatttttactgttttaaataattaatttttgtgacaattcaaatttttattttttaacataattgtttttgaaatgtttttgtcataatttttaaaaataaagggtaaatactaaattgtctaatttatacaagggttaaaaatactattttttttgtaagaactttatatttttatatcaattttttttaatatttttacttattctacaaaaataagaaaattatatgaaaacaatatcaaaacaacaataaagcaatataaaaaataatatacaagtattaaaaaattaataacaacataataagaatataacataaaaatacaaatacactaaaagatcatattttatgtaaataaaatttaaaaactgtgaaaatattaaaaattaagttgatcgtattttgataatttttttatttttgtatttttttgaaattaattcctttattttcttggttggtgttgagagaaaaaaatgataaagagacacctcttcttacttaatgtgcacgcgtaatgaagcttgcaatgacaggaaaatatatatatatatatataaaaaaaatacacatattataatagaaatgaaaaataaataataataa

SEQ ID NO: 301356 - DNA, 1151 bp, Cannabis indica
taataaattaataatagttctcgcgggatcaacttgtatttaccgttatactaaattggtaaatagaaataaaaattagtaaatttattgtagtaaataaaactcaccacttgattgagtcttatgcttatgatcaacagagacaacttcattttgataaggatgtgaataatgttctcactgccataactaaagtacttaagtcctcagagggtgctacttctattcccattaatgatagttcttctaatggtgatggtcccttatttgagcatccaataaggtcatcacatcctctagttaatttatttgcactagtttcagatccatctgagcctgatttagccttattttccttcgctcatgaggagtctccatcttttttgcctctagttcaggctggtttggtgaagggcgagtctcagtctcttcctactacagctgatgttcaggggagtctgatattggtgctgtccaggggtagtttgatattgctattccatccactattgatccagtttttgttggtccttctgctattcttcctaatgttgctcctgatgtttcctctttggtgcatcctgttacttcatccattagtgctccttatgttgctcttgtggcctattctaccagtgagtgattataatcactgagggggagatagttgttattgattttttgtaaagttgttccaaacattatcacgtattttgggtttggtcttatggttgtgttgtcgttgttaatagtaatatttatctttgtttagtccttttgtatgaaccggttatatcttttgggatgttttctttgtgtctttagtctttttattttatctcttcggtctttttgttttatctcttcgggtttgttcgatgatcataatttgctaagggagagattgcatgtgtcgtgttttacagtggaaaattatgttggttacccttctgtctgtaagggtgttagttgcatctagtctagctttgataattgatcgtttaatactttgttagatgcatttgtttatctgtaatttttttattgtttgtcaggtcatcatcgagttcatttgtgtttgttggaacaactcattgccagctgtaatgatttggtaattcagttggttaagtcggatgtactgaagtaga

SEQ ID NO: 301357 - DNA, 915 bp, Cannabis indica
tctgttttctctgatttcaaactggtgtgatatctgtaagccaaaaaaatatggtggattggaatttaggaatattgagcaatggaactatggagctttgggaaaatatatgtgtgggatatagctaaaaaaagggataatttgtgggtcaaattatggattaattccgtgtacttaaaagaccgtgattggtggagctataatgctccacaatgggggcattggtattggaggaaaattggagaagtaaaaaaggagattaaaggcaaaatggattttgatgaattcatttcaactaagttcagcattcctaatctctgtctcaagctttggcctatttctcaacaaacttggaactctttcattttgaatcggtttagtgctcccaagcacaaatttatcacttggcatagcttgtaaaaaaagattataaaccagagataggcttgccaagtttggtatcatttctaatgatatttgtctgctgtgtaattctaaccaagaatctcatggtcatgtattctttggttgctttttccgtgcagaaatttgcaaaagtctattttgttgggcaggaattcagaccaagaaggaaaatttggaggattgtttgaagtgaataagagatgtcaacattaaaaattcaggcgaaaagtatacactgctattattaatgcagcagtttacaatatttgggaggttcgaaatttaattcttttggagtcaaaaatgtatgcacttgaggttgttgttaaaagaattatgagagatatttgtgatagattttctctttttaaaagagagaaaattagtatagtggatagagttttgtttaaaaaaattgaggattcttaactgatttgttcaggatgtatatgactcttgtattttggttcttatgcaatgtacttctca

SEQ ID NO: 301358 - DNA, 3847 bp, Cannabis indica
aagaaggtacttcagactcttttaattcgttttcaccacaaaatttcaccaaatatggatgccacttaaggacagcaaaaacggttgtcaccagttctttctcattgatggacttgtgtgcccaaggcttcaatatacttggatgaaataggtggtcgattaccctcttgcatgaggaaaatgcctaaaccatgtcccgaggcatccgtctcagccacaaaagccttagaaaagttgggaagagccaaaatatgtacagtacttgcaattggcaaaaaacttttgtggcctatgcggaacaacaaaactgatccttcttcacttgattgataagggggcgggcaatactcacataacatgccacaaacttatgatggcccagaaaacctcacaattcttgaatggaggtaggtatgtcgaacaccactaagtgcttttgtaacaagccgactagtgagtgatttgttgcattatctttcgaagacacttggcattgccgaactttaccgaaccccttcttcttcgtgttgaagagtaatcatcgacttgaatgttatgtcgggacagatcaccctttaagtgttatggattgcctaccaacattcaatatcatattgcattcctttcaatggtgatagctgcccccaagtgtctccaatcactatacctggagtattatataggtatttcccatggtaggggaaggaaatcgtcgataatttccagctcttgtagtgtagggaaatgactttgcagattcctgccccatgaactgcttgttggcacaccacacgggctcttgttggctggacttcggggtccatccatcatcttcatagcaatctgcatcctggccttgacgaattaaatgcagcttttcggtgataacacaacccatgcttgcaagtggtaagttgctctttccaattaagtccgtagcgtcaaccaatttcaccctatcccctttttggtttgtggttcgtatctagttatgatactgttttcctttttctttcatttagattttcatttgattcattttatcttggtaatcctggtattcggcgttcaccagatcgaacagctttgataccaaatgttatgatccaatcttcctaagaacagaattcagtagcagtagaaaaaaacatataaatcagtaactggaaaataaagcagtagagcagtaggtaaaccaagccatttcagccatggttttacattatatttctcgaaagggaaagcaataacagaaaaggatagtggtttcctttcggaccttgatgcagagagaaatctcaatatacatgcatgagtcacactctcacactaacagccataataaaccttttcctaccactcacaattacaagaaaggtccctctattcacttgacgagcaatacaaatgtaatcccctaagtatgtgaagctgataggaggcctaacacttacctgttttattgaactgtaggggctataatattggcattcgtctggttgacgagttcctggcaaagtcgaatgtctccagttgtgttgacttcaaagaaacggctgaagttattgcaaaggtaaatcattatctccatgtttaacctaccctgtgatagtaagagttggtttgttcttcttctgcatgtttgtcttctccgtactaatggttcctttgactacaggttggctttaagatgttcttgggagtcactgcatccgtgacgaactgggatgctgatggaacatgctgcagtattgttttggaggataatcctttggtagatttcgttgagcttcctgataattgtcagggtctgtattactgcaacatcttaagtggagtcattagaggagccttagaaatggtgagctcttccatcttcttcatcgattgttcgctcgcatcatgcattattacgtgcttgaatatctgcatgcgtttttaatcgattattttcaggtgtcgatgaagactgaaatcacttgggcgcgggatatgcttcgaggtgatgatgcatttgagttgcaagtaaaactcataaagcaagttccagaagaatacccctacaaagatgatgagtaaaataagtaaattgtatattcattcggtagaaaccaaaagattgaatattttctcttctatttttacgtgtcaacacccttgaattggaagagattattttaaatataagaaatttatgttttgtttaatgatgagttaaataataagagtaaaatgtgatcaattcccaaaagtttcacttggttagaaattaactcttcaatctgtgttatgttagtactttgttatttttatttatttttagctattaagtgtcatttttaattgtcatttttttttctttcttttttaaactgtaatttcctagttgtgtctctcacctcctttttatctctactgcctaacataacaacctctctcataaccattctctcttcttcctggctccggctgctcaaactagcacaatgacagaggtcctttcccctcaccaacaccggagggagaaggcgcatcagaaaggttgacacacaacaaatgggctcccctcaaaccgttgaatcccaaaaaccaactcatcttcctcacaataaaaatattatttataacttacatcgataacacttaaaatttttttaaataatgtgagatttttagtttttatgtatagtttatttttcaattaaaataggaaaaaaagaaaaatgtaagatgctacttaaactcttcttgattgtactgtgattttcttataggtttgatagacaagttctttgcgcaatttctaacatcattttctaaccatcggattaaattgaattaagggttataattaaaatatgtaataagaaatagtaaacatgaaaaaaaaaaattctaccattgtacattcatacatattgggtattcatataaactgcagtctttagttttaaattcaactaatccggactaaatcaaaccaaacgaatctatgtaattattttacatatacataatatataatttttggacgaaatattgatatttgtgaataactttaggtagaatagtagtattgactttatattgttatgataataattgttttattattatttatgtattataaacttattaaaagtaaaaaaaataccaaaacatgaataattattgtaaaaaaaatttgcttcattattattcaaaacccatctattgaatttgtatcattcaccatcgactctgacgtctcctccatctcaaaccatgacagtgatgatggaactactgcttttcttaatttactaattacttttctcttttcatcttctatatatgtagtatatatatgtgtatatcgcagttgtaggagattaagcatctttaaaattggcataaaatgtagaatttctcaaaaaaatttctcaaataccccaagtaaaaaagatcttagtgctacattgattgttcatggaaagctcgtataaagttttaatctcagaagtgtctactgaataaatttttactccaaggaagttagagcatcacacaaggaagttagagcatcacataagcaagtttgtttatgtttatatacaattatacaataatgtgaattctttatagggaaataatccaaagttaatacagtaaaatatgatacattatttgaaagtgatcattaaatatgatgattttataatttggggatcataactgatattaacatttaacaaaaaatagttacacaagttcattttggtattagttcatgtgttcaaaataaaaacccaaatgaaaactaagatacaaacgaataaaaaataaaattaaatgactataaatccta

SEQ ID NO: 301359 - DNA, 3066 bp, Cannabis indica
ttggtattttcttgtactttggcagaggagaactttaatttgttggtgataagacatgtgtagaaaattatagccatgttattgtgtgtatttttttcctcctcaaatattatgaaacagagaatgaaagaataaaaacgagaggctccaccaaaacaaactaaacttatccaagtgcaaaagctaaatgctaagggcacttaaatgtgatattattagtacattttagtaaccgatcttacatattttaaattaataaatattataaaaaattattaattaattaaaaattttatatcggtgtattattactgttcaaagatataattatggataaataattatttggtagtatttgttatatatagaaaaagaaatttactattggtttcaaataataatttttttttttgtattggaatcataccagtttatgcatatgcatatgacaccctatacttgaatctgaccatttgttacactatatttatttacaaatgatgcatatggtacccttttattgggtctgatcgatcaattcatttttttaataagaccagatggacgacatcacacttaattagttaattatagtattcaaaattgaaagttaaattataggtagaacatatgtaattagtataaattattataaataatagtctaattacaagtatccaaagtgtcataaataatctaaaatattacaaaaatccatttttttttttgtttatcatatatgtttatatatacaaatccaaagtataacaaatctaaccttacctaaccatatgcttacctaatattttcctcttaaaatattatattatttcacatggtaggtgaagtggctttaagaaagtcttggtcagcttcaagcttagccatttgatcctctttcaatccaatataggcatctattccatcaccagttctagagtccatcaaagccacaagattattaaaagtcaacgcagctgagctgacccacgacggctttccccaaccaaagtcagaatcataaattggaaacctacacaaactactgaaactaaacgatctcaactctccaccaatcatgtacatttctgatccaaattccataatgaaatccaattgttcttcctctccaccttgaacttttctcaagaaatcattgtccactttcctaatcccttctcttattttcctcacagcctcacaaccgtactcttcgctcgagaatgaactacgtccaatagctgccattggcgacgacatagggaacaatgaaaaaccccatctgtaaaggtttccgaatgagtgttcgggcaatggcggatcaagcttcggacgaagatttaccggatgaaaaactgcgtaaaatttatcggatttgtcggtgttggaattgtttgcagccacaaaacgagtccatataaaagaagataatgcttcaactcgagaaagtcttttctctccttccaaacgacttttctcggcgtattttgacctaatagcttcaattgttttgccatcaaacacaaaccttttagatacgacgttcttattgatacctgagtttggatcatacttgagtattttcacaggaggaaacaactgggccgaaacaaactcgggtcgcgaaactcgatcaccttctccacgagctatggcggcccatgctttgacaaacatgatgcaagataatgcgtcggcgagctggtgagataagcataagcttacagccactccgccgtgttggaagatgttgagttggacgcctaaggtgaattcttgtaatggaaagagttctttaaagggaagaaactcgttgagttcttttgggagtggattgctgttaatggcttctgaaacatgactcggtgacttgactcgggctactgtgtaaggaactccctcgtcgttacaatcgacgaatcggtcattcttgactcgccctgctaaagggtagtaaagggttaagacttgtgataaagatttcttaatcttgttggatatttcttcgatcttgttggactcggcatcattaaactcatagaacaagattagaggattgtatgtttgtggagatatttgatcaaggtaggatagttgataatggcgaagatgagttggggttggtgatgagggcttgattatctcatttgagattacttcaacttcaactttcattattctcagccaaaatatagtttaaaataaagaaaaacaaacttaaatttataatttggctttggcttttgcctatttatttgcatatgtatggtatttatagagaaaatatataactaataaaaagaataaaatgtactttttttcagctgtgtatgctaaccaaccttttctttctttgcttttatcatttttataatgttaataaaccttttagtccagttttataattcaactttagcttgcgtataccaattgagaacaattatatatatatatatatgataaaggtagtcttactatggtagttggtggtttctccattatttataatatatggtataatgtggtaggtataaatagtcaaggttttgcgaaacaactagttgtttatatatagtaaatgacacaacacatataaagtagacgtttagtggaatcacactactatttttatctttgaacccatgatcttaaatgttgaatattctcaagttagatattttatttaatattaagtaattattaaagtttgttacatcacaaatggatcgagcactatatatatagatagaattatatatagttggaacttggacccaaatatttatatatatttatgactttgttcaatacatgatgaacaagattatttaattagctagctagtcgactggctctcactacaaaattttttacttttagtcacaataaaatttgtgactaaaagtaaaaagttgtgactaattataaattattattcatatgttgtgactaaaaagtctgtggctaaaagtattagtcacaaaaaaattacaatttgttgtgacaaaatatatttttagtcaaaatacttgttctgactaaaattaaattagtgacaatttgtgt

SEQ ID NO: 301360 - DNA, 2390 bp, Cannabis indica
atgggttcctacacgatgaaacgttagaggaacataattgaaaagtttcctagttagagtcttactgagatgttccccatttcattgtttgggtaaaagttctgactacaagttctcgttgtgttcgccaaacttgtattcacgtttactgttatcttgtaacatggtgcggaccttttcagtttggtccgaacctgcttgctgcaagggatttcctgtcaaagaatattctttagggagtaattctcttacaaagactttctttcctcgatcttgttgttgacgggcccggtaactccttgtgcgcagccatgctgttttgagttagcttggtctctttttctttccctttttgtcaagggatcctgcaagcaagatgttgtgtacctcttggtcactatagaccagaactatgatcgcatactactggcagatcaggctggccagggcaacaccatgtagctaaccatattgagggagcattgcttgggcgattagatgaagccataatcagctagcatgtggaggtggtggccagccagaatgtggattctatggccaacaaacttattaaggacatggtcagccaaccttttaaaggctcggttgatgctgttgttttatcccgttagcattcgattggctttgccctcgagtgtaattgacgtatagcctttgtgcacttttatcagtagctatatagcttctttctaggagattctgctttgtggtattgggataccacttctttgtgttatgctttgcaggatttgacaccttgtagccgccctcctagtcccttctctctggtaaggtcgttgtttaaaggtatattgttgtatgtgtatccatgttaattgtctagaatgtctatttcttttgaaatagaaggacctagttctttgaagaactgagcaggtactaggtttgccttggttgccaaggcccagttggctagttgagcgagtgtgtcggctgttatgccgtctttgggttcttcccttgtagtatagcctttaagctatctttacagctctggtaggccatcatcttgttgtatcaagctatatgttcacctaggtcataacctacaactagctgagagtcatggtgtgtgtttaggtggttagcccgtgctttatgtgctcgtctagggccagcattcaaagcttcacgtttagcctcgttatcagaagctttgtaattaaccttatttcctcatgcctcaatttccccccaagtgccttaggggccatgcttgcatcaggcaggtggtcaatgcacctcttggattcttgttctcacttcttctctggctcctatttttctcccaaactcttagcaattttgggagatatgcttctattattagccatgaagttagtgagagcttggcctttggtggacatgcttggttgggagctgcttttatgttggctgagtcttaatggttcacttgagtagttcgcctgatgctacaggtttctgcagaacctactacaactgtcgatcggtgtaaacctttgtggggtgtatctggaagtataaccttagctttctggaagccaagagcaagctgtgggtcatcttctcaatgagtgggaatcgacttctagtattgattagtctcttgcaagtgtagtctatagggtgttgtacaccatcttcttcccctatgagggcaatagtcatagcatgttctgttactgccaggtgcacgcctagctcttcttcagctcctggaatgtagtttcacattctttgtacttccttgattgttgtgggcgacttcatgttcaaaaggggttggatcttatcggggttcgagcttcttcatgatatagctatggaggattttgaaattttttgtctaggtcctccatatgtcccccaaccctttttgacatgacaagtatgtcgtccatgcacacctccatgttacgcccgataggatcattggacattttgttcatgagcttttgatatgttcctgatctatgggtgcattttctatttcttggcttttgacaaggccaagttgtgatgggcaaattgttggtccccttttggcatgtacctcaggccttgttgggagattcaggcaaagacagtagatgggtggtgctgccttcaagttgtatagggctagacagcccatcatcgtattggaagctgagggaacatcaattacgacgaattgtgccatcagagttcaggttgctggatcttctccaacagagagcggtaatctgatatacccaatgagtgtgatgtctttgcgaaagaggtcgtacaaaacatgaatgtagggtgccaagtcagcatgttagtgttagaaatattttaccaggatctagatttactaccaagtatgtttgattaacatccta

SEQ ID NO: 301361 - DNA, 2000 bp, Cannabis indica
aaaatattaataaaaaaaatattaataaattaaacatgtacccgtcggggcggggagtgtcattcccatccccgtcccgtttaacattcggagacaaaatttgatccccgtccccgcctcgttccctatttagacggggaatccccgccctattaggggtgggtccctgtggggccccattcccaatgggaaaatgtgcatccctaatcacaatatacaacaaaattttccttattagagaaagagttagtattgaagtagtgaccaactgctactttaatttttagaaacttttctcacaccgatcagtctaattgaactgcaagtttttccttgtcagttctattaaaggtgtcgcaatctttgagaaaccttcaacaaattgacagtaatagccaactaagcctaaaaagcttctgacctcagtagttgatttatgtcttggccaatcctgaatagaatcaatcttggctagattcaccataattctatctttatccatgatatgaccaagaaaagaaacgtgaggtagtcaatattgacacttcttgaacttggcatacaatttatggtcacgtaacatttataacactaatctaagatgttgttcatgttcttcttctgattccgagtacaccagaatatcatcaatgaaaattatgacatgcttgtccaaaaaatccttgaacacatggttcattaattctacaaaggttgtcgaagcattagtgagtccaaaagatatcattaaaaactcataatgtctatacttggtacggaatgcagtttctagaatatcctattcttagatcctcaactggtgataaccagatcggaggtcaatctttaaaaatactattttacccttagctagtcaaatagatcatcaattctaggcagggtatttattcttaatagtgagcttgttcaatttcgggtaatcaatacacatatggagagatccttccttcttctttacaaacaataccagagcaccccacggtgaaaaactcaatctaatgaatccaatattaagtaactcttgcaattgaatcttgaattctttcaacttcataagagccattcgatatggtgctatagataccagttctgctcccaaaactagttcaataacaaactcattttctctatgacgagataatctaggtaggtcctatagaaacacatatagaaactcgcacacaagccttgtatcttctggtctgattattgtatgtcttccaatattcacaactgtagctaggaatcctattcaaccttcttggattaggtctctagctttcaaagctgaaattttgagtatacgagatccttgtaacatacccacaagcacaattgggtttgcactatcaagttcgaaaactactatttttcgtttagaatcaattgttgctccatactttgaaaaaaaattcattcctaaaattatatcaaagtcactcaattgtaactcaatcaagttagcagttaactcacaaccatcaatccacataggtaatgacttaatctatttattagaaataatcaactctctagatggtaacaaggttctaaaccatgaagcatctacatttaaaggtttatgtaaattttctatcactttacttgatacatatgaatgtgtagctctagaatcaaaaaacatagaatagggaaagtcattaataaattagtgacatgtcacaactaacggacttgcttcaacatcagcctgagttacagtaaacaggcaccctaaattttggttattattcttcttaggttcctccttctttgcttgaggacaatcccttataaagtggcctacaacaccacattggaaacatggcttagcccgacattcaccatgttgatgcttcttacacttagggcactcagggtataatctgagcatatcaccatgaccttgacagctgcctctatttccacaaattatcttgttcattcattgtaacaccctaactagcctaggcctgtta

SEQ ID NO: 301362 - DNA, 2666 bp, Cannabis indica
acaatttatatttatatatgactgatatgtttcctatgatcaaaagtagaaggaatagtcttggaaggggtttttcaaaagtagaaggaatagagagaaggggatggggtttgagagcaagatttaattatcatataatagggaattatctggttaccttgctttggtatagtggcctctttgagcaataacaggtttcaaaatgcatcattatttaaagtaggccctttttagtaattagtattttgtaaggattaatgataaaatatttgttgccgccttagactcttttacccaactcagtgagcctagagcctataacttgagcttttcttctccacatttgatcattgtattcctaatctccataatattgtaatgattggaatctcttttggttcgttctaatagtcttgtaatttttattttgttttagaaattttatgaatagtcttatatttacatgtagattaaataaatagtaagaatagatagtgaagtgtttattatgacaatgacgaagcttttatttagactcaaaaacattaagaaaaagacatatttcaatggagatgaagagattctcgaagtaaaaatactattatacaaagcactattgtacaaaattgacgattgctaggacttttttaatattttattcaagattggaaatagttcatatgtttattttattttatgatgtatggtcttgtcggttttgtgttatctcatagataatttatgatttctgagatttcaaattactttattattgtaagatgttaatgtgtattttttatttagaaaaaaaaaatcaaaattcatattttttgtttttaaaattgaaaaacaaaaatgattacaaaataaatttatatttttgtttttaaaattagaaaacaaaagtagttataaaacacacttttattttttgtttttaaaattaaaaaacaaaaggatttatagaacacatttttgtttttcaaaatcaaaatatttaaaacaaaattctacttttaattttgtgattaaaaaattaaaaaataagtgttatcaaattctacgttagtgtgttattttctttagttaattttgattagattattgattcctcatttacctattcgaaagttccctcccttcagagtaaacatggaaactgaatccgagaagatgagatcagaaacggagaaacaatggagccgatattcaaaacgaaattggtcattgcaagactttgagatcggaaaaccacttggcaagggaaagttcggccgagtctatctcgcccgagaaattaaggtgctcaaatataatcccccaattttcaaaactcatgtatgtatattttttaatattataaattattttgaaaaatggtggagcagagcaaatacatagtagcattgaagattatattcaaggagcaaatggagaagcattcgatgcacaatcaactcaagcgtgaaatggaaattcagaccagtcttaggcatcccaacgttcttcgactctatggctggtttcacgattctcaacgcatcttcttaattctcgagtatgctcatcggggcgagctctatggggagcttagaaaaaatggccatttctctgaaaaccaagccgctacggtactaaatcatgtcatgttatttttatgttttatgcttctttttcaagcttaatattcttatttttttgacattatttatttattgtttgtagtatattttaagccttacacaagcactggcgtattgtcaccagaagcatgtaattcatagagatataaagccagagaatttgttgcttgaccatcaggtactgcctactcacagtttctgtcatttggatttataatttggtagtgtgcttttacctaattacttcaatttaatgatcacataatctaactttgcagggtcggttgaaaatcgcagacttcggatggtctgttcagtcaagtagcaagaggcataccatgtgtggaacgttggattacttagcaccagaaatggttgagaataaagctcatgattacgctgttgataactggactttgggtattctttgttacgagtttctatatggggcacctccatttgaggctgcaactcaaagagatacattcagaaggtaacacaaataacttgtttacttgtaagttcattacctggatagttagtaaatagtcataatctagtctagtgtggattaatataaagttgggtaattgatgtttttttttatgctttatgaaactacagaatagtgcaagttgatttgtgcttccctcctacacctaatgtttctcaagaagccaaaaatctcattagcagggtgagcttgcggacctgactatgttttttgatggtgtctgccttttgaaatagaatatatcatcaataaaacgatttgaggtgtaattttatgtgtgatttttttgttgcagcttctagtaagagaatcctcaaagagactctctctgcggaacattatggagcacccttggattatcaggtttgcaaattccagtggtatttgcaataactagcatttccgttcttgatggatgttccaaaagtgggttaatgtttatgtagtattttagtcagaaggtaatggaacttcttaattacaatccttttagactgaataagtacctt

SEQ ID NO: 301363 - DNA, 1283 bp, Cannabis indica
tttttttttttttttgaagtcataacctgaaaaaaaatatcataaaagcaaataatgacccttgtattatacaaacgttattaactaaagagatgaaggcatataggattagattttaatcttaaaaacaaaattttgcaaatgaatcaacaaaccgaattatgggtactaaacaaaggaataacaagattacaaagaagtgaatatataaatataacatatattccaagttccaaccttgtgaatgaaagagaggaattgctaaagcttatgatgagttatgtccactctccctaactcattttagaaaaagtcgaaacaattttccagagccatatagttgagatttgataagaaaaagttgggaaaggtgatcaagagtgaagagatctatacagagaaagcatatttaataggactcttaaatgaaaacacaacatatacatatataattaaataaatacatagagataagttcgaattgaataaatcaaaatgaaaaaataaaagttatagtgacgtagaggaccaagtagaagatggagaaaggtagttagtcttccttctacataggacccgggaaagtaatgtacaggcgccaaaaactctaagctgactgatgatgatgaattaactgccaatttataaatatatataattatacatatggtgcatgtggtccaattttttctctgactaagccgttggtccaaactccagccatagacatcaagtctttaaaactaaagggaccacgcttttgagatttagaattagataaccagccacaataaacaaacaagacttggaaagcttttcattaattaatctaattaattctaatattttagtttagtttcaaactttaattcatgattttatttgtatataataaatattcgtccttggtttgtttttataaaaattacaaatatgctaagtatgttatttctaatataagttgcatagtttggggctaagttattgatgaagtatcttgctatttaagtggttggtattctgtttggcttttcccttgaaaaaactaatttgaaatattttatcttattgtgtttggcagtttaaaacaacgtataaagcttttctttctttgaataatttgtaatggaactaaagataaattgaaaatagtgaaaagtaggagactgtcaaacatgatttttctttacacttcgttgagactagactatccaatatagtattctaattaaaattttcatatataagtaagacaactttcaaattatacaaatcaaacattt

SEQ ID NO: 301364 - DNA, 1831 bp, Cannabis indica
ttatatgtatgtatataaattattacgtaccaattagggtatgaatctggttgagagtacccgcatgaacaattgaatggaaccaattaggcatcccctgaaacacaagatccttatgctttccagtttgtggattataaagagttaaagctctgcttttatactccaacaaaatctcaccactcttcaaaacacaaacaacccgaacaggtcttcctttcacagaaaatttggacacactaccacaagcaatggaggaacactgattcacttctttaatggccttggaaatattacttctaataacaaactccttagtccaagattctttaacaccatactctttcataacccaaatctccattttcccgtaattcaaatagaaggctgcagcaaggcaacctctcacagccaccagatggtagtcacacctcctcatgcccataacatctggtttcgcaacctcacaaaatttctcttccccaaggtcgaacgagaccaggtttcgaccggtccggtaccttggacgacaagtcatccaatgaagtcttccttggactaagacagctgggcaatgatgaaggtagtgagacactttgcctaagctcctccacctgcttgaactacttcccaaagttagtacttggacctctgattgtgttggtactctgaaacgatggctcacatggtggtgacctttattaccatccttgtaatagtagataattttgattaccttatactccttggtgataggatgaaatccgaagccaaacacaacctcttggtccggataacgattagtcttgggaagttctctgtaatctcttgtgaaagggttgtatatatagatagcatcattgtacaaggagtcagacaaacataacaaaccgttgcacgatccaacgacgtcgtattcgggcatggatgagctaaacggtgttctgatctttctgacggggtggctctggttttggtctctgtaagaatcgccgtggaggtccacgaagaagagctcgtttcggattggggaatcgtagtggaagatgatacatgggttttcgtctgaggttcgtgaactgtactcttcgaggagattcgggtcttggccaatcagacgccatgatcggcagacgtacttgaactggaccagagatgttattgggagctgtgaaagtatgtcgaaggtgatctccggcggcagattttcgaacccatttgagggttgacaatcctcttgatgggttttggttcttttcatctttgttaaagaatctgactccatatccatggccgatgatgatgaggaccttcaaagtagttaagaccagaaatgaacaacaacaatggaaaaggtaaaggttaaatcggaataccaaagcttaaaagattgaacaaaataaataaataaataaataataaacactagctctttgctgcccaaaaaattcaaatgagatattaaaaaaaaataaaaagaaaactgttacgcattaaacaaaaataaaacttgtagtaattttcattgtagacggaaactgcaaggaaaatattgttaggtgggatccacgtttgaacaagtctccatagaaaaagaaaaggagaaataagagatagtgctggccatttttttttggatggttcttgcaaaatagtagtggctagtgtgaacccaaatttcccagcaagagttattaaacctaaatgatggtgacttaaataaagaagtttgaataagaacaaaacacaccttcttttgctatttgcttttgcagtacatgaacttttctacttttctacttttttttttcattttttttcttttcttttt

SEQ ID NO: 301365 - DNA, 3430 bp, Cannabis indica
tttttttttcattttgtacattattcatcattattgttattcatcagtccacctccaaaaggtgttatagatcaaactagaggactcctcaattacgtggagcaacattgctcaaaagctgtttacactccacaattgaaatacgtatgtattgctggcaggtaagaacataatcaaattacaaacaatacatacatatactttagtatttattaatctctcttaatgaaaccttagtaagtaagcatactgtatatatttttattattaggtatattgaaggtgctcctttctttggcaactccatgaatggtggaaaggttagcttcaggtctcggttggttggacaggggtacaagcaggtaattaatatagagcagcctttttttttggtgggttcaaccaatattttataagaacatgaatgtgtgtattctatattctactttctcaaacacattatagtatcctatggctatggacgagtctttacttatcactatggctatgtgctgtgttgaatcttattttgactagtggttgttgtggttgtgtaagtaaggtttgtggaaaggcagatgtgtggggagatggagtggtaccagaagaatcagcacatttagaaggagctcttaatgtgagtttggaaggggtttaccactctcctgtgggttcagataatgattccagaccttggtatggttctccttcagtcttacaccaatggatccatcaccttcttgatcttcaacaaccttcatcttgatttttcatctattttacacaaatagcaatattactaaatactattgtattattaccattaatgctttcttcttttttatcaatgatctcaaattttgtataatgatatcttagttagttgcttaaaacaaaatggatataaatgattacaaattggtaggaattttggaactaagctatatattagtcccaatgacaacatctgtttttgtttatttttccatcatagatttatattggggtaaaatgattagactgtgtatcttaaatattttatttccatttagtaatccaaattctatgacacttaaaaaacttcaaatatgtgtcaattttttccactttttttttaaaaaattaaaagtcgtattatatatccaatgaaagtgaaaaccacaatgataaaacttttagatttagatgaattatttaatataaaagtttatatattggtagcctgaatatttattattattattatttttttaagtaaatggacaacaattcagttctacaggctggcaatcttaaaaaaataataaaaaacaaagctgctcaaatcttaaagtaaaaaattagaaatgaccacaaaagggcaactaagcggaataaaataaaataaccatagagttaagacaataatgggtaacgactcaaaaaatgatacgaaataaacaagttttgatgacatgtttaataatcgtgttttgttcgtatttgagtttgagttttttacacattttataattgtgtcgtgtcataatcgtgtcaacacaataatacgaattaattgctataggtttcatattattttttttttttttacatttcgtctttgtcttcataattataattgtaccgcgttcgtgtttgaatttttaacatgcttaataatcatgttgtgttcgtgtttattttaatcatatcgtgttataatctgctgacacaaatacgacacgataacacaaattttcaaccctatcaatacgacaataagtaagaattggtcacgacccatatatggatttacaaaaagtgtttttccattaaaatatgttgcccctactagaaaaaatagattatgcaacagtttatagctgaagctattgaaattagcttcaatttgtgaactgacgttccttatgtcgatgcaatcaactttatcaccaggggagtaaccaggagtaaaagttaggggctaaattgctaaaatttaaattaaaaatatttcaaaataatttaaattaaaatagagaatgtctcccttacagtgaatctttagtggcctgagaggtgttcaaactaaataaaatggttgatttagaagcattaatacactgaccaaaagcagcctcaaacacttgtaacaaccgaataacattccttgcttcatgttctgtagctttgcaataaatatagctatcatccacaaaaaaacatgtgagaaataacaggagcaccattacacactcgacacccatgaagatcatcctaagattcatatttcttaataagagaggaaagaccttccacacagattagaaataaatagggagagagtgggtcaccttgtctaataccacgaccaggaacaaaaggatccaaatcacgtcccccatgagtgaccataaaactaatcgcgaaaatatagtggaaaatcaaattcactaaacgactatgaaaacttattttaagtaaaatagcctgaagatacttccaatcaactctattataggctttactcatattcagcttcaaagtcatgtaaccttccttaccaacatgcttccttttcaagtagttcataatttcaaaagaaatcatgatattatctaaaatcaaatgatctggaatgaaagcactttgatttttaaaaaagaccaaagagagaacttctttcaaacgattagctaacactttagaacaaactttataaatgacattacaaggagtaataagcctcaaatcgcccatagttatcgggttcttcttttttgaaattaggacaatatgagtattattcaaatcagcaggaagaattctaaaaagaaagaaagacctgacttgcttcaccacatcggcccccacaatatgccaatacttttgataaaatcttgaagtcatcccattaagacacggggacttgtcaggatgcatttaaaacaaaacattttttacctcatcatttgtaacaaagcaaagtttcattttggacttaaaaaatcatatttggaatcccatcaatgacttcagttgcaacacaaatagaggaaacaaatccgataattctcatattcttatcaaaaattcaaatctacaaataagattaagcttagccttctaatttaataaccaagtgcgattaagtatatttctattctaaacaaaaattaacaagaaaattatattgattagatctaatttaaattttcgttttcaagatttccacctaaattattaatttaattttaaaattaattaatctttggaaagtattaagcataaatcaatacaagtaatgagtaaacaattaattcttatctataagcatatacaattccattaaatccctagaaaagtaatttagttcatctcaaggcaaaataccaaacaataaaaataattcatgagttcaaaattcaaatacaaaagaaaatatgacaaa

SEQ ID NO: 301366 - DNA, 3847 bp, Cannabis indica
ttgtaagttttttttttttaaactaaaccgcatttgaagtttttgtaatttcttaaactgtaagcaaaatattaaaactgtaaaaactataccgcgaaaatacagtgtggcacaggcggtttacactattatcattatcaaacaccgtaataaaaattcaaaaattaatctaataaaattttaacactactaaaaaacgttttattaaagttttaacatcataacatgttatatataataattattaagtcaccatatattaaattgtctcttaaaaaatgatgtaatatacacatatattatatatatttgttcttatatgaaaaatataataaaaatcatattataaaaattaataattttttaacatatagtgtggtacagtttgaactgtaattattaaattcaaaatcgtaaattgcaccgcgcggtttgacaaaaatgcaaattccaaccgcactgtaaaggattggcttcaaaccatatcttttatgcagtgtagacggtttaagtaattgagtaatgtgaaagacaaaaatgatgaagtgaagactatttattactacttgagaaagaaaattgaaactttattgcagtaggagaggagaccttccaagcagtcaacaacattttctaagagtttgatatggaaagcactaaacctcaaaaaggttattttgggttctcagtttaataaaaacaaattatatcaggaacaagtacaaaaaaataacaaataagaagacataattagaaaacttgtcaccaaataactacttcaaaggatctttctttagtcatggtatgaacaaatcttccgcgttcaaatactattcggtagcatctaattttaacaattcccgttcggttctccaacaaagctaacctgtatcagaatgtattcacattgcacaggctcgaagtcatctcccgccacaagcaccagacgacatcattcaataactcaccatcgctttattgcatcatcagtagtatcatctcacatctactcgttcttgatctgttaaaaacttagctttgctttgtatccaacaaaaattcagaaccctccacttcttttaacttgcaacctcaatgacctcagcttcggtatcactgtaatctccccaacatttggatggtttttcctcaataactatagtactagtagaatctttcactgtttcgatatgcccagcagcaggaactgtatcggtttgattttcttctgttttggtatcagggtttaagttaactacagattcatcttcttcaggcttttcttcagtttcctgtgattcacatccaccttctattgaggacttttcggcactctcttctgctgtagccgcctcagtagtattgttttctacactagtgtcaacattcaccaaacatggtgattctactggactgactggagatattggaaagccgttctgagttactgcaataccatttagtggtgctggatatccatttggggacacaggataaccatttggggatgttatatagccatttggagataccggatagccattgggagcccaaggttggcctggtacaaactcagctgcatgtgggttcattattctaggaggactgaaatggtttccatcaacaatgtgttgttcaccattatggtaagttgttttgtttcgcgaaacacggtttccagctcggttgaagccaccagacaaccgtggaccatatggaacccttgctgttgctgactggtgaggtgatctcctgacgggattgaccgtcagcataggaggaatgtttacaggagggggcaaaattcctccatgctctttgaatccaggaactgggatagtgccgaagatgggaattgttgttggattgaatggaggtgcagctgcagacagtttctttgttgactccttcccagtttcggtttcatcctgcttttctccttcagttggcaattgattatcaactgtgtcactattgggtgaatcgcaaggtttttcatctgcgtctcctgctttcgcatttgcatcagaggggatctgtttctctatatctttctcctgccctgctgcttcaggctgctcgtttttactggccatagtgtttttagaagcaacggacttttcaactccatgttttcaaatcaatttttttagtttccacttccacatctccaacaatgagagtcttcccaaccttgaaggatacatctacagcagatttttcagccttagcatgttttttttcactgtcaagatttttagttttctcctcagaatccgatgtttgtttcacttctacaggcttctgagctttgtttgcacctgcatcctttacagttgacacttcactaactgaggcatctgttgcagcactctcctggctcacctgagagttattttcgaggggcaggggatctttcggtagttgttctgccacagccttaacaattgtcccaggtggagccaaagcaacttctttgtaggaaaaaagttttccggctgcctgaacacttggactaggagaagccttgggaactgaatctaatgaagctggggtaactggggtaactggggctgattttgggtttgatggtctctctgctccaccattaactggtgtggctgggttagctaacttgggactgaagctcgcacttttactgaactttttggtagggttactggttgaagcattaggctcgtttggggacgtctttgctggtacaaaattattgggttttcctcgatgtctcgtttgggatggattgataaagttagtgtttagttttgcaagacttggcctccttgaaccagaaggcttgcgacctgtaagtgaacgacctttgggaacagcttcttgccatccttcatctgagatgtcatcctctgctaaatcaacatttgtactcagcacaactgattgatcaggttggcttgaatcaggtttctcattactaggctctgcaatctgaacttctgattcagatttgttttctttatcacttgagtgttcggcagatggaaaactaggcaacacaagttcatcctttggatactcatctgagactgcttcctcattttgccccaattttcctttgacctgggtggtgaagagaaattgcttcctttttagattgtttcaacaaaaaacaagtaaaatataagatattaaaactagggattgctttcttaccttagaacgagctcttttttgggcttctcttgctttcatatcagcatctggggtgatataatccagaaggtccgacacactgattagattcagaaaaagagtgagtgaaccaattgttagagtctagaaccatgaaattatgtaactgaaaaagaaactatgagcaaagcatgaggtacatacatacatatatccaatttattaacaagagcaaacattacctagtcaactaaacaatcatgtccataaacaaagatgttaataaagttacaaccattaccttaaatgacctttgctagagatggaagcatctggctttggagtaccgttacgtgcagcttcttgttgctccagggccttagattcaaaatactcaagccatgcagccgcatcctgaaaatttttggaaagcatatcaattggagaactaaatcacacaatatgacaggatttgaccatcaaacactatgagcaacgatagtctacctgagtacgtaaatcctcagacccaagctttgcctgcaaaatttgtagggtggtctgttcatgctgtacactcaaggagtatgcttccatcaaagagagcgcaatggctatggcatgatagctggcagcagtctgaaaaaagaagaaaataaataaataagagggagaa

SEQ ID NO: 301367 - DNA, 863 bp, Cannabis indica
tagggcataaaacccaacatggtattcattgtacatggcattgttccaaataagatccttgagagcagaggtaacagttcggggtgtagaagaagctaggaaagcttttggttttctaatacctgatttaagtctagtggtcatgggatgagtggaagtgacttgagtggatgttgtagcacttgggtctgctacattaggtgcagcggatagtgaaggtgggggtaagataggttgattatattgaataggtacattgacaagattttgttcattaatatgaacaggtgaattgttgacaggcacttcagtaggtggtgagggaggtggtgacacgggtatttgaggtggaataggtggtgggatttggggattgttaacatgtagaagtgaagaaagagggggaatacctgatgtatgatgtgtgaactgacattgagtggtggtagaggctgtgttggatgcagcatatgggaaatgttgttcatcaaagataacatctctggatatgtaaattcttttatcctttgacatgcacttataccctttatgagacatgctatagcctaggaaaacacaaggggttgacatgtattgtagtctgttcttgttacatggtctaagattcgggtaacacaaacaaccgaatactctaagcatggagtaattaggacttgtgtgaaacaagaactctagaggattagcattctttatggtgagggtaggcattctgttaatcaagtacacagcagttctaaaagattcatcccaaaaggagagaggtaaagaggccttagcaaggagtgttaaacctgtctccattatatgtctatgttttctttcaactaccccattttgttcat

SEQ ID NO: 301368 - DNA, 1835 bp, Cannabis indica
atgcacctgttgacataggtagtaccaatcaatccatttaagctctcttcaactgtgtagtcccatacctacacagtctcagaatcatctcgcttgaccttccctaggcggtgtgggattgtacagcttacccggtgttttccttacggatcacggtcacagattgcactcaagtaattttcatcttaaaaaatattaaattataaaacttttatgtatgtccaaataaatagggatctatccaaatacttttttagagtttgcactgtaccatataatactatatatttatatcaataattgagtatgacaacactataaattagtggaaaggtgttactaatgtttggctcacttctcattaatactactaacattttacatgtatatgtatatataattaatatctatgatttctccataaagaaaattttaatattttataggagaaaataaaatacataaaaaatttcaaacaagggagtcaatgtttgggtcaactacaacgtgttggtggttattcatcttggttgggagtttgaatgaataggaaggagagattgcatggacagccttgtcatccactctaattaatctgtaggcccatgagcccatcattgttccaattactgggccaaccatatatacccaaagccctttgtactgcccactcgcaattgctgggcctagtgttcttgctgggttcattgatccacctgatattggtctgtatattcacaaataccacttattttttgtaattaattaatcctttttaggactcatcaatctaatgttaattaattccccttaccaaaatatcacataaagtaaaaattgataaatattagggaaatttacatttattttacaaggttttcacttatttttttcagaaaaaaaaatattattttcaaaacaatgaaaaaacaacactacatatttttatgtatatataaaaaacaatgttaaaaccttaaaaaatgtaaatctatgaaaatatgaattttttttcacttttaagtatttacgaaataatccctaaatattgattaatttcccttatgtgtgggattaattagatttgagaaattatattatggactgagtcactctttttgggccgggatatgggcctataatctgaacccatataattgcttacccagcaaagattgatgttatacacacagctgaacccactgcaataccagccagttctccaacctgaaagcaaagcaatgaaattggaagattaattaaattattattattaaaataaaaaatataagattatatattaatgatggtattttgtaattaatgaacatacagctttagtatcagttgcgacagcagaagtgacaaacatcataataaaagtaacaactatttcgatgatcaaagcttggacatgtgtcccatgtggtgttgtggttccaatatcttgaattgggtctagcacttcacgtagtgtaaatgctcctaaaattgcacctataacttgacctgctgcatacaatggaacctgcaaaaatatactaattaacttaattaattccaataattgatgtttggtaactattttggaaaatgattggatcgatccttgtgaccaaattcttcaattatctatggcattcaaacacgtgtgtgtctacgcatacaaaatgttttttgtagtttaattaattaactaattaacaaattaactaagaagagtcatcatcgtgatctctttatctaatgaccaattaattaatgaaaagaaagaaacgaactatatatatgatgacaactcgatcgccaacattttttctttcaatttttttttt

SEQ ID NO: 301369 - DNA, 2270 bp, Cannabis indica
aatttaataataatggcttaacatatatatatatatatatataacatatttttttatataaatacaagtgtgaatattatagtagaaacaaattagcgtaatatttgcattaacaagcaaattaaaactagaattatttggcttctagctagaaaactaaaaaaaagaagattttttttattgaattaaaagtaggagtaattaattatagcttatcaaatccattattattgattgatgatgagaactaaagatgtgtgcattttttggtgtatatgtacaacgaatgagagaatataaatataaatataaatatatttatatatatctaataaattgaagaaataaaaaatggccatgagttgttaaagtaatatgcttacaagattttccaatatatatggttgaatttgactctccatgatgatcaataccaagtaattatacaaaatatatttttttatttgaaattatatatacatataaatctatctatatatatataataagatatggtctctcccatttagctgcatctcattttatattatgaaatagctaaaaactctttagatcatcctagagctcatcacttttggtatttttgcctttttctcttctttaatttttttatttgattaaagtctcttttaattttattatatgtgaagatgagtacaagatgtagtactttatcaaaaacaaatgtgttaatgttgttattatgtacctttgtagtgattgtggtgatgagctcattggagtcatattcttattcttctcatcatgatcatatttcttcttcttctttttcttcaactcgaagaattaatcgtaagataggaaccctatatttttccgaattattagggcatgttcatcaatcgaaattcgagttctaccaacgtaaattgatgctcgacgatggtggtgatgcaaaaaatgatagggtttcacctggtggacctgatcctcaacatcattggagaaaaaataattgagatttggaatataaatataattagttgagagttcttaaaatatttgaataaataatagttcattttaatggaggaaagaaaataatttcttcatgagatttttattccaccactagaaatttaagtgtcttttcaccttttcttcgtaattagaaatgagtacaagagactttagctcgatcaagattatactaagaacttctagagaattgttcagaagtcaagtttggaaaagaatatcaaaattagggcttttcacagtcacagttcgaagactagacagaaatgctttattgatgctaggaagaggatcttgcataagaattgaagatctatcattattgtaggtttcattcaagccaatcaaaatattcttttcttgatattcatgagtaacctttataggaccacatagccttacttctattaaaataggttgtaatatgagtggatccttgagtaagaacttgtgtacttcttttagcttcgaaaattcttggaacattcttttgatgaaatcgtccttaaaggttgttccaaatataagatgtatcttccatgtacattacattattatcaatatcacttgttatcatgtgtaaaatctaaaaaattattagactattgcatattgtaatatcctgaatttgtagttttatttcaaattatatatataaaaaaagtttttaaattggaataattagactaaagtgctactttagtgtcaaatggagtgttttagaaacttatagtgattaaaatgaaaatatttgtatgttatggtggcatgcatgaggacaattttagaagtttgtgataaaaggagcattattttcttaatataaacaaataaataagtttgatttttatcatttgaaaaatgtatttagtgttttgctttaggctggacattttgtttttggaatgatctatgtataatttttaagaggtatatttatttttttttattattatttgtttcttaaagaaagcaaagtttcattagagctcaactcaaaatattaaaatactactacaaaagtattataataaaattttctataacattctagtataatgaattactataatacaatttttcttaatgtttcaaaaaagtcttataataattcttttatatacatttttagtatcatattgaaagcttatttcttcttgtagtagtgtgtagtatttttaagatggtaaattattctttattttattttattttaaaaaatacacttagaatgacatatatatatatat

SEQ ID NO: 301370 - DNA, 2915 bp, Cannabis indica
ttctttttttatttttttaatgggtttatgcttctctattttcaaatgggcagaaagagggaagatgttggtgtctttgaacaggcagttgatgtctacactactgagtttgtaaggttcatcacatttattaggtattaattgttctttttttctgtttctattaagtatgttaatttattagtgagttagattcctcataactttgttatgttttaatgtgagtgttagtttagtacttgcatttagcgtaattaccaactattaatctttttcagctttagagccttgcattttacttcctatactggaactgaccttgtttttgagaactaaaaatacattttggttgaggaattcctatggatgtttcttttcctaggtgatgcttccttctcttccatcaccttgtggtttacttcgtgattacctttttctttcaagaacacctggaatggggctggggcttatgcatttcataatatttctctctttctctctctttctttatatatatatacatacatacatacatacttaggatcctcaaggtaccataccggtattgattatttttaattactacctataggtatctttagtattttgggtatatatccgttacatgtataagttgtaacttcatttgttttacatgtcagtgtgcaatgtacttaggttctggatctctcctaaattttctgaaaaaattggaataatttaaggatgctcaaaacaggattctaaattattaaaaaaaattgaaattttttgggaggttccttgtaagttgtaaccacattatgcaccattaagttaaaaaaaatgaagttgcaacttatccatgtaccaaaaatactaaaagtacatggtagtgattaaaaacaatcactacccaataattgttcaatatatatcctaattttacaattcgtctttttattatataacgaattgttcaataattgtaaaaatacaaacgaattgtttaaatttttaaagaaaaaattgtagatttaaaattcaatagcattatataacttgtgtgtgctcatatcactattatttgaaatttaattttagtaattggatatatagttaatcctatttatttgaaaataatggtatttattattaaaattaagaaaatcaaaaataaaaaaaatagtaggtctaatttatttgttaatggaaaaaatataatcaagtccaattaaccttcttacagtcttctatttgtttgtatttgaggtattgtatttaactttaaccattgcgtagaagaaaaaaatgtttttgtataaattttccattttatataatttaaaatttatggtatgacttgcttgtttaagtatctattatttattttaatatataatatttattattataactgcagctcatgccttgagcctttactactagtatatatatgtatttatatttatataaaatcattttcttattttgattgatgtctttcttcatattagttatgttcattaatataatactctattcctgttgctggtggttagatgttttgctttgtttaatcccaaattgaatgacaatgtgaatcttctactatattaatgagatagaagttctatgatgaagctcttgttacctgtcataaaaaagatagcatttgtacttactgttaggtgtgttgtatcaatttcttattttagttaatgtctattctcacttttcctatagtgaggtgttcgcaaattcacccttctttatctcagcagaggaagctggtgcattggaaggaaggtaaatatagatgttctatgcattatgcatgactgttcaattcattctgcattctcatatcgtctttcttgaacaggaaaaatgatgattacaaagaaataactgttccagctggaaaatgtcacgaggtttgtttttaaaatatattcttaagattttattatcgttagtgatttctttgcattttaagtttatcaaatcagcataatgcttgctcatgcgctgtgagtagtgtaatattaacactgcactcatgatcttaagtcgataccgccatgttttaattactagtgcctggtgttttgcttgttatttttattcctttttttttctacgactttttctctattgattagtaattttatgtttctcaacaaaattattagtttttttttttaacggtaacataatcattgagcgtacaaaataagtaggtaaattttttcctcataatagtatgaagatagagcaagggacacaaaaaatggttacatccttcaattctggagatatagcacacccactcataaacacaacaaaagttatttctatgcattcataagttagtttgagataaattggaatgtgaattgtgaacataagatttttccagatttcgcatgttgatatttccttgtccattgcccacatgccattatttcttccaatagttgttatatactactagtttgttcattcaacaaaatatgactagttccaaatttccaattcagaagcaatatgcttagtaagccgagtaataaggaattctgaaatatttattgggatcttactttactttttttttttctaagaacaaaacaaaatcactgatcttatattatcaatgattgagaaataataaaatagagtgtagagtggaaacactcaaaagaatacaagggaaagataaagtttacataagatactaccattttatgactatattagaaaagaaagcatgtaattagcttatccacgtgtctatgtgcttccaaataggccagcgtaggtaacagtgggaacttctgattgtattttgtggtttccctatataataatttttttttcctggatcaaaagttcgtatacttttttatttgttaacgcttactttttacttacac

SEQ ID NO: 301371 - DNA, 1996 bp, Cannabis indica
ataaaaaaaattaacaagtatacaacataaaaaaaaagaccgtattttttgtaaataaaataaaaaaaatcgtaaaaatatttaaaatttcgtaaaaccgtatttttataatttttttgttgttcgtgtgtatttgtgaaataatcccaaatcttaataattagatttggtttagattgtaatttttcaaaaaaagatttggtttagattgtgggccttataatattgggctcaggcgggccctaataaattatgacaattagtccaataccaaaataaatggtgaaatttggttcagagagaatatttgtatatacatactgaatacatattgtattcaattgagtaatgaattagagtcaaatgcaaagaggatttaatattaaatcattgcttagccaagagaaaaagcatttgcgctaccataattatgatcaaattctgctagacttgattttatattattttgaaccctcgagtttaatttggtgaattattcttgcatttttaaaagttttattttggatgttgtgtttctcaaaagattacaattattactctaaactcaaaatatttttaaatacaccaaaagtgtcgtttattacaagagagttatattattttaaaccctatataattttagtataaggacaatacacatttttaaaaaatttattttggactccattttttcttaaaaaaataaaattaggttttaacgtcacttcttagtcaaaatatttccaaatataattaaactattatatatgaatgaacaaaaactttaatatgagctctggacatatttcttatgcaggtagatgtattttgatagctattcatatttactgggtctagatcattttatctaagaatatacttagaaaaattaatgccatttgtagaaattacttgtggaagggtgagaacgattatggtagttctggcttgttgcttggaataatttgtcaatcgaaagaggatggtggccttgggtttcgaaacattgagcagtggaacattggtgctcttagtaagtatgtgtgcgatgttgccaccaaaaaagacaatgtgtgggttagatgggttcattccatatatattaaagagtaaaattggtggagttatgtggctccacagaatacctcttggtgttagaggaaaatagttatgacaaataacataattagaggttaaatggaggcagtcatcttttccagcatgaagttcaacattgctaccatttttaccttgctctggccgcgaaacaaaggggatagaaaatggttctctattatttggaacaggtaaagctattcaaaacacaagttggcttgcatgttggaatagacttcttaccagagatagactctttagatttgggtatatttctaaggtgatttgcttattttgtaatttagagttggaaatacaaaaataattattttttaattgcagatttagtaagcaaattcagaaggctctttgtatttggtgtggattgaatacccatcagtcagattgaatgaaaaatttgaaatgggtgaaaatttatagaagatctaagtgcagaagagaagtgtatattggtgtagtaaatgcactggtttatagtatttgggaggctagcaatcatgctctttggcatgtctgtgtgtataatgtaaattttcttgtaaataaaattaaaagagagatttgttttaggttttttcattttcaaagggaaaaaacaagtatagatgctgttgattggttatacaacttgggtatatataaactaattgttatatactctaattgtagttgtaaagtgttgattgtttgcaataaaattcttaatattatttactaaaaaaacgtttaacactcaaaattaaaataaaaatatattttttaacattattttttaaaaaatatattttgttacaaaataaaatttctaaatgtttggagtcattatgtaatgaccactttagtaatttggattagtaaa

SEQ ID NO: 301372 - DNA, 4665 bp, Cannabis indica
tctcataaaccaagaattcggttatataaccacactttatatagaataaaataacataaaaactttactcttttttcttgatttgatggattcaatcagatccattacatactagacctaaaaacattaaatgtgtgcaattaacatccttaattttacctagcagttttttctgttcgtaaaaacaatgatttagaataatcaatcaagaatcgtttatagtgttattcaatttgttttgccattgtatatatctctatataagtcaactactcaattgatctaaaaagaacttggtatttattattatttatattatatacgttacaggggtacgtggcgaatattattcaactaggaacagtgttatattagtgaattcaccaacatacttagaccaacacgaatcactagctacaaacttgaaattataagcacgaaaggatttcacaaaactagcaatagaaaaaaggatgctaatttgctatgttctgatgagtcaaacggaaagaaatctaggagactgatagtgcagtccgagtgatacagatagatatggtcccaacatttcccttgcagctaagctatgtaacaagctttgaaaattgccagcaggcttgcagaagttctgcctaatcttattaatcagaatcaaggagtctttgttaagaatgtgtcactttcccataacattctcatcttccaagacctaatcaagaactacaataggaaaaatttctcttcaagatgtgttatgaagatcgatcttagcaaagcatatgatacagtttattggttttctttagaaaggttgttgaactgtcttcgattcccaactcgattcatacagtagattatggtttgtctcaaaggtacttcttatactttgatgcatgatgaatggaagatttcaacaaggcttcaaggtgcaaaagggttaagacaaggtgaccttatatctgtcctttaatttgtcattattatggagtatctcgcccagttgttacaattcagagcaagagacaagaacttcaggtatcatccaatgtgcaagagtttgaaaattattaattttgtgctttgtggatgatttaatcaccttctgtaaagctcaaaagggctcggtgcaatgtatcaaggatatatttgaggattctacatcaacactagcctactggcaaataaaagtaaattccaagtttactttagaggcgtttctcagtgggaaaaacaaagcttactacagattcttcattttgaaaaggggttgtttcctctcaattaccttggggtttctttgagaccaactaagtggaaagcagatgattgttgcatcattctaaaaatagatcaagctaagacttcacacttgggaaagtcttcacctctattatgcaggtaaatctcaacccatcaactcagttttgttaagacttaaaaattattggataagtctatttttgcttcctcaaagtattgtcaaataggtggataaaatttgtgtgtgtttcctttgggaacacaacagcttgaggagtaagttgcaccttactttgtgtgataaagtttgcttacccaaagcttatgggggtttgggctatggtgaatgagcaaaatagaacaaagttataatagccaaatatgtttaggctattagtcaaaaacaagaccctctttggatcaagtggatcaacaatacttatttgaaaagacaagacttctagagttattaagttaaagttgatgcaagttggtattagtgtaagttgtgatgcattagagataccttctctcaataaaatatagaaagtacgagtcatcggggcaaatttagtgtgggtatgttgtatagaagcaagggtggaggtactttaagaggtggtgtggccataccatcaacaatatttatttgaagggacaagacttttagaggtattaagttaaagttgatgctagctggtattggcgtaagttgtaccatattcgagacaccgtctctcaataagatataaaaagtacgagtcatcggggcaaatttagtgttgttatgttgtatagaagtaggggcataggtactttaggatggtggtttggccatgtccccatgaaatgtgtaatatatgtagtgtatgcatctaaaattatacaatttgcatatatatgtagtacgattatatacttatttttcaattgagattatcttttaatgtttgaaaaaacatatattgatgaaaatataatcgtgatggatttagtattttttattgagaaatataatttaatacttattatttattaaattaaaaagtgaccgcttaaataatatatttttagtggaaattataatctttattcttaatttctactataattacaaagattttatttaattcattttgatactagacatgagcttgatgaagattgtacatatccagtcgtttaagcttagagagttacgatctcgggacattgctgacagtattttgattatatcgctagacgatagcttttggttatttgtatctattatgtatgttttataaatagattttgggatcctggattataaatattttgtaagagtattttatgtttattatagttttatttattacaaaagttttgttaacctacatttatgttaaaaccttttaattagcgaaggttggcacaagaaattagttaaacactaacgtgccttagctagtagggcgttacagccttagttcatgagtcactgttattaatctcttgattatagagtttataatgtattttttagtcatgaaccaagagaatcaaaccctttgtattgagcaataatgccatatttatatgcacatattcttgatgggtaagacggattcgggtccattaaagtgatttatgcaacaagatccacttatggggtaaaatacatttatttatttgtataatttgacctattggattgggtaggtgaggcctcagttaaattgagttgccttttgtatacggtcgtactattgacagtgacaggtgaggcgtgatgcgttgttgggagaaaaggatgtcaaaatagtgggtgtccgcccaaaaaggtgatttcctttttgctgtgttactttccaatgtctgataggtgagacaagtcgttaaatttttgtagatcgtgttagaggagtgccatgtaggcaacctccgagacggcaagtggtcccaaacgccctttcatattctattctcggatgacttctgagggtatcctccttaaattcatgttgttatcatattaagtgtaaaatcattatccaagacctcacatccggattcatcactaaggagcaatgcgtggactagactagctgtctgattttgtctgttcttggtagacgggttgggtactttgtccactttggctaggtaatgggcctttgtaagggcccacgcatcatctatccaaaatcacagataacaactattgataaggagaagaagtaattcaatgagttgaggatgttgtttgctgacattatgtaatgaccgcttagtttatttccgagaattagtagataattagggtataattttaaaagtatacttttaattattatgtttataaatatggagatatatttgaattctaggtgtgctatttatatttatatgaattttatatttttcacatttttatgtccggtaatagtgaaacacgacgtatggcatatagagtcactttattatagtttagtatttttagaatagcaggatgagctagatagacgtttagaatgtcaggagtaggcgggattaaagttttggactattttacctgtaagccatttttcctttctaaagttttagtggagacattttggtcattttcatggcatgtatatgtggcttttcctattgttggcagctggccattattttaattagttttagttatttgttgaattatcttagttagtgaaattaaagaaagataaattagaaaaaaaaaatcaagtatactctttctccaagcctctcattcgacctcccttagaaccagcaagaaacctgattcttgtctcttcttttcttggtgatttagcaaggattgtgtaggactcacaagtgttaatcaacgcaagtctttttcctttgttttccttagttaaagtaaggtttcaagcatatatgatttctagggttttctatctgtgcggtacgagtttgttttagagtacttccttttattgatttttgattattcaagttggttcaagctggtttttgtggctatggtagtgtttaagctagtatggagcttttaagctcaaaaatgaccctttaatggtgattttaattttagtagcttgattataaaattttcagttggtatatgtttattgatcctcaattaggtgttctggagcttgtggtatgttttggggtagatttagatcgttttagggtacctatgtttttctgcagtgaaaaacggcaggccatttctgtagaaacagcctaccgtttttactggtgcaagacacagaaaaacggcatgtccttttttaggtagttgttaggttataatgtaacgcccttacttatataaaataagatgccataaataaactggcgttaagatactaatgttgcctttattaaaaaaaaacaattttcaaaacatgg

SEQ ID NO: 301373 - DNA, 1779 bp, Cannabis indica
tgtgttagtcccgagttttactgagatattgcaaggttttgagaatggaaaaagaattgcaggtcgatgtggtggaagagaacatgaacaaagttctatagtgagacagtgaacttgaaatggaaatgttggaattgtttgaagatatcacattggaagacgttgtttcgagtaaggcttgcataggaatggtcattggctgcaaggatatgcctgcctctgtggtgaaaaagattctggctggtgtctggagaagattgggcccttggaggatgaagaagtgtgaagatggaattatggggttcttctttgaagaggaagaagattatgcgtttgtaatggacaaaagaccttggctggttaatggggttctactaaatctcaaaccgaggccggtcgaaggtgaggttcgtgtggcagagtttgaggtggccaggttctgggttcagttccatgggttaccaacaagatttctctagaatgataacatccctatagtggcaaaaaaggttggttccctggctaagtcggatgaaaagagaaaagaagaagttgtaagaagaggttatctaagagcctggatagatgtctagatgacacaccctttgccatcgggcttcttccttaaaacgggaggtgactctgaatcttgggtgcagttcaaatatgagaagttgcctctcatttgcttcatctgcggaagacttgcacactgggaaaagtatgtcatgcccaaatggctatggtatacccgagaaacggtaaagcagtacagatatatggaagctagttaaagagtgatacagggcacagtagctgcttcaactctaatggaagaggagtaacgaggttgattatagaagaaagtatcccgaagtgggatcagcacagaaagggtcggacgggaacttggaagagaagaccggcagtggttaaagcgactgatgagaaagataaggggaaggagacagagccgttttgggggaagccaactggcgatacaccgttacaggaacaggggacaaaggacacattcgagtacgagaatgtcagtaatagtagaagtagtggcaatagtgtagtgactgatgagaatgttggtgtacgacaagaaaatgtggcaaatgaaaatttgaacgtggagaacgagaatatccttcagattcggcctcatttattggagctccctagcccagactttgttaataacggtaacccagatttgattcctgatgtagggccttcagttgcacaaactttggagataccacatgagtgggtgtcgtaggtcccaaactcctcacctattccctgagcccatccctctgagctggcccaatcacgatgtggatgcccaacaaatgttcttaaacctatacaggcctgagttcctaaatctatacaaggcccaacagtccctcatctcaaaccccctgacttatctgctatgatacttcatctcttgggaaagaacaggaaaagaaaggctcacacctggtatcagccatacccgacagttgcaaacttcactcctccggaatactctgagaaaatagacaatcaaggagatacttagaatgatagaaccaacaagttctgtattggtttgggggacaaactcgcgagtgccactactagcagagggcaaccgagaaagaacaaggagaagggcaaagatagcgccaaccgcagatgtaacatccccgcttcaaacctccattgggtcattacacccacgtaatgaatggctcttatacacgagtacgtcactctggctgc

SEQ ID NO: 301374 - DNA, 2188 bp, Cannabis indica
tttttttttaattttcattttcaacaacgttcgacgattcaatttttcccctccttcctttttttttattattatccaaaaattaattaatttaattaatgtaaattctaccttaatacagtacacctctccgcactagattacacataacacgatctctcctcttccttttctctgctataatctcaagttttcctcttcgattgattgattgattgaacagtaaaacgaaggttggattggagctcattcacaaccagttatggtaacccttttcaactctctttttttgtttggttcttcagaaaattaccagtagaatgcgttttaacgaaaccaatgcttttgttttgtttttaatttttaactgaatgatcgcgtttgtgaatttaattgatcctgtttgcaccaatcattgcttgtttggttttgttcttgttaatgttattaatggtaattgaaatttcttagtagttttttagctgtttttggtgatatgctagtagagtttgatgaagatataggaaaccgttggattgattttgtgggggtttgtgtgattattagaatattggaagatttgattatgaaaatagggtattcattggagctttaaagcatacatttttgcaagattatttggttttctaatcattaaatttatccattttgtgattttgaacaagattcttccccctttttgtgataatacattgcaaaatttcttgtataattagttacatatacaatgcatataattcattcagttcctaaacgaccctcaagagatcttaggttgattttcatcttttaatcgaattaagtactcttttggcaatgacatgttattgatttttaccttcatattcatgtatcttttgttcaaacaggttgaaacaagagatagacgtaaagataaagttcttgtcttggtatatcagagtttgggtttggttttcggcgacttgagcatttcgccactttatgtttataaaagtacatttgctggaaagttgcggcactaccaatctgaagatgtagtgtttggtgcattttctatgatattttggactctttctcttctttcattgttcaagtatgttgtttttgtgctgagtgcaaatgataatggtgaaggtaagatttgatactttttggttatgatgctttagaccttttttttttctctctattcttattgatgtattttttttgtgatcaatttgctttgttgcaggagggataatcgcattgtactcacttctttgtaaaaaaaacaaaattctgtttgctacctaatcttcaagcatctgatgaagagctttctaacccgggctgctcaaacagaaatgtcgcctccttcttttttaagaagaattattgaaaagcataaagtagcaaaaaaactgtttacttcttctagtgttgttgggagcttgtatggtgatcagtattggtatctttgcacctgcaatttcaagtaactacactttctttagctctctctctattaattaaaaaataaataaagagattagcattgagtgattttgagcatttgatttgttgcagttctttcctctattgaagggctgaaatttcaaacaaaggatgtacataatagtgagtttcccttcataattgtatctgtatgttaagtttgcgttttcgtcacttcattattggtaatgattaataagaatctattgttggtatatatgtctttcattgttggtactatgagggtatcatctaaatttattgataaacacaatccccgtgtgcttaatttgcgactgtattgcatttcgtgaggttagtactaagactaagtggacaatggccattggccagcagtggcacgggtacatctgagttaagatcaatatagtctttcacagaaccaaggtagaaagtgaaaagatgggtgaaatctgaagaatcgtccatccaccgccgtaattgtacaagcattattctgtttactgaatgatttcaagttactgaatttctcaatattgcagatactgtggtccttattgcctgcgttctgttagtactccttttttcttacaacaccgaggctttcacaaggtggcattcttgtttactcctattataatcctgtggttggtgtccatcactgctgttggaatctacaatatttttagatggaatccaagagtat

SEQ ID NO: 301375 - DNA, 968 bp, Cannabis indica
aatatattaataatgttttgtttgtcactatatttttcagttcctttcaatgaaacttgcttctttaaatcccatgttctatgattttggaatggacctcgaaacatttctggtcagaccagaggtaataataataacaataataataattcttttctattattattattatttttcataatatttgtggtttttaattaaattttggttatatatagggattgaacagcaataataataacaatatgggttcagagattccttctgtgcctccaccaccatgcaaccaatcacaactcacagccttttcattatctgataacatcaccgccacaaccaccaactttcccatcacagccaataataactatcctcttattatggattacaacaaccttcaacaagcccatcacaggcccactaatactttcatcaattctcatgtaagtactcttctactcttccccacattttttttttaattaaatatttttattgtataataatttattttgaataaaaaaataaaaaccccatttttctaaacatgacaaacacatcattttcaggacaatattgggacagtcttgtgggatatggaagatcaaagacaaagctttcttaatccatctgagttcaacaacctgtgttccttcaattaattaattatataattaataataataataatacaagcttaatatatatagtaagctctctctctcaaagccttgtgattattattcactagagtatatactaataatgttacccttttcttttcaggttaattgaaatatatattaataaggtgagagatatatattccatgatgaagggagaggcaatactatatagtggagcatcatgaataaattaaagggcaagatatataatgaatgaagctgagaaaaaaagcatcatgatgaatatggattttatatatatatatatattgtatcgtatgg

SEQ ID NO: 301376 - DNA, 1365 bp, Cannabis indica
tgataaacacatagcactagcagacctcgctctgatatgactgcaaaatgatcgatgatgcatgtggttgttgtaattagcatgggctgctcctaaactttgcatgggctgcatgcagatacactatactttttcttacacgtacaaactataccattacatgggcccaattaatatatctcacatttagtggaccagcctagcttatatattatatatagcttcattaataacagtttctgtctatattatccttaatgtatatacatagtatattatatatatacgcaatgttattgttaaaagaaattctatttttagaattaaattagttatatatttaaaataaattaatttttcaatgaaatatttaaataaaaaaaatttagcaacgaacatatataaatatagtttttatataatataagtttgcatttaattatatattttttttttaaataatgttagtttacattttattagacaataaataaatcgagtaatttattttgtagttagataatatgttttgatatttctctagtcataattcttgagaataatattcttgtcgaattttaagctcttttgtattgagaatgctaagtttaatgagttgatattttatgtaaaataataataataataattatatatatttataaatttttaggagataagttaaggaatacctcttttttgtatccattaactaaaaataccttcaaattatatttcattaaaatatacccacttttgtcagtgggttgcctaatacattcttattctctacttaaatccaacacataatttacattaacctaagggtataatgggtacatcatcaataaaagtgggtatattttaaagaatataaaaataaaagtaaaaattaaaacatataaagtaaaatggtatacaatataattttcccaatttttagatccctactaattaatcactcgcagcaaaatttttgtttttccttaaacttagacttatatccattctcacttttttttttttacatgtttgttaaatttttaattatttttcaaaattacatttaactaatatgatttttgcctcacaatattattatcaatatatgatcgtgccctttaaatttttcgtgttctccccaaactatgtacattactgagttataaatgaatttatgttagttttcatccgaggtgataaaatacttatgtggttatttagatgatgaagaagaaacttaataccttgccacatatattattaagaaaatatattttgtagaaaaaaaaaatggtttatttttaggagaatttgatctaaacatttaaaaaaaaaataaaaagaaagaaacaaaagaagaaa

SEQ ID NO: 301377 - DNA, 1406 bp, Cannabis indica
aaggggtgcattgtagaatcaccctaaagtttttatttactacatatatatatatgattcaactcacttatattattttcttttaattcttattttttacaattttatttcatatacacctacaaatatactgaacatatatacacggccttcagtggctttctgcatggatatgatcgatagtcttgtccaaatcacatcatatacccaatcatccaaaaaaaaaaaacgtaaaaatagagagagatatcaaatgaaaattttcacgctgtgtaattcatacgtactaaatataaatatcaaaaaacaaacattaatcgcgccaattcttttaactaattctactatctatcatcactgatacttaaacattttaaatgaagccatacatatatttatatttataaggtccaccatcaactttattcgaatttcatatttttctaatcacaatttaatcatatattataccgtctttaattttttaagtgcgcaattatgaataaattaattaatcagtctgtgtggacgttgttgcacgtactacacataatgataagcgctagctatatgttacatatatatttatataattatagtatataatatgatcatgataatgtgatcacatatatttcttctcaaaatgggccttggtgcatatatagctagatatatccctcaccacagaattaatattccctatatctggagtacttcctaattgaccaataaacagtagacatctatcacgtttaaaagtctccagtctccacttctacactcttcatttttattttcattttggctggttcctctctatactctatacacagcttgtccccatacagtatacgtgatacacgaattcgattagggcccaataaaaccaacacatacatacgtacgtacgtggagaaataaatattcccagtcttatatatctatttatatatggtaatatatataccacacaacttgtaccatagttaatttatatatatagtcatccctaatgggtcctataatattgtttgtaattaagtttgatgatttatttaattatttggggcagaattatttcttatccaagaattgcagttagttgagttggaacaatatatatataatgtgttttcataaatcaataagtaattaattattaatcatctagagttgactatataatgttcccttatttcctttgccaaaatgattaatatttcgataaccataataataataataataataataataaccgcaccaaataataataataataataataataataataataatatatttaataaatgttttttttatgtatctttatatattaaaagtgtctatttaacgacattttttggtttaacagaatatacttaaaaataaaagaatat

SEQ ID NO: 301378 - DNA, 3056 bp, Cannabis indica
gatgaataaaagagatatttttcgaaaaatcccttaatttttaatacctccataaatgggctttctatttagggtccattttattacttctactctagcccatatcgcttttcacttctcttctatcctttatggattaacagagtaataagaaaatgaaaaaccctaacatcttcgtcaccactccggtgcttctccatcatcatcactactgtcggtgcgttgatctttattgctatcatttctccatcgccatcgccattccgatatcattactttttattttctttttacatcagattttgttgtgactaataatcacacaatagaggatcaagaacataagacatcaaacataaacaacacaacagtagcaagaactaattcgaatttaaaccagaaaaataaaacaagaaaaatagatgaggagagaattgcaaaaataggctcagccttatattccacttctttgattagtagcttgagagctttacaacttagagcaataagaactaaatgtacacgatgagcatagctccttctaatgctaaccactagtctctaaagaaaaattaaaacagaaattgaattgaaagagttagttaatacagttgctagagttggacatttatgtgaaaaccaacataaccaactaaactaatctaactaacaaataaagtgatgccaagtgtacaagactaagtgactagaccataaaattaacaaatccaccttggtatagccactaagacttgaacacttttaaaaaaaagggtgagaggcagagccataagaggacagatgagaaattcatccaatgtcactgatgctcactaggttcaggcagtgactgaattttgcttgagtgacacatttggtaaacatgtcagctaggttgtgatcagtgttcaccttcttaacttgaatctccttcttggtaatgatgtctctaatgaaatgcacctttatgtcaatatgttttgacttttcatggaacaatgggtttttcattgagtgcaaggcactttgattctcacagtgcactgtcatgtcttcagatttgaaccctagttccttggtgagaccctttagccacatagcttcttttattgcttctgtagcagccatatactcagccttagtagaagacagagctaccaccttttggagatttgatttccatcttatgcatccacctagagctgtgaaaacataatctgggagagacctccttgtgttagtactacagccagcatatatagtctgaatccacaaagccttcaacttcacagccttctctcatgcttactttgtagattaaaccagtgcttagggaccctttcacatatctcattacccacttgactgcatcctaatgcttaacttgctgccaggatcagcaataaacctactgattatgctcatggcataggccaaatctagccttgtgcacaccatggcatacatcaggcagccaacacaactagcatatggtatgcaatccatatgcttcctctcagtttcagtctgggtgattgatcttttgagagcctcaagtgttgagccaaaggtgtgaaactggcttggcctcattcatcatgaatttcttcaacgttttctgcaggtatttctcttgtgacagcatgattacaccaggtctctttcttttgatttcaatttccagtatcttctgggcttctcccatatctttcatctcgaattcaccttttaattgttccttcagtttgttgatcttgtgcttgtcctttcctactattagtatgtcatcaacatacaagagtaggtaaaggttgccatccaaatatacataaggatcatagcagctcctggtgaatttgatcctagccatgaattcattaaacctgacattccactgccttggagcttacttcaacccatacactggtttgtgtagcaaacacacctggtttggatccccattgtcaaacccttcaggttgcttcaagtctatcttttcattaaggtttccatagagaaaagcagtttttacatccatttgatctatctctagatcttgatctgcagctttagccataatggctctgatggatgcttgttttaccactggtgcaaatatctcattgaaatccacaccttctttttgagtgtacccctttgccactagcctagctttgtatctcacttcgtcaatacctggtaagccttctttctgtctaaacaaccatttgctgtcaattaatctctgtccctgaggtttagtaacaacaaaccatgttttattctttatgatggatgctttttcttcattaatggctttcagccatttctccttgttgttactttcaatggcttctttatatgaagtggcatatgagttttccaactcatttgcagctacaagagcaaatgtagagtaatctacaacaccatatctggcaaggggtctgatgcttcttctgcttctatctctggccaggagatagtcatcaagctcttctttagcttcatgggtgtcagcattgtaatcttgagctggcatttcatctaggttgttaggtggatccacctcaatgtttagttttggaggagttgttgtctatgttgagtgttgggactggtagaggtttcattgccatttcttcttctctcaataccacatctctgttgatcatgcttcttttgaaacctggtttaaggcaccatagtttgtagcctttgacaccatcagggtacccaaggaacatgcacttcaaggctctaggtttcaatttgtcttcttcacatgtgcataggctgtacacccaaaaacttttaggtgatcatagttctgagccacacatgtccatttttcttgtggtgccaagcaactaattgttgttgatggacatctattaatcaagtagcagactttatgcaaagcttctccccaaaacttcctttataggccagcacctttgagcatacacctgaccctttccaagagggttttgttaactacaagaaaactctttttcaatgactaaatttttagtcattaaaactcattaattagt

SEQ ID NO: 301379 - DNA, 1753 bp, Cannabis indica
atggaacaatctcaactcatatataaaaatgagagattttttataattaaatagaaaaactaaacataaaactcaaattttcagaatactacccattaatgggtaatacccattaaaagtgcaaatttactaataaatacaaaaaattaatgataaagtagtcatttttttttataataattcacgtactttattcaaattaagaaaggaagaactttgttaaataatactttccccaccatttttataaggaatgccatcgagagtattaacttttgggtaaataccattttagactttctgttttgcaaaatgttaccaattgaactctacagatacagaaaatataaccaattttgtcataacatctctagatcagattattattaagttctattttgacataaaattagttcagggtccaatttgtacaattttagaacatacagggtctattttgtcatttaacaaaacagagagtccaattggtaacttttactaaacacagagtctaaaatggttaactttcatttatttttattttattttataatattaaatatgcaatgacaattttgtcctttaaaatatgtcttacaaaataactactatatattatagtttaactataaaggaaatttagtcaatttaggcattctgattatgtttcctaataaagtgaataagataaattattattattctatttttaaacaattttagtaaataacatattataaatattgattctgaattattttttatttattctattacatttcttattattttattccgattaatattgtatagtaaatgggccattagtatttatcagtgtagaatatagatatttatgtttttggtattttataatattataatttaaattttttatttgaccatctacattatacttaaaacttatagtaagtatttcatctatttttaaaaaaatctgaataatttatgctatcaaaaataaagttcaaagattagttacacatgtgctctttctttttgtaaatgtgtaacaaacatgcacatgtttaaattgttacacacttaatcccttaattttattttttttttgccaaaacccccttaagtgtcattttgtttgcaaaggtaaatttcacttttaatgtttaattttacacaaatgaaaaaagacaaactttttggtaccatctcaaatatatgcacccttttgtgtaaacctaaaaatatccttctttaccctaaaacttttacagtcttctcttttctctttctctcttctctacaccaacaaaaaaaaaaaaaatatagtcattacactaatttttggagttattaactctgaaagataaatatatttctatcaaggaagaaccttattacaagaagataggaggagaaggtcaatattttcaagattttaggtagtttttgggtggaaaataaatgagtgtgtaattttatgttagatttattgttaatgttaatttttttcaagtatattgttgttttgtaccttaaatatatatttagtggtgagttttgttaattttttagttagagcatcaaatctgcatttttctcaatttttttcttgcgtaaaattcgatgcttactcgatgattagtattttcaaaagttagagatgatatttcaatcagtgtttgatacctggttgatatagattagttatagtgcctattcgattattacattgtcatgaaaataatgtgtagataccataagttaattt

SEQ ID NO: 301380 - DNA, 2601 bp, Cannabis indica
aactttaaaaaacgaaaaaataaatcctcatatataattgtatatcttacaaatacaagtacaatgagtttttttttatatttgtttgtagatcatgtttgctgcctttattgcttcctaaaaagaaaatcaacacaaattgggattgggttgccattaagttgttgcggttggtggaagagatgagacgagatgagacagtaataatattaatatatgtatggtcagtgaaccactcgtccttatataaataaatgtaaatataacaaagtcatcaattccttctcttcattatcacgacgtgtattattatggtttttttaaattattaatatttaatttgtatacaaacaaaaaaacaaaatagaaacaataaagtattgcttccggtcctgtctaatactttttatatagtgtcttataattaattagtgatattttttaaaaattatttttttaagttatatagtacttgatatttaattacgctctttgaaatcatcatcaataacgtatagtgcctattattatttatatatgagaaatactaaatgacaccactaatgcttaacacaaatttatgtatcaatatcgttatttgtttaactaaatatcgagtctcatctaatttaatgtaataatttttaaaaaatattactagctaattgtaagacaacacgtgcataataataataatgcttttaggtataccaaaattgttaaaagtttgaaaatgtttagtataatatttaatatattggggagagcttattaattttgaaaatgttggattttctttctaaattgtagtttaacagcatataccgaaaaaaaatattagatattagcaatagtctaaacaatataatatataaattatagtgcacctaaatcaacgttacctaaagacacggcaatagataaaaacagataattgagtgacaatgtaatgtagttattatatatataaagagaaattagaaagcatcgaattatatatatataattttttttaaaaagatatttcagcccaattgccaaatacaacaattgtgtaaattacaaaacattagaagaagaaattaaaataagaaagaaaaaaaaattattgacttttctcttgtcaattatcatatgcaagcaacaataataatcaatcaacattggttttttcccctctttcatttgcaatgatgacttaactgatccgacggcagatagtgactccatcaccaactggaagcatacagatctcgatcctagggtcagcagcgagtgctttgttaagctcaataacaaagtctctgtagtacctaacgtactttcttagtggcgcgtctggtggtgcgaccacagaaccgttccagagagtgttgtcgtacccgattacacccccgaccttaactagatcgatcaatctcttgtggtagttcaagtagttgtccttgtcagcgtcaacgaagataaagtcaaaggttccatggtacttaccctgtggttgttaacacacaattaatcaaacaatcaagtgaaaaatggtgaggtgaaagaaaagagggaaagagattttacatcttcaatcatttgatcaagaacagggagagcagggccttctctgaaatcaatcttgtgagcaacgccggctttttcaatactaggaagacccaattcgaaattctctctgttaatatccatagccagaatctgtggtaaagtaattagagaaataaacccaattagaaatttatatctggttcgatgaatcacaatcagggattattatttatcttcatacctttccgtcatctgggatagccagagctgtggcgaggagagagtagccagtgtaaacaccgatctccatagtgttcttggcattgatgagtttgagaagcatgttcaggaactgaccttcatcagctgaagtagtcataatgttcctgttttgatcaaatcaaaaaacaaatcagaaaacaaaacccccaaaaaataatcagagtgaagttaaaccaaacccaccatggatgcttagcagtcacttccctgagctccttcatgcactcaggctctcttgggtaaacactagtttccagaatatactacaaaaacaaaaacccaaatcatgatttttttaataaataagataaatttttttaaggggtttaaatctgaaaatgatctgtatatttacctgatagagagcatcgctttggagaagactcttgtggccgacctcctggtgtctgctgacttgggtttgatctccttctccggtgttggccatttttgtttttgggtattggaatggaatcttcttctttttcttcttgttgttttggttggagtgagaatgaattgagaaaaggtggaagtgataaggggtatttatataaggtgattgtaagtccggggttggtgagctcgtaactttgtatgagccttaatttgcctttaggaacttcaactttaatccaagttagtggtatgggtcccaccaattttgttgttggaaatggagttgttggtcgtggacttcttcttcttcattctatttctatgcctctttattaggggtgttcatccgatccaatccgcactttt

SEQ ID NO: 301381 - DNA, 8841 bp, Cannabis indica
tttgccctttttttacaaaaatactgccaggcggtattttttacttttttactgtattttttaataagtttcatactgcagtatactgtcttaagttttcacttgtgttctactggtgttttactagttttctactgttgttttgagttgttttgctttgtgttttactggtgttttataaaaacacagtatttttgaaaagatttccgtgtgacagtatttttgtaaaaattaacccaaatttcagtatttttataaatttctctatatatatttacaaactaaatattcttatacccaaaaggtgcaaaggaattaataacaaggtaatatatgtatggtaacaacacaacaagttatattttctattaatggacacgtatataaatatagggtctgtaaatatatgctaaaattatatggtgaataaattgtcctattgaatgagacctcaaaagactctctcacttcaagctaataaatctagctaactctcttcactctgatcgtggtccccttattattgtataaatagaacgagagaaaagaaaaacaacatcatgtagctacgatcatcatgacttgtcatataaataccaataaccgcacacttacatgtttacacttcggtaattactaaagtatattattataattatacatatatatgcattatatataagtctatataaaaagtaataaaacttttaaccaaaataattaacattttaccctattaagcaaaaccagccaatacttcaacaccagtcccatagttaccattggtgaaggcctctttaccacaaaatgttgaggatgagtcactattaatattattattattgttgcataatagtgttgctaaaataggcttcaagtcccttggtagcacattaaccctaaggccatacttcatgaataatgtcaatgacatcttttgctccacgcggtggccggtcaccaccacaaggcggtggcgcagaagcactgccgccgctattgacttcatttgcaagtaagctaagtctttgcctaggcaaattctagggccagcattaaatgccacaaatcgataggaatcttgtacctcaaattttgttccatctaatgataaccatctgtctggtttaaattctaagcaatcttcaccccaaatgtacttcattcttccaattgagtagattgagtaggtaaccgatgagcctgccggaacgaaggtgccgttgggcaaaatgtcatcggagatcacgtgcttggaatcttgaggcaccgaaggatatagccttagggtttcggacaaggctgccttaagatatatcaatcggtcaatttcttcaaatcctagtggctcttctacccatttctctacgttgttgccacgtgtatcaagtaagactgtgcaaatttccatgaggattttctcttctatttttgggttttgactgaccaaccagaaaaaccaactcaacgctactgatgacgtgtcacgtccagctaggatgaaattgagtgccacctgttgaaggaactcgtttgagtaagattcctttttcttcatgaacctggagagtagatcatcgtgaggatctttttgttgactcatcaattcaagtttgcgtgtgttgatgatactagataagtactcatccacgtgtctaaggcttcggctcaagtcgacttccattcctaagccgagccatttcttcaacttccatatgatctctggtaaaatgaaccgttgcagtgtggcttcggtggctcggtcgaaagctccggcgaagctgttgtccggcaggtcaggggaaagcgtttgcggatcctttccgaaagccaagccacatatgttatcgaaagtgagccggagcaagaggtcttggagatcaacaggcttcccatgtaactgagccgtttcaagaatggggcaaaacctaagcttaatggctcgactcacccatcgagccatggcttggcgaagagtcctggtggtgaattctagtgcggcggtcttacgctggaaaagccacgtgtcaccatctgagttgaagatcccttggcctaacaaatcatgaaacacggcttgccacgtcggacccttggggtaattatcgaaccggatcttcaaaatgtgctccaggttttttgggtcgcacgtgacagtcacaagtccctgcttttgggccaagaatggaatggcacaaatacaagtctggtacgtgccgccacaagcaccaaggttgtccacaatccagtcgtgcatgcggtgagcgttctgaactaggcccggaagactgcccaataagggccagacacgtggaccgttcattgaccgcgtgatgaatctaaaccatatgaaataagctgctacagcagataagacaatcacagctgttgatgcttccatggcgaacacccgaattagcctggaccagcaatcacctgaaaactattgttgacattaggaagaaaaacaattgactttactgtgacttcaatttaacactccaaaatcattatttctaattctagcacgttaactggcataactatataaaatgtactaaaataacatgctttgttgcgttgtagttatccaaaatattatattatatacgtaccttgaaattaataatatcgatgaagaaattacgaagctcttatatattcccagatcaaataaaacgaaataaagcccagatttctaagatctgatagctttataatttaaagatcaacgcacatcaaatgtcaacattaatgtgatattatattgaacaaggaaatgaatatataatatatattattgtaaagtgaagaagagaaataagtgtattatgtataagaactgaaagtgaagatatatttatattatatatgtattcaataacatatatatatatacacaaatattgtgcatatatatagagagagatcagagggggaagggggggagtggtataaagatgtagggaagggagatggaaagagataaaacaggaaaagtgtgagtgagaggataaaagtgatgaaaggataaagagaactttatttgattgatgatagatacatgtgtatgtatatatttatatatagaatataatagctatacatataagaggtgatgaggaaaagagaggcaaataattgttatatgatgatctgatccagctgctagagttgaaattggtaggtcttgttacttcgccatttttttctcactgtgataagtttatgatagtgatcgatatatatatttaagaatattatttatttataactttataatcaactactatattgctgcttatttataggattaattaatagccactggggtcgttgggggtatatatactaatatatgtacctgtataattataaccatattataaaagtttaacgtatattttatagggtcataataattaatttcaaccttctgtctaaaccatataaagccagccatttattatagccaatcactacccaaaacccacacaaacctaaattacttttcaaaccccctctctctaagtgctttatagattcccacctaatttttcagggaatgcagcccaaccttaaattctacatttattgagtgagtaaagaactttatgagattagttgaggaactatacacactacacactatatacatatatatatatatatatataagaattgctaaatagtatgattgatatttagtactttttttttcctactatcagtatgattatcgaatctctgtaacttaaaaaaatagtttttaaagaatatcgctaatcaattatggaacggaacctattaaaagtgttgggtaccactagtgcccaataacaatactcatatatataggacaattcttttataagacctatattgtttgctaaaattttcggaaacgattaataagaacttaaataattacaatatgttaaataatagacagagaattttttacgtggttcgggcgttaacgatccctagtcgacgagtcagttgtgttataccaaaaaatcggctattaatcagaagttgacatgtgtcctacaaaaggaatatgaatcagctcaaagaatattattaagtttactggttctattatgtatatagtctttagtgtgttttgtatacagtccttagtgtttattggtgtttattataggtctttattcattttatatttattctgtttaatcagttaagttgttgttgcttgtgtcagcataggagtcggtttattctgttaaaatagttgagtcctattttcttgggtctgatatgtactgaggcccaagctataaaaggcttgcctctcccctgttttgtttcaatttgaatttcattctttctgtttcaatattcaattcctctttctcaacatggtatcagagcgggaaagataggctttcccgtccgatccttccagctgctgtgtctcctttcttcagtgttgctgtgtatttctcgatcttcttctccgatcttcattcttttatgtacattgattccgcacaatggcaacagatgaaaatcaaaccagtattccttctgctgttactgatcttgggaatccttccattcaaactaatcaaggtcttcgaattgcttccatcaagaatccattggaggatccagtaagtccattctttctgcaccatggggacaatccagggaatgcgttggtgtctcaaccccttactggacaagacaattgtctcgtggagcagggcgatgcagctcgcaatttcagtcaagaacaacatcagattcctcgacggttcaattcctaaaccttctatttctgaacaaagtctttataatgcttggtatcgtaataataacattgtaatctcttggatcttgaattttgtttctaaagaaatctcatcaagtattttatgatgaatgtgcctcgggtatttagaatgatctaaagactcgttatcatcagaaaaatggtcctcatatatacaatttgaggaaagatctcatgaatcttaaacaagaaaatcagaccataagcatgtactttactagacttaaaactatatgggaagaactaacaaattacaggccttcatgtacttgtaatggttgcacatgtggaggagtcaaaaggcttcaagaccattatcatatggagtacatcatgtcattcttgatgggactctcagattcatactctcaagttagaggtagcattcttgacatggatcctttgcccaaagtgaatcgtgtgtttcatcttgttactcaagaagaacaccaaagaggaactgcttcaaatatcaacaacaataactctgccatggcatttgcgttccaagggaataaaagaggaaatcagaaggatgataatcagtcaggaaaatctaatcctcgtaaaagaaatcgtccctactgtacccactgcaacatccatggtcataccatcgaaaaatgctataaaatccatggatatccctctagttttagtaggcaaaacaaacccaaggatgctgcagaaaaccaggtacaaactggggaagaaaataactctacttcgaatgaaagtcatgctgttctccctcagctttcctcggcccaatatcagcaactgctgaacttactcgcgtctcaaacaaatggtatgaatggtagtgatcctagtacttccataggtaatacatgtatcattctatcacacaattttgtttctcctttgcatgattcctggatagtagacacaggagccactagacacatatgttctaatatcaagatgtttcaatgtatatgtaagataacaccaactaaattaattcttcccaataatgatagtcttattgtaaatcaaagtggaacagtcgttttagggaacaacatttccttgaaaaatgttttatatgccccccttttcaaatacaatataatctcagtaagttaccttactaaaaactctcctgtctcgttttatttcactgctaattgatttacaatgcaggacaatgtcagcaaggggacgattagaagaggtagtactgtcaaagatctttatattcttaatactacaccaaatccaagtcatgtcttctttgtcttggctgagatttggcacttacgtcttggacatttatccaacaaacgtttgaatatacttacagatactttgaattgtaacatttctaatttacacaaaaatgctccttgttatgtttgtccaattgctaaacaaagaaaacttccttttccaaataacaatactgtttctaataaaatctttgatattgttcattgtgatgtttggggaccatatcaagttgtgtcacacacaaaccacagatatttcttgactttagttgatgatttttctaaattcacttggatttttttaatgcagcataaatctgatgttagcttcattatacctcaatttctgacatacattcagactcaattcaagctgatttttaaaatttttcgttcagataatgcaccaaaactggtgtttaaggaactgttttctaaacacggcattttgcatgagttctcttgtgtcgaaacacctgagcaaaatgttgttgctgaaagaaaacatcagcacttgctcaacgtcgcacgatctctttattttcagtcaagagttcccataaaattctggaatgaatgtgtattgacagcaacgtatctaatcaatagaattcctactcctttattgaataacaaaacgccatacggattactgtttgataagttgcctaattaccaacatctttgctcattcggatgtctggtttttgcttcaactttgtcaaaccagagaaataaattctccccaagagcctgaacttgtgttcttatgggataccctgaaagtgtcaaaggttataaactatatgatatcaacaataaacaaatgtttgtatctcgaaatctagtgtttcatgaaaacatttttccatttcagaaacttaataatgaggatgctaacatagatccttttactcatactgtgctccctcattctacaataactaacactcctgtctgtgagtatcctacaggtcctagtaatgcaccaaatcctcctattcaaataaatgagatcagtaccaatttaaatcaaatagaaggagattctgcccctactgttgcaccagaagctccaacacaacaaacaacccaggatcctccaagaagatcgagtagacaatccaaaccaccgagctatctaagggattttgagtgctattcactcatccaggatcattcttccacaccacataatattaataaatttatttcctactctaacttatctgaatctcacaaagctttcattttttgcaatttcttccatcaaagagccaagaacttattttgaagccatacaaaccttagcttggttggaagccatgcaatgcgaattaaaggccctttcagataacaaaacctagtctatcgttcctcttccagccaacaaaagagctataggatgtcgctggatttataaaattaaatacaatagtgatggcagcatagaaagactaaaggctcgtcttgttgcacaaggctacacgcaacaagaagggctagatttctttgatactttttctccagttgcaaagatggttactcttaaattacttcttgctgtatctaccattaagaactggcacattttacaactcgatgtcaataacgcctttcttaatggagatcttaacgaagaagtttacatggcacttccacaagatctcaccctgccttcttctcttaatgtaggaacgaatctcgtgtgcaaattacacaaatccatctacggtctgaaacaatcttccaggcaatggtacaagaaactgtctgatgctcttctccaataaggattcaagcaatctcaagctgattataccttgtttactagaggatccgatgataatttcatagctcttctagtgtacgtagacgatattatcattacaggtcctaatgtatccaatctacaccagctgcagacatctctacatcaaaaattcaaactcaatgctcttgaagacctcaagtattttctcagttttgagattgcccgtgctaaggaaggattatttctatgccaaagaaaatacactctccaattacttgaggattcgggtttcataggaagcaagcccagcaagacacccatggatcctaaacaaaagcttaacaacgaagaaggagagactttagacaacccatctcattatagacaacttgttggaaagcttctctacctcaccttgtctagaccaaatattacatatgtcgtgaatactctcagccaattcatggaaaatcctcgtactactcatcttcaccccgttcatcacctcctcagatacatcaaagggaaccctggacaagggcttctctattccaaaagctcttcagtgcatctccgtggcttctccgactcagactgggcatcttgccccataacgagacgatcaataaccgggttctgcatcttcctcggagatcgcctcatctcttggcgcacaaagaaacagccaacaatcttgaaaagttcagctgaagctgaataccgagcattggctgccaccacaagtgtagtcacttggctgcagtatctcctaaatgacttccacatacctcaaccacatcttgcattcatttactacgacaacaattctgccatacatatagcaaacaatccgaccgtccacgaacgaacgaaacacatagagctagattgccatttcatccgagataagatcaccaactgctccatcagactcatcccaatttccactacactggaactagctgatgttgggaattattttaccaggatct

SEQ ID NO: 301382 - DNA, 2555 bp, Cannabis indica
agcattctccaaaatattaccaagatctcaaattcaaattccagtaaccaaaaacctaaatcaaagccacaagaaacaaaatctcaaataaaacaattatatctgtcaaaaattaagtgaaagagagagagaaagatgagacaatatggagaagcttaccaatcgaaggggcaagaagcgagatcccaaatctcatccaggcgtaaaacaatccattgccggtgttcgtgcaaaacccaaatcctccttgacgaccatttgtgttcaggcgataaaaagagaaggaatgggacaaagagagggtcgtcatctgtcttgctatatgggttctaacatagctcttgttggggggggggggggaggaggaatcaggattagagagagaaggataaaggaatcaagttgggggttggattttggggtcggtctggcctagggtggctggagaaccatcatgaccagtcatgcttgagtgtgatgaatagagggagagagtgctagtgcagctgagtgaagaagaagaaatgggatttctaatttttaagattccccaaattaggggttttctttctaagtttttaatttaattcttttatttattaattgaaattttaactttcaacagatattatatttttctattttaattttctttatttatttatgtgggtcaataaaattgtgtcatgtgtatatttttgtccatgtgtacaatctaacatgacacttaacactcgaaaatagatggaaaaggaaaattgctaacagaatacgagttttggaaatttcgccactaaaatttaagttttgagggttaattgctaacaaagtgaaagtattataagttttaccgcaattaactcaaagtaaaatcgatgtacgtgttgacaaataattttttattttattttattattttgtttagtgaaaaaataactttttataaaaaataaaagaaatgtatgtacttttggtaattgttagagtatctccaataagacactaactatttatagttgttaaaattacacacatcattctaaaatattattattattatttttattttatctttcaaccatataaaatttggcatattttcttacaaaaaatattctaataattgataactctaaaaattatcccatggtctcatattacattaaataaataattttacttaaaacgtaaccatttttgaacaaaaaaaactgttacgtggtcattgtttatatttagcaacactttatataaaattaatctaaaattggaccacatgtcgtatgtgacaagacaactaatttaatgaacaatcctcattgaagatgctcttatacaactaccattggaaatgctgggttgtctaccattggaacaactttttgtaaaaaaatatatgttacccgagttgagagaaatgaaaaaatgatgatgtgtgtattttaacacctattaaatagtacttcccattgaatatgctattagtatttctcttatttcaaagaagcttcgttttggactagctaattaattataaaagtttactgtgtccttatcctatttttctttttccgagttcaaatattcgttttgttgtattttcttattttgaatttttcctagccagttggaattataatggattcgttactgtattaattaatttataatcagaaaaagatgagttgtttctactttctatattgttaagccaacttggcttatgaaggcatataatttttaaatcattgtatcataaattaataaatcccagtagactatataataatataatatatatacttcatcacgtaattttattgtatcttattagatattaaatatcaacttaaaaacatgtgacgatatattatcacgtaattttgttataggtgtattctttgttttagacatacagtttattcaaatttgttagcttaagtgaccgctatcaacagtaggaagatgtatttcaatgagctaagaatattgttagaagatattataactttattgtctaaattttcgggagcagttttatccgatgtggctcgttttgagaatttagcgacccatagtttggcaaaacatgcatgctctgcggttagacgatgagctatcctaatttgagaaagtttcagcaccggttgcgaatgtctgcgtcgtaaattcatgaatgattctaatcacttcgtccaaaaaaaaaaaaatatgccgacacatatttttgaattgatacttaacaatcaaaaaaggtacgactgcaataaaatcttaacataagatacttttgtctccacttttttttattaaggtcatatgtgtaataattacaaatgttaatagaatttcgctgcaaatattccttcttttttaaatatatgtgtattttcttttcatttttaaaaatctacaaatttcttctgttaattttcaaaatattattattattattttaatacatttactatttaatttaggggaattaccccatatactatttttttaactttttttttttcaaatttacggtggtttgggtttttaaagtggtt

SEQ ID NO: 301383 - DNA, 1364 bp, Cannabis indica
tataaccaacttgaaaacaatttctaacatgaacaaatacaaaaatgtaaccagatttgcctaatatctcttgatcggattattattaagttttattttgataaaaaaacagtttaagatcctacttatataattttgaaaaattaacagagtctattttgtcatttaacaaaacagatgatctaattagtagacaggatctaaaaggtatataaaactccatcgtttcgtgcttccccatgctatcatctgtagtgaccattcttttctttttttttttttggttaaagtgtacctccatgaggaggcaaaatcacaaatgaaagatcttagaagctacagtaaaacaaaataaaaggccaaagtcctgggccaacgacaagaagcagaaagaacaccaaaaccagaaggacaaacaatgaaagaacaagaacactaaatcaatggttgacaacaaccattcctgatccctttgaatttgctacgtttcaaaaaaaaaaaaactaatattctatgcacaaaacaacaccacctacaatatacctgaactccaaacctttagatcatggtgatccccacaccaaacttaaatccttactaatggggccatatttaaatccccacactacttattattctatatataatataatgagtattaaattggttacttttacaaataaagattatgaagttttccgtttttcttttaattaatatcgctaatgacattttgtagattgacgttaatttaagctaaacgatatgctcaagatttaccgacaagggtaggttgaacacaataatcatttgagttttgggggacaaataatcttggttaatcaaaatacgtggagatatgctatttacaacagtaacttttttttgttacacagattaaaacatgaataaacgtttgcattttttgaaaaaatgatatttttgaattaacaaggtagtgtgcatgagaatggattagtatgagaatcgcatgggagaagagaggaggggtaagaaacaaaatagaagcttcaataagtagtacctgggattggttaaggatattttttaaaatttattttaaattatatataaaccgatacttaattacctcaatattacaccaaagagattgttaagcacgcataatgctttttagcactcactattttactagagaaaaaaaaactaagcaaacaatagtatgtacttcatggaaaattaggaataccaaatactattttttaacaattttcaaattgtatataccaaaaggaaattgtaataaatggccttaaatctcacactaatgaaagttaatgtccattttttaaaaaaaattaagtaaatggccttttataaat

SEQ ID NO: 301384 - DNA, 899 bp, Cannabis indica
agaaaaaaaaattaaaaaaactaccaaaaacacacataaaattacaactaaaaaagactaaaaccacatacatatattggtaagctagaccgccacactttagcgttatgatagcgttaatttgtgcagagaattttatcgtttaactttaatagttgttgattttaagatgaagttgcttattttacaccgttgagaatatagattatatgttgtataatcttttgagtttttgaaattttgtataaatattactatgagagacatatttctcaactattaaattggaataagtataaaatatcaaattatattaatgaatgattatatgtaattttttgtctctataatttcaaggaaaaaccaattttttaaaaaatgaagaaagaaaaatgcatccttaatgtcatttaatacttaatagttatccaactaaatttaatatatgattaatattagaattcaattttcaaaaagtatatattttaaaataaaatatatcaacaataagagtttaattagtgcataacaccaagtaatatcatcactataaattcaatttgtatgtgcatatgtttagggtatggagtgttttggaaataatattttttgtaaagatagaattattaaaatattatatattgcaaaacaatatttacaaaattattttattaagaacattttttccattattttgtttcaaaattaaaattggctctttctttctttattagtgcgcatagaaggtgcatagcattttcaatatatataaacaatataaatatatatatatatatactaggtgattgttacgtgccaagccacgtagtgttaattttatttaatattttagttttttatttgaattaataattaaaatagtataattatttgaacga

SEQ ID NO: 301385 - DNA, 2858 bp, Cannabis indica
cgttgtatattgtaattataatagacattattttttgtttttgaaattttttgaatactgtcctgaaaagtgaagttcaaaatagtctgttacgcatgtgcaaaataaaattaaaattaatgtttgaatcttattttggtatttacctttaagtacgtaaaagtttagatatattaaccgttaattttccaattaaataagacttaaatgtgttggtacatacgaaataaaaatatatagcttgtggtactttcaatttccctatattttactctcaatttgcctacttaattaagaatatgaatattcatttgctccaagttaaatccatcagttgaattaattatatttccttttttttttttggcattttatttagactcaaatgataatgaaaggaagaaagaattggcactagagatggttgaaaagtgtggtggtttgccattagccatcattgtgcttgctggtgttacatgatgaagactcaaaataccgtagtgtttcgcgggtgttaggtttgagttacgacgagttaccatctcacttaaagccttgttttctgtacttggctcgttaccctgaagatgtcacgatagaagtaaaagatttatgccttgtgctcgtagcagaaggttttatatcaataagaaacaattctaggaacactttggaggaagtggcttatgattggttaagcgagttggtggataggagtatgattcaggtaaaagaaatgagctcgataggaagaataaaatcattttgcattcatgatcttatgcgagacttgtgcttattgcctcgagccaaagatgaaatgtttttacattttattggctcgattgagaatcgaggggaagagccaatagaaacaaatgcaagaagagtttccatcgataatgctgagtgtgttgattatgattttgttcctatggttccaaatataaaggactctcttaggtgccttattgtacaatgtgaattaattgtgtttgataaagcagcattcagacacatatgcaaaagctttttgatgcttagagttttgatcattgataacaaaggagctaaatgttccttaaagttgcctaaagaaattggaaatcttattcatctaaggttatttagtggtcctgatacaattgaaaagattccatcttcttttggcaatttcaaaggcttacaaactttgagagtatacactaagagtgctaaaataccaaattcaatgttcaagttggaacaattgaggcatctatactttttagatgagataaaaattggtaaattcttgagatcaactaagtcgagaaatttacaaacattggtaggtattggtaccaaggatcttgttctgaatgatttactgcaacaactgaagaatctcaagaaattaacaattcgggtggacagcaatttcgccaaattttcacacaatccccaaactctcaaactcattcatcttttgtctttacaagtattggggactgtcttcatgtgcatagatattgttcctttgatattaacttgtcctaacatttataagctcagactgcactcgaatatagtaagattacctcaagccgaccaattctccaaaaatcttatgaagttagagttacaatcactctcacttaacgatgatccaatgccaacattagaaaactaccagaattaagagtccttgttattggtgaaagtagctttatcggggataagatggtgtgctcaagaggaggttttcgtaggctcgaatctcttaagcttagtcgtctatatttcttaaaagagtgggaagtggaggagagtgcattgtccaggcttttccatctgcgtatcgataaatgcatccgattgaggaaagttccaaatggattaagcagcatctctacactgaacgagatggtgatagttcatatgcctaagaaattcaaagaaaggatggaagaaggaggagacgatttctataaagtcaagaacatcacatctcgagtatttatcaaatgcaatagaggtacattttttggaactgcatacctatcttattcacaagttctttttgatatttatagatattttgatttcttatttactcattgcattttctgtcatgaattattattgcagatctaccaacaagtgacaatctttgagctatgcatacaaccaatcaacatttggaggatgcatataactaatgtttggaatgtgtgtgtgtttgatttctacttctttatgttacttggaataattatgttttgtgggggtgtggctttcttgtttctttttctatgtacaattgaataattaatgtttggatattgaagtgtgtatgttcttatggaaaaactaattattgaaaattataatatgtttggtttggattgtgtttttaatcacttgtttgtacaactgaataatgtttggatgtaccaagtatctaaactcctcacaatcacttcttttttcctttgatactaataccaccaagatagatattgttcctttgatactaatctgtcctcaaatttataagtccaattctctccaaatctttgaggaatctcccaacttaaggatgatccaatgccaacattagaagagctaccaaaattagtcattgtcattggtgaatatagctttatgggggatgagatagtgtgatcaagaggaggtttcccttgacttaatctcttaagcttaataaaaatgagaaagggaataataataggaatggaatagaatcaaatttaaaatgcatgaaaataattgataaaaagtttattaatttttttctcatattgcattagaataattttttttttctatttctaaatagaatagtcattccacta

SEQ ID NO: 301386 - DNA, 3052 bp, Cannabis indica
aatgccttcatcttgatcctccataacccaagatcatttgttccattgaacttgtcaatcttaaatcttgcaacatccatcttcttgatgatttttgatgtcttcatatctgaatcttgattgagctaatcccttgctctggtatcacttgttatgattgatcatcacaattgacaatcaaaattggatggtcattgacgagctatacacatgaccaacaacaacaagagatgtagcagaaaaaaaacaagcaagaacaagagattgataaatgttgatttaattgatttatggagataattacattgagagaatgagagaagtaaatctatacaaggctatattgaaatgaattgaactctaagtatttataccattcaaactcaaaacagaaaagtacaacttgtaactaaccaaaatacagttaacaaaaataactatcaactaacttgtatctagctttactttcaaaaaaaaaaaaaacttgtatctagctttgacatgagatggatcaccgtacataaaaaactacaaaaatactataaaaccaataattctatatatagaatagaaatgtatattaatttgataaaactgagaaataaaattcatatttttaagagaaaaaaataaataaatatacttttttaatattatatggattttcccccacatcaaaataagcaaactaagataaagaaccaataattagaaacattatcattacatatattaagtttttttatcacgactataggaaaggaccatatttatttatacataaatatttgtaataactgtagcaataactgtaccaagcctataaaatattcatatatttcctaacactagctagcataacctcacgtctttgtggttatgaaagcaaagtctgcttaatatacttcccattttataacctggaacgaataaaaaccatcttcttattctcttgaagatcatatgctttcatgtcttcctctggttttttcttggaagattctaattcctcaacgggttttgttgataccttgtcttgttgctttaagtcgttcacgcctccttgaatcttctccatctttgctagcatgttttcataacttgatttcttcaaagcttctgattccctcacattgtttgcagctgatatattatgttgtttctctatattgttcatgtcatcttgcctttttttctccatcattaacttgaaatctcgtgccttgttcttttcactaaaaggaagcaacggaaatggatcttcctttaactcttcttgctcaaccttattgatatgctttatacctgcaacgatcatcaaatggtgagaaacttagttaattagatgcgttcttattcagtatagacattttctttacaattgaaatcatttccaacaacaaccattaaaatctcaacgaggtaagttttttattgttatgagaggtattatcatttacgcaaagagaacttaggagtagtgatacaagccacatatgcagtcaataagatgggcagagagccaagaaaatcattagaatcattgaagaaacggttcccagtaatttacagatgcaaaatcctaaaaactcattaattgtaatagaaacaaacaactttggtttagggctaaaatttgtgattcaaagagataaaccgtagtaaattaaattaagagacaaagtcaatcggattcctaagtaatcgaacaccaggaaaatctaattgatatgagtgatgtttaggatacacacttttgacacacataaaataaaattattattaagaactcattaaaaatcgcatggtctcatacttggcagcaaatctgtttgtctaaaatcacccacatctcatgggaggaaatcattagcctaaactacaactccaactaactctatttggcgtcaaagtaatagaaaaacgataaaataacttaattttttgcgcagcatgacatttatggccgctcaaactatcaacaattgtaacgcgtatataaattcaaaaaattctcaagctgcaatgtgaaagtggttaaaatattcaatctaatcaagcccatcaatccaaattggttaaaacataatttgtttttgcattatgaacaagtgttgaagattccacagcatgccaaccacgaatatgaaattaaattttttgaaatatcgaagtgttgcttttttaattaaagaaatctacaggtattagagaaagagagaacaaaccatttgataatttgggaaaagagtcgaaggtggagtcgaacgcgaatttggcgacgaaattcaggatttcaccgattagccctcgacgttggaccttagatatgggttttttcaagcccgtttcgttggatccctgaatccgaattgcttccgccattttccgttccttgcgtacactagtaatgaatgaaagtatatttactcttcttttgtgctatattttctgccaaaggtgaaatttgccggacttaaaatatttacaaaatagtctcacttaatttattatatgcaatgcaaccataatatatttttttttattgggaaatagggtgtaaaaagaacacccagcaaaaaatatataaaatcagcaaaaccaccagtcacagtacagaacaaacaataaaagcccaagtgaagaaaattaatacaagaaaacatccactaagggctcgtttggtacgtcgtattgtattgtattgtattgtattggattgtgttctattgtacaatgtttgatattgacttgtattaattaattatgcaaagttataatatattttcagtacactctatcccaacaccaactacgggtctgggtccggcttccgagtctgggtctgagtcccaggtctatgtccgagtcccgggttcgggtccaggtctcggtctgggtccgggtcgcgggtctcagttcgggtcgagtccgaatccgggttcaggtcccggtcctgggtccgggtccgggtccgagtttgggtcccggtttgggtccgggtccctgtccgggtccggtcaggtctgggtccgagtccgatcagatctgg

SEQ ID NO: 301387 - DNA, 2131 bp, Cannabis indica
tttccaacaaacttggaactagtcaaaggtcaacttgtttacttgcttggattacaaaaaacctacattttttgtaaagtggtactagcttttaaattggttatgttgaaaaaaagaacgaaaattaagttcattgtattattttttttactattttagatgatacatatatcctttaataataataataaaaatataaaaagaaagtgtactacatcgaaaagaaaagaaagtgtacaatactcgaatacttactattaagtaagtagttttattcaatcacctatcgctaaagaataaaaagaaatatatttatttagtactcggtaatttatgattaaatttaaactaaaatcatcatcattttcaaaatttggtgtaacttaaattaacttcacacgtttattaaattaacttcaaagactaaggttagtttattggtgagggagggatgggaaacaggaagaggtcatgagttcgaacctaagaccttgaagctattaatctattaaatgattgtaaaataccattacactacactcaaaaaaaaaaaaaaattaaatacttacaaataattttttacttttgcttaagaataatataaattcaacaaatctattttatatatattcttctcaaagcttcgaagtatctattcttacattacatacattctcttctatctaaataataataataataagtcaaaatttgtttattttatgttataattgtcggccgcatattctcacttaggaagcccatgtgccacatatacattggtttggtccaatcccaatggccaatgtttgtttggaattttattatcaattagttcatataattatattaataattaaaaagtactactagtacataattacatttattaatgttatattactattagtgtaattaaatattagatcatatataactttaaagaatagcttttataaaatattattaatcaattgtaagatgctacttataaaaaatattgaacattattggtgcccaatagcaatactcttttattataagtatttctattggtactcagtatcttctataggtgacgctccattatgattggttagcgatattctcttaaggttatttgtttaagttatatataataagaattacactaataataatatgacactgaaaaaaatactaaacaccaataatatttttaacaattctcttttattattattttgaaaaatcacacaccataagtgggagacaactttattttcatgagctagtagtgcttattttgtcaaacaagttaaaattttgaagtaacatttggcattttgttgaaattaatgcatgaatattactcatgatgattaggaaatttttttgggaagttttatatataaattagctttttgttggtggacacttattcacactttaaatatgtgagaatatgattaattataaaactagaatattcaaacacaaaaagtttgtaattttgtgtgtttttttgttgacttagttgacttttacttaatggagtgtaactctttcttctaactttggactttgacaaattagtaaaatcaaatcattattcacataaacaaagtgtcaaccaatgcaatggtgttgaatgatatataatttttgtaattaatataagatgcatggttattgaacatagatgaatgataaatggattatgctcttcaaaataaataaatatataaaaattaagaattgggtcttttacttccttttagtttatcccaaaattacaataataataaggaaatataacaacattaatttattatactacaaaaaaaatattcttactttcatttataatcactacaaaaaacagttaagtgacaaatatttaatcacaacataaatttttgtgactgaatgtgacctttagtcacaacaaaaagttacttgtgactaaaacataatatttaaatacaagttgtcaataatttaggtttagtcacaacaaatgttgtgactaaaaacacatttagtcacaataaattgtattttccgtgactaatacttttagtcacagaccttttaatcacaatataggaataatgattaataattaatcacaaaatttattgtgactaaa

SEQ ID NO: 301388 - DNA, 1814 bp, Cannabis indica
taattatactgtaactgtgtaatagaaggcaactgagaggtctcataccacatatgaatgggattacactgctaaaaactatccattttaaatattagctattttctcaaacaagacattagaaattcataagtaattaccaccttactatgttgtataattattaccttaataattacactacctattaactacaaaactatctccaaatgcaaattctacaaatttagaagagcattgctattgggcaccaccaccacccttgtatagatggtgccccacgatcggttagcgatattccttaaaagttattttcaagttatataggacctaatacttaattacaccaataacagtatgacattgaggatggtgttaggtccaatagtttcttttagcaattctcaattcagatttaatagttaattaactatgtaaagaaaagtcagtattgaacactgctgctacacacgataaacaatataatagtaatgagaaaaagaggtccaaagaggcaaaaacttacattgtccgaaggtgagttaaatttccaatgcttggagaaagcgttccagctaaacccatagtcgtcatttcactatcagattcaaatgtttccaaaaccaaaaagatgaataatcccctattacaatttacacatagcctatatagctcttaaagaaataaaacaggaaagcattaattgcattccataattaaaccccataaaattagtatcatgaatcttagaaaatgagactacttacagtgaaataacaaagccctcaacagaacaacccaccatgttccatgtacaagggtcaacagagtttatatcccaaccagccattactttaagctcatccttcatatctttcttcatggacatcaatgcagccactgcatcaagcaaactaaagtcaaacttccataaaaaccaaaaaagaaaatttcttaaaagagacaaaccttcatagttgacacccttgggagagagaagactatcagaggctttaaccaaaaccagagtgtagtggaaagtgtagaaaagccaaaagcaaatctttagtgctttcattatggaaaaggaccagctgagctaagtgaagtgagggaaaacaaatagcccagaaaagaaaagaaaaaaggtaaaaggaaaaagggaaactttttacattagctttagcacttagccatgtgaggatttgattgaagctgaggttatagtctcttgttttttgagagaaaactgagatatcatggttgccctttttctcagtttgtattggaaaaccaaaaacaaaacatgaaaaaaaaaatgaaatagaaaaccagtttaaaagccgtaaaacttaggaaaacatatcgagatttgggaagtgacagagattgtcggcttggagtttagtcactacagatcacatgtggtaaggactagcggctgtcattttcacaaccaatcaacattagaataaagtcctcacactcacagcacaaaaattaaaacaaactcaatagtccaaaatccaaactaatacacatttggagcgtcttcatgctactccctattttcttttttaactaaaatacattaaaatctcaattcaagaatacatttgggactaagagcgtgtttggaaaaccacttaaaaattgaaattggatataattggagataattacacaatttggcatgtttgtctaaccatgtaattacactgtaactgtataattggaagtaattgaggggttccaattacactcccaattctcatggccccccatgagaattgaatgtaattacactgtgtaat

SEQ ID NO: 301389 - DNA, 1765 bp, Cannabis indica
aattgagagagctaagattaggaaaaaagattatatagattgccacatatattccttaatgcgttcctttatatatatattgattgatcagttcaaatattaataggatttgttttattattattttattttattaaataaaaattaaaagtgacgcataaatttctgataaactaagaatttcagttatataggcacactttatatagaataaatattgatattgattatattagcagacgcgaaattaaaatcttacaatattaaaatccttagatcataataaaattagagggtattgggcgaattaatgaaaaatattatgtattcatgcatcatgctttaggaaacgggaaaacttttccattatggcggccactaatttgtgatgaggtggaattgtttgcttgatcaaagaatgttggtttaaagcattgacccatgtcaacaactctgggggagttttctcaggactccaagccactgccactgcctcattaaacgctttataattgcaaaggtttgtgcccgcaatcacttccaaaagtcctaaattctgaccatcaaagggaaatttctcaggaaaatctttcatgattccttctataaacaccctaagcaactcgttcatctcctcaattgctttctctcgttgtttgcctttggacatgatgataggtaagattgccaccatgatctaccaatgaatcatcgaataagcagagttcattgtaatggaattaataattcttatgatttactaacatatatactaacacctatatatacataaatattttttttttgttaaggatatatatacacgtaaacggttattaccttttggtcgtagaagttggcccaaaagcgaagtttggctctcagatagggatcatcagggaagagtttaggagagttgttccagtgctcgtcaatatattcgagaataacaagtgactctgcaatgggtttcccattgtggataaggacaggtactttcttatggatagaattatggtgaaggagtaattcactcttgtttgatagatcttcctctacatacttgtagggtatgcccttaagtttaagagctagctcaattctttggcaataggaactccgccatatcccaataagtataacctcactttgcttgtcttccatttctttgatttacattcactctgaaaaactttgaatcaacttgggctgattttgttggatgaatcaaattagtttacaatgccaatatttatagaattttcaattatgggaaaggaatttttttttgaattttattaaagttagtccaatattgtttttgtgaaaataaaatatcatatatcaaatgaaacctcatgcaccttagcaactttcattctaaattctacatatagaatcaaattttaataaaaaaatcgctatctctcttttaactaaggcactctcatttcaaatcaaacacatttaaaaaagaattaactaattgtcaatttaatttaaataattaataagtattcttggtcaatacgtctctcttataaaaatgaaaaacgatggaattatgagtttataacaattggtcaggtatgaaaaatgttgttaaatatgtcaaaatcgagtgcatgccatttctaattcaatgaagataaaaacatataataaatatgtccacgatatgatgtgtggattatgagaagctcttttgacaaaaaaatatacatatattattatactaggtgattgttacgtgccaagccacgta

SEQ ID NO: 301390 - DNA, 1204 bp, Cannabis indica
actctgcatacacacacatataataaatatacatataagcatgaagcatgtcatttattgggcttttagcataaataccttatggagcgtttggtatggggttagacttggtgggaacgagaataccaaactcaacccatattttttaaaattttaatgaccaaggagtttatgtttccaatggtcccactttgtgagtttaatcgatgataatattaaacgtccttccaacacttgagtttcatatttccttaattttaaaaaggagcaattaagtccttttagttaaccttttcacaactttttcagttttttaatgaatgtttttatattattcaatgcaatatgatgtgtaagtagttgaagatgtatagcatctaaacattttctaaattatctatcaaaaaaagttttcataaattttgttaaaagttaactaaaaagacttaattgctattatttttaaaactcaagtacttggttgcttaaagaaattcaactgaatttccaaacagagaatatctcaggaacatttatgctagaaatccttggacaattaaaagtttaatcaagcagattaagagatggtgaattgaaggtcccacttacttgggtccatgggtcaaaatggcaagatccttggtcattttccctgcttccacagtgtcaatgcaggaagcctccaacttgtgagcaaaatccagcaatctgtcattgttatctaatttggccctgaaatcagtccaaatttttagatgtgtcaggttctcgattgtgctgacatgttttactaaggcaacaaagagtacctatgctgtagtcctcgtgtccaggcaaatattgaagcaatactatttgtactggtttcttgtcccttctgatgtagccggaaatgccgagtgacagtcccatgagctgcctcagcttctaatgtcttaccgtcagaggataactgcacaactacttgttatgactttgtgtgatataaagaaaagtaagatatcaagggtgacacaatagtggatatagtacaaaccagtacagaagtcatgaggcccagagagccaaaatcctgcaaattatacaaaaaaaacaagacttttagacatggggaccacaacctaatatttgatctgttggaaatatgtgaatattttaacaaaatataataagtagtcttagtgtgtgtgagttggaaagagtc

SEQ ID NO: 301391 - DNA, 3993 bp, Cannabis indica
aatttaatattaaaaagtaactaatctaaaataaccgatccaattcgcacttttgcagattggatttgagctactgtgcgaattggattggatccaaaatataaaatttacacttagtgtggatcagatgcactataaacaaaatagtgcggattggattagataaacacccatatctaatatcaatggtcttagtatatttttaatagagaaagggctaatgaaaaggcttgttttatctcgcttatatgtatttaaaacaaatgtgcatttataggaagttgtaccatatgattttgagttctgatttttgtgggatatgtgattttataatctgcttttttgtttgtttgatttgtataatgcttatgtaatttgtgactgttgtggtattgtaattttggtatgcaaattgtgcaagaaagtatattataaacatatacataatatatacattatatatagtttatgtaaatgtcgcccaaattagattttacagtagtaacataattaatctaagtactaatttgactgacttctgcaaaatattatttggtgattatatatattgtttgaacaaatttactaatttactttccttattttgattgttagtctaggagatgactaaaataatcttgagcataaaaaaataattttgaaagattaaaatgaaaaaaaaaataaattaataatgtgatatggcagaacacaaagagaaacacaccattcattaaaaaaaaagtagagtaggaagcttacagaggaaagagcagagatctgaacgaaagagatgagtagcagagcttcgtaaagaagttaattaatgcttaaggagctctaaaagcaagaaaaggagcatgttgagcagcatatgagaattagcacacatggacaaatcagaattagtggaatgaaggtagttaacattcctttgcaccctcattaaaaaaatacatggattcttgatcaagcgaaactagcagaaactctatcaaaatacaccctcaaaattacacttgatctcgggagacaaatgacccagaccgaattgagaggaaaattgtgtaaacagattgagaaagtaattcgactagattgaactcgctgtaaacaattcaaagtcttaatgataattttttgttgagccaattttcaggatcaacagctagtgtatccacgaacacctcttgaacgaaaagcttaaaaccatggatacgaactaagatgggatcagaaaaggtgtctaagaaagcaacaactttgaatgaaggagatgcttctaatccagtcatggatccaactacagcattgtcattacaaatgagagagttgaattagagaatgatcgcaagagacaagcacaacaaagggatacaacgtctcgtagaggaaaaattccaacaagagcaacatgcagccgaagaaaaacatcaacatgataaggacaacaacaagtagcatcaagaggatgttcatcgcactatgcaaaattcatagctgaaatgacaaacatgcaagctaaaatgaatagaactcaaattcaccatgatcatgggcaaaaaagtgggtcagatccttagtagataacttattagatgcaacttgtaacaatatctcacaactcaaaaagaaatgagaaatcagccaaccatagcattcaaataataggaagttctcaatgaagtaaaaaagaaagataaagcaaacaaaagtcaaaaaaatttccaaaatcaactaatgtcataactacagagcaagtatttcagaaatactttaatcaaaaagtaataactgactaaagaaggatagagcgtgatcaaagtccacctgtaatatttcataaggtgttgataattaatacatatgcacaacatttgttctctgagaggtttggagaagatttgtcactaataaaagagtagctgatgaagggaattatgagaaaatttgaagaaggaaggatcacaatcgaaacagagcagaaataagaaatgaggataagtctctttctaccaaatggattgttgatgagcccaaaaagaaagactttactatgtcgaattttacattatttaatgccaaaggagatccattggaacatgtgctccgatcccaatcctcctggaccattcttgctacctcacttcgagctggtttctcccatcaaatagttttttaggagatgacgacactatctacattatttatgaatttgctagggaagaattaggtcgtctaggtaggattagttccttctgcatttcccatctttatgatttttcatgtgaatgttccctcacatttttctatttgtttgcagccaaaccaatggatgtcatcttcgcctcaatggatgctctaagtcccgccaaaggtgacactgttttggctaccaattttttgagggtcatagtgactccggaagtcctaacacaaaagggactttagacccaaaagtcatatgcatggatgatgaggatgatccggttccattggaaaaaagaggaacaatgaggctgaggactccgcatcttccaagaaacttaaggcagtcaagaccccttctcataattctggggacttaggaattccttccgaggctaactcctgttaaaagatcaacacccactctacaagtatctagaattttctatcattttggtaaaattatagaatcatcttgattatatagaattaatattcataagaagtttcaagaaagttttagatttagaaatttgctagaacattctagcacattaatccaccacccttgagtagtataaataggggagttggtcctttggtggtgtgtggtgagttgagtgataattctagtgcacaaataagtgtaatctaagtattccaaagactgtcccaaaagtgtgttatatacaagagtgttgtaaaagtgtctagtattaaaatacaaaaggaaatagaaatacaaaaggaaactaggtggtacctcaggcaaggaaagcccgagaaaggtacaaaaaactaacccctaaggtctcttctggagaaggggtggtcgttattgactctgagcaagagacggttggaaccaagcccttggcgactaagagctcgaaggttccgccccttgctcctgccttattatcccaaaattcaaaggacaaggcagtggccacagtgcccgcaaagctgaagcgtgcagaggatatttgaaataactatcttaaaaggtaccgtgcagaggccaaggagatattgaggggagctgacattctttcgactgaattcttactaacttagtgcactacttctttgatcagcacaacacttactgcaaattccatcactgccaagtaaatccccaactcttctccgtccagaggttttgatagaataggaggttgtgcgagttgctttttttagcccttgaaaggcttcttcacactcctccatccactcaaatttcttgcttcctcggaggatattgaagaaaggaacacattttcagtagattttgacacgaacctgcttatagcagctatccaaccagtaagactttgtacttcttctacttttgtcggcaatttcataactctcgtgcagattctgtggcaaattgtgaattcgcaccttctcactcgtgacagcttgagtaagtttcacatcactcttgagtctcgggtctgtcctgtctgtgaagaccagttggaatcgcatgatcaaatctttttcagctgtgccttttctcgaagggttgtggaccgtacctttgaatggctggggtataattcttggccagtcaggtatgttgattggaaagcttgacttactttgaatgactcttgcttgattagaagaattcaaattgccatccttgcagcagtgtgctatggtatttggttgaacaggaacagatgcattcttgacaattgctctagaacagatttgtatatagttgttgaggtgaaaatcattgttttgtatagattactgttgggttttgtgccc

SEQ ID NO: 301392 - DNA, 5198 bp, Cannabis indica
tttttttttgttcttttttttgtttaactaatacaaaatattttgaaatgagataaaaccatggaataatatgtattattagagccttccatatacatagaaacagtggtggctttttaagctgagagagttctatgcttctctttatttttcgagaccgatgagaggaagtagtaagtaagatgactgcgtcgagattgaaaactatttcaaattcattgcagcagccatgttcctcagcttctgtgagatttctgtaaacgacggtctctgtgtgggatcagatgaccaacaagcctccattaaagccttccattcgggatcacaccacgatggaatctgtggacgtaatgagttgttcacgattcctcctgcaaatacattgatgaatcaggattacatacttgatcaacttgttctatcaattttacgagtaataagaaaagttctacaggtcaaccatgttgagttcaacataaaccgattcatcacctactatgctaagactaattaattttctataactatgtttaacttctcaacatgtctagttgtctaaatcttattttcctgtcacatgtagcagtttactgcaactgagtgtaacaatgataattcgcaagatctcttacaagaaaaggtagcatatattaaagtaaaacaacaatttggaaggactaggaatagatgataaaagttctgttttaataataactatccctatgccatccttgaaagagcctataaataaacaaaatttacaaagctaaattgagatgtgcaaacattttgagcccaaaggctgtgcaaacactaaggcataagattgagcatatttcataatatcccaaaaaacaaagagagagtggcgaggaaaataaaaaaattatgaccatgttcggtaaaccatattataatgcccacgtataggtatttcatgttttataggagagtaggaaaagaacaattgagaatcaacataatgtacacatagaatgcaaaatcaccacccagcacaattttgtattaaaccaaaaagaaaaataaaaaatggtgctcaaacatgccttttaaggttttaaaaaaatttaatatgcttaccaattatcgaagcagaatgcaagcctgaataaggttcctcaccagtaagcaattcccacatcacaatgccaaatgagtaaacatcaatctgcattgtagaaaataaaaaaaatacataaaatatcctaaacaaatcaaaatttcacaaattaaaggtcatgaaccattgtaggtaataacttaaaagagtctccgtatcagaaaagcctataatatttaccttctccgtaaccatgttacttttcccactaagaagctcaggagccatccagggtaaagttccacgaatacctccagagactaaggtatgctgttttacctttgacaagcccaaatctccaatctaaaatagtaaaaaaccaaccatgttagattcatattctatcaagtcctggataaaacttttaccagcatttagtgtacattacagaaaacagttgcaattgaaaatatttctgaaaaatagattaacggaaaatatctccaaaatcaccatcaagaatagtaatttaaacggttccaattgtaaatggtaactactacatgataataaacaataaagtgcatccctaaactacatcgatagtatccaatacaacataccttgcagacggggcgctgaggatctctcatatttaccaagagattttcacatttcaaatcaaaatgcacaatattcttcccatgcaaatactccatcccgaatgcagcatccatagctatgatgagtctcttacgcctgtcaattgttctgtatgatagcacaatgggtgtcgcaatcaatcagggtctgaagtattgatacagttctaaaccaaagactaaagtaattcattctaaacttcatatgtcatgacatgataattacctgtccttcttctgcaagaactgtttcagagatccattaaccataaactctgttaatgttgccaaagaaccatcaggaccatcacggacgattccatagaaagaaactacatttggatgatgaagtgaactcaatatcaaagcctccttccagaaatcgccaatctgcggtatggtataacagagtaaattacatattgtcagatacttaaaaaaacaaactcctaatcaacacctcggtataacacaattactaaagagcgtttgggattatcaaaatagagacattaccaatcgctctctttcagatggtctcccagaaaaacagctggcctttattctctttattgctacatcagagcccctccatttcccatgataaacagccccatatgttccagagcctaactcacggatctcttccagatcatcattctttatagtctaaacaaagaaccaataatgttttagaaacgaaggaaaagaaataagtacattactagggaaagaactatgatataaagaagatggcgattatgaacctgcaatccttttgcaatagcctctgcctcagctttcgtgggctcgattctagaggtgtctatagtatcgttatcagaatccaactctacatcagcgtgagcattctgcataacaaataggattttaaaggaaaataagtggtgcatcatcttaaccaattaacatgcataagatgaggaacttatgatcatacaaatgtcaaaaaattaaatcaatatagtatgcattaccgctgaatctaatttatcagaattcacttcttcagttatcaagtcattcttttcaagatctgaattttcttcaactcgtgatttcacatccttgaccccttctaatgctgcttccttcgcagatgcaatcaactcaggcaagaaactcagtttgtcaactgaaagctttactacattctccacttgtttgacggcattaccattctcgactgcaggctttgaacagattgaatatgctacttcaggaggcacactcacacaattactgtcaccaactttaactgcctctgaatttaaagtctcatgctgatcagagttttcaaccttttctacatgcatttcttcgttttgatcttcagctacacctttcccatttgatatcaggggtgctagagaaggttccactggattagataagttgatcatatcgggtgtggtccgtacaagatctatgggtgtggttcgtacaggatctaggggaatagcttgttggttttcctgacaaagtgcgttagaacttaaccttgaagcctgaccaaaggcataatcagggacagctttaccatcgaaagcctgatactttgaggagtcaacccaaggattctgattatccacccaaaacagatccttggactaccttcccatggaccccttggaagtcctgcattaactttaccatttacttgtggcattgaattgcctgcttcataagtttgagcgataggagctgggttctgcatatttctccatactggatgtccagatacatgtccatgagttggatgaagattatctcctgcaaatggtaaaggaatatttccatatcgaactccactttcttcaggaggaggaacgtgcatgtgagatgcaccagccacaggttggtcatgaaaagcttcaattcccatttcatttcctcctcggtgatgaatataatttgaaggcacaggtcgaccatcgaccatattactgtgactaagaggaaaattcatgccaccgtctacagcaaaatgatcgttcactcttacagatccagaaacatgtgatcttgcttcctcagcccgggcattcaaattttgatgcagaagccatgccgccgccctatcatgattttgagtttcattgtataaagaccggtggtcattattcagttcgggtgtgtaaattccatgttgcaactttgcatctgcattcatcataaaagcttccctgttcggtgggcactctgcacatggattagaaagagagtgaagtccgtttcccatgttgggatggtcaatatttctttggaaactcatacggcaatgctcacaaatactacttccttcagtaacattgggtccattaaaaagattaccaggaaaagctgacttttcacccgagtggactccaccaggcagccatccagcactctcagaatattgaggatggtgatcataagcaggttggtgattcagttgttgccgatattcttcgggcaatctatcagagctcttatcaggtaactctgaaaacggtacatggaaacgtgcagaagagggagaggaaggaaaatctgccattgttcttggatcatgtccatgatgtctgggagaatagtatgccggactccaaggggcttccatttcgctatacctctggctcatgggttgatggtgttgtcctgatcccatatggggaattttaaggcgatgcaaattatactgcggcattgacatctcataattcctctggttatgcccacttccttcgaaattcattgaattaaagtactgttcagctaaatgtaaatcatcaacaggactcatcacaggcgaatcaggctgcagttgcctcctaaaatcagatccatcattcaaattgttcaacgcatctacatacctcctctcactatccctctcatccccatcatagtgagacaaagaatcttggtcagaaatcccaaaaagaaaaatccttagcctagtgaaaccatccccagaacccaacttatcatactcttccatcatgttagtaacatcatcatcattcacaacagacacaagagcatcaagatcttcatcaggttgttggtacttcaaaaccgaagccccatcataaagctccctcatcctgttcatcaactcatcaaaacaaatatctctaggcacactaacgattctcgtctctcccccaacataacggagcttcccatcttgaggacgaggcaatatacttcccaaaaaactacaaagaaacttaacacgaggggtttcatcattggaaccagagctcaaaccaggtggagaattagaaactgagtttgttgtactagaaaaactgtccatcaagtaaccagactggtgatggtgttgctgatcaattgagttatcagcaatacccttgttacacatgagtatcattcagaccctaacaaaaatcaaaatcaaatcaaaatctcctacaaaaaaaaaaaaa

SEQ ID NO: 301393 - DNA, 1441 bp, Cannabis indica
tttattaaattatttttcatcttctaatttttcttctaaatttaatagtatcttttatataattttagccatgcttttctcatataagttaggctattaattattttggtatatttattatattgtatgtcgcttacgccatttcttcatcagccactacaatggatacttctacacccaaacttgacttcactgtcttctcacccttgaccacaaactgattattctttcgtttaatgttaatagtaggtgggaattttggattagaagcactcgccatcaaaggctctttttgaatacatttccaattcttcttattttgaactttaataaaagtgtaaatgatctattgaagcaatttacctacaacaacctcatcttggataacaactttacctttatcctcacttctaattccaaattgcacaaccactttgtcaatagagcaattcactgtatccttgacctcaacaaccacagtgtcaaggggtgggggcaggggtacacaaaagacccttgtcacactgttggggtcagccgaaccatttttcattgaatgtagcttgatgatactctccattactatataaattaataaatgattctgttggagttgctcatcctacctttcccgtctctctaaaaatgatgttgtcgcaaattcttttatagtgttccttcacacacgagattttctaacaacataaataattttttccacctctcaaatattcataatatgagagccaccttcgctcttagcttgcttttggccaaaacatggacctcgagctctagaaggtgagcttggggcacacattcatgacccatattgaccattttgaataggattaatttcttcgtcttgaaaatcattgagtggacaggccaatactttgtggtcaataataccatagtcataacaaaactctgagagacacttatattgaaagataagagagaccttcgtcagttcgtcccttgtcatcaacaacaacctttaaccctcacttgtgcggtttggtgatgttaattcgaactcaaactttcatcacaccattcatcaacggaacatcctccaccttcccaatccaatccctacattcacgagcaaaaacttccgtcgtacatggtagaagtacattattgatagaaatgcagaaaaagatatgttcaaacagatgtgagtaaaatatcgtgattaactcaagggtaatagtgttacgttttgtgccctaaataaaacctatttcaatataatcagatttactaattaataaaagatcaaaaattgcattttatgttgcatggttcacatgatttatttcatgattatgtttaatgtataaattctattaagtccagaacatatgtaaatatatatgtatatatatttgttcatgattatagtgtcgtcagcacagtggaatataatcatgat

SEQ ID NO: 301394 - DNA, 2959 bp, Cannabis indica
aacacattcaagttttgaaaaaatacacattttgatccaaaacacaccttggcctgccctaggggtcttatttaagacttgacaagttctagggtattgtcatgggggctggcaagttctagggtttaccctaagaacttggccgattcatgcatgggtcatggcaccctggcgggccctcttcatgcatggggaccctggctagcccagggcttcgatcctaaatgggtggctagttttttatcctcttttgacctcaacaggaatcctatatggccttgtgacctatacaacctttgtctcatatgtggttcccttagaaactctatatgacactttatggtgagtctattatagtcaaatactcaacttaagactcaatgtttgtccaagttattacacttgaaattgtacttggctgatacccaaccttgtacaataaaattatctagcaattaccttttggtacggttgaccagagtcttgtctaaactttattgctttgtcaggtttctcacctccccttgtcttttatgtgcagatgatcatgagtgactatttgggaggtgacaaccgtatcaatgaagatttacttggtcttctctttgaagactagtgtccagttgattcctccagcaggtcctcaagttatctcgacgtcagtagtggttctccggaacctaaggtctagcatgactgccatttggagcgaatatgtggtgagttttacagccagttcatttgggagttaagcctcaggtggaggcagtttctttttggttcttggacttacatcgtttaggagggtgtgcctgatactttgctagttagtagggaaatttcttcaccaagagatcttcttgctgcggagactgcagttactattgccaggcactcggggtccattatggcaaggaccaagcagaagtgccgtagggcacaaccctatgaccctcacatagctatgctagcgactagagggagagtaggcattgttgaggaggttagacaacctcaatatgatggagaggtaggggcctgccaggcttaggcacttgtggctgatcgagatgaggagacctcagatagtgcgtctgagattgaggaggttgtgcctactaggaggcagtacaagacttgtgttgtatttcccaacaaccccttagatttgtatgatgaggccaagcggcctttgaatagccttggtcatcttcctgaggtcgggatataccatgttatgaaggaggctgcagcgccccgagtccttgagcatggggaccaccaggaccggtggatatctcccttgtcctctatttccacccaaaagctcaacaagattaaggtaggagggctaatgggagatgttcggtgtgataggcctatgagagaccagcaagcacatcaattggcattcaaatggatgacttggtcagagtgccatatagagcagggagcggtgctgcccctgtacccttactatagagacatagccatgtacttcagggtgtgtccgacttaggtcaactcgaaaggtataaagtacctttcaactatgttctttctgtatgcaaagttgggcgagactcatccctcccccgacgagattgggtacttttttaagctgaaatccattttgaagaaaaaccagactggatacttctactttagttagctgggctatcgatggtttggcaacactaatagcacaactttatcgaaagtggaaggatatgccaggacttatttcatagcctaggacatcttgcaggtccaccaccacttttagagggtgctgaccttctaatgttccatccccaaacttcagattagggatagggctaattacatcctatccctccctgttgagaggaggaatatatggaggttggcatgcgagaccaactttcagaagtatggtctgtacccttctgagtctggtgttgaggaagctgaaggtctgtttggaagcccaaatgatgtcccatagtagaggagacttgcccaggaggtgggcatacacctaatttggatgatgacatcccattctccaagcttgtgaggaccatggagaagagagagaaggccctccaccagtgcttaactcgcggaggcactactgatgatgttgccctgtcgattaggcctagaggccaaggttctaccaggcctactcgctccctgcctattctatagaaaagggcaaggctgctgctagcagtagcaattcaaatgattcttcctcttaggatgatggtagttgataataccaactttttctttttcttgcattaaataattgtaacttgtattctgactttgttactttttttttttttgctcatatggcttccagattgagggatcttactggggagccatttgatagagcttcttcaggtcatcccaaggctaagatggcccagattgccaggtctactaatgccataaagtccctactacctccccctcctatagggcatgaccaaatgatcatagatcctcccttaaggaggttttcatgccctcgtagatctttgggcaagggggcccaaaagtctggccgagtgacttatttagccatcagataaaggattgctgagactacccatagttacattggtaggctgcctgtcattgatggggagctctaagagctagaggataaggagctagagcgtctaacgtccagcaggcttcaggacgtgacatctccaagttatatatttgattttactcaaatttttgcattgacaggggctggccagccagatatgagccactgggaggctcaccagctagggttgcattaatgagaagctggttggccagaaatgcaccacccaggggctgatcggccatgtcttctactacctcttacttggtttttgttatagtgagatttttctcacctagaaacttgagaccggactcctgtttaaaggacacgtgtactcaattt

SEQ ID NO: 301395 - DNA, 2904 bp, Cannabis indica
tttgttaaaaaaaattgaatgaacaatttaaataaaaaaaaaacaatacatgtaacaatatgtgaaattaagatatttattgttatataattatattattatttgaataaccaactattttgaaaattttaggattgttgaaaacaaccttaaatatcttttcaaaatttcaaattcaaactaatttaaggttgattataccttgagcttttgccataaactcacttaatgttcagctcttttccttagcatttctccccacagcaaggagcctacagccaacctagattggaaggccattagcttcatatcgtcactgacttcagttttggcagttgcctccatcattctttaaataaaagccttcaggctttaattatgttgctacttgacattggtgagtgaacctacttccatgtccttttctcatgtagcaatgaattgtttacggaaagtcgattgcaaatccttccaactatcaattgatcttggggccagccgcttccaccaatcttctgtgaacttagtaagggtcaaggaaaagcacaaacatttggaatcatcgttgatgagaacaactcgcatcatcttgttgtatttagccaaatgcattcgctgatcagtcctccctttgttcaactcaatgtggggcatcttaaagtttttcgggagcatagtttccacgatcctcctgacacaaggtttcaaatcctcatcttcataatctgaccatgctccattttgtttcttaaccaacttggtcaacagaacaatttgttcttccaaccttttagtgtcacttttggggagatcacgtcccctcatcttatcactcaaatgatttctgagatcacccccacgtggccttgccttctaacttttgtacctctcgtacttggcatccaatcgctgccacaagtctgcagtggaccaactatcattggagtgacaacaagaatctcccacaccctgattgacgaaatcactaggaggattccctcatcttctaggcttgggtatctttgtagctggtcccctcagcatggttttgccttgagggtcagaagggcattcaggctcgaaagcaccggtggccttctgtgtcctcgaggactgtccggccaaggtcgcgtctttgcgaagtggcttaggagcagatttttgtgggagctcatccatcttgcctttacccttatccttgcaagggttttaggtttcatcagctttagtttttttttgagtttgcccctcgaccacaacttccaccgagggttcctcatttgactaagccaagtcgtcaaacttgctctaaagttgttccatcatcttcttcatcattacagtaagttctcttagctctgctaactccacttgagtagcttccaactctttttttttactcgtaatacattagggtcatggtcgtagtaataaccaaccttgtaatacccatcttttacgtgctccatgtcgtcaccttcttcttcttcaccgccagggtttcaattttcaccgagatcatcgccaacattctcaatatctccttctcaattctcattaggggttgtgttgtaacgccctaatatataggtacgccatgtgtgtgattttatatactagtttaatactaatagattaattaattattaaaaactatgataatatgaaaaacttaacgaaaataaaacactaaaaatggacattataacagcataaaaagcgtgttctagggatctttgttataaaaaattttacaaaagaactatataggacgacgcctcaaaaacataaaaccaaaatacaaagtagatacagcccacgacaactcctggaaacccggcacgcaggccggtgaggtcagtttgtacattgttggagaagtttgtcacctcatgattgatctagtttttccttgcctttacctgcaccacatagcactcgtgagtcataaggactcagcaacaaaagtaataatgataatcatatattttattattcgaatattatcatttatacgcaatcagaatcaaatcatcacacattgttcataagatggaatccaatcactactggcatctgccacgaataagcatcagtatgcagatatctggtaatacaaaactcttatatcaatattagaaatcatattcatttaataatataaattatatatatgttaccgcataaagtaaccatcttcattacatcacattgcctaatcaggcaactcgatgctttagtctgataatcatgtattgcatttgctaatcaggcaagcttgtgccatagcctggcaccaacatatcacataattaaatcacctaatcaggtgagcctgaacctacggtcgatactcatatgtcactgatactcgtacttatgctcggtatgtcaccacaaaaaaaccctacaacggtttcattctatgccataacctaacaggaaaccctacaatagtttcattctatgccataacctggcaagaaaccttacgacagttttattctatggcataacctggctattttcatatcactgacgctcatacctacgctcgatacatgtccaggagtatcgcatcacctaatcaggtgagcttgtacctgcactcagtactcatatgtcactgacacccatacctacgctcagtacgtcgctaggaatattgcatcaccttttttttgaagaaaagcgtgcatatattaaaataaaaatagttagaccttgcggtcattacaaaatataatatcggacatagaggatagcggcacggagccaaacctctgttgggaaaaagcccacttagccacattatgggccagaaaattacattgtctactaacatgttcaaacatacaaccaataaaaaaggggaaggtgtttttacaaaatgagacatagttc

SEQ ID NO: 301396 - DNA, 968 bp, Cannabis indica
cacctaaattatgcaccaaattaaatattacttaaaaaaaatgtgtcattgaaaattaaactttatggctcctagttgggtctagtctctcttttgtggacttcttttggcgatgtgcctacggctactcagtgtgatactaatctggctgggtctagtctctcttttgtggacttcttttggttctatgcctacagctactacgtgtgatgctaatctagttctctagctatggtgatagtgaaggacgttggtggtgaagaagctgtggtacaagtggattctgtcgatggaagtgttggtaaagtcttggaacaggacagctccctggagatggagatgatggaattgtttgaggatatctcactggaagatatagtggttatcaaggcttgtgttgggaaggttgtggggtgcaaggatatggctgcttctgtggttaagaagatcttgctaggcatctggaacctggaacaaggatggaagatgaaaaagtttgatgaaggggtactcggctttttctttgattccgaagatgattgcacctttattatgaataagagaccgtggcttgtgaacagtgttctgctaaacctcaaaccttggacttgtgaacagtgttatgctaaacttcaaacgcccctatcatagctaaaaaggtgggtcgttttgttatatctgatgggaagaggaaggaggagattgtaacaagggggttcctcagatgctgggtcgatgtctggataagtcatcctttccctgtaggttttttcctcaaagtcggtgctaacccggactcgtggattcagttcaaatacgagaagcttcttttttgttctttaactgtgggaggctggcccatagtaacagagagtgctcaagccctacgacatgagttactccggctaccggggatgctgtctgtatgtacggaccgtggataaaggttgaagtgttggaaattattt

SEQ ID NO: 301397 - DNA, 1485 bp, Cannabis indica
aactgtgaaggcccatttgcctgatttgaataattgtactaggttaattaaagtagtttaacctaataaaattgattagcaacataattaatttcgaaatatatgaattaatttttcatttgaatattttgaaattaatttagaaaaacacacttagttaaatgaaattcaaattcaaggtaaactaaatgtatttttctgtatttaattaaataaagaattaataactaattagattcttctgaagcttaattatttaaatatttcattaaatattcctatttaagttgtaaattagttatttataacaacaattgtgagaataatacgaactgtataagccttgataatagggctatatgtttccctaaaatcaataccaggtctttgattgaagcccttagcaacaagacgggctttgtatctcagaaacgtgatgttagcattccatttcttcttaaaaacccatctgttccctataatgttcataccagcagccttgggaaccaaaatataggttccattcttctctaatgctatcatttcctctcccattgcagcattccatcctttgtgacagagagccttttcaactgaactcggttcttcattttcccactgccattttgcttctcccaaatagactttgggtttaaaaataccagccttggatctcgtgatcataggatgtgaaggagcaagaggagcggctgtctgaggagaatcatgagtaattctaggtactgaagtttcagatccggagttgttgatggtgacagggctgtgttcaacaccagcactagcagtccaatttgactggtgtgaatacgtagcagtgctggtttcaaccagcgtttcattctcttaattttgagcttcaatagtgggactgagtatcagtgtcttctccagggattttagcagatggattgtgttgattgtacatgttaaacctgtcagattggaacaaagcagtccaggagggaacttggacatttacaattgcctcaggttggtgagtgtttagaaaactggttaaaaaggggaagtcatcttcattgaagatggcatttcgagagatgtaaagtctccctgtagaactgaagcacttatagcctttgtgtgcatcactataccctagattgacacacttggttgaatggaattggaatttgtgtgtttggtagggtctaaggcaagggaaacaagcaacaccaaaggttttgagaaacttataattgggtttcctaccatggatgatttcataaggagatttctctttcaaaattggtgttggaagtctattaattagatagacggctgtttggaatgagtccaaccaatatttgagaggcatatgagcttgagcaagaagcgtcaagcccatttcgacaatatgcctatgtttcctctcgactctcccattttgggcagaggtatgaggacaggatgtgtgaattcgattccattctctatgacacactt

SEQ ID NO: 301398 - DNA, 7380 bp, Cannabis indica
tttaaaaataataattataattctcttaattctatagctgtcttattagttgatctattgtaaaatttgaacatcagacatttaactaaatttaaattaattgtgaaattttgcgtaggcagcccccctactcttcttggtatctaatattcttttaggaattaggtatataggtaaattagcaggtatgtgaaaatagttcatcgacaaacagtcaagtcaaccaacaggtcatactttatgatgaaatttagtagttagaaatgaaattaaacaattaaacaatagatctgcatttggacaagtaacatatggtcctgcataaatttgagggaagaaaaaattatatatatatatttggaagtgcaagaaaacacaaaatcttttcaatacatattcatgtgctgctactatctaatgaatacatactgtctcctcctgaccaacgcaagtggttcaactaagactacctaaattagatattctgtaaccaacataatacatatatgtatgaaagaagtctctggtatgaatacagacattttttttatctgaaaagagaaaactttacaaggctccccaataacttgtgtttacatagaaaaatagtaaaaaaaaaaaatatatagaaattaattgagatttgattcaacgaaagaagggcaaaataccccattggtgaagaaatccctctccggtggtgacttcaagcaccaacaaaacaagcactgcaagcatagcagctctcccattccaagtttctgcacttttggtccaaccccattcccacactgtgactgggggcggtagttctctccgttgcgaatcatatgctgctaataactcttccacactaccaaggggaaccaaagactgcaccagtaggtataatccaaatcagaaattagggttgataaacacacaaaaaatattgtatggattttgccaagtttatttactagctttgcaagaaactttttgttattatattctgtgttggatgagacttgggagtgtgtaaagtacctgtcgtgcttcgagattagatacagccatagctccaacatatgggagggactcgatcacagcatctgccaaatctgaaataaaggtgggttcacatcctaatgcaggaacacggccccaattttcaataccagattctatggctaattctttgtactcaacatcaatttcttctagagtttcaatatgttcactcacgaagctgaaagtcaaacattaaaacataaatggcaaagccaagtttcgtcacatataaatatctaagacaaaatacacatttaaccgtgcaagtaagcacgcatgcatgcaagatggataaaaaagaaaaagcaccatggtaaagaagaagaacaccaaaaagacaagaagtttaatcacctaatcggcactgcaagcaaattcttgactccttttttcccaaggtcaattattgtctcatctgtatagggtttcaaccattccacaggtccaactctgctctgtaagaacgttcaatatcagtcaactagcagatgatataggatatgacacaacatacgtgaaagaaatcactaactataaaccacacgttccttcaaatggcaatcacagaaaataagacatgcaaacataatttaatcaacaatttacaataatgtaggaagaaaatagcatttttctacacataaaatttatgtctcatttcatcaaaaaaataaaattatgtctcatccacaaaaataaatattaaaaagaattataaataaaatattcccccattcccatacccttacacaagtcaacttaaatgcatggagtaaggtctttctgaatactaaaaatcttattttcttactatttagagatacaaataagaattccagacaaaaaattagaaaagaaagaaaagatatgaattgtttatgcaaaaactaacattacctgatatgccagagtatacggattgtttaggcctcttctttctaattcttccattatcaagtctacacattcttccatctctgccttgtatggatcccctgcctcttctacatatgcaagtggaaccccatgtgcactaaagaatatcacacactgaaagaaaacaagttatacttaatacaacaattacgctcaatatgagaaaatttataaactatagattaaaaattgagtgtttattatgtcaagagagatgcatattttacttgctgcttggatgcatggtaacatgcattttcaaattcaagtagattagacagttatcccatataagaaaattagagaaaaagtaaactttcaattgttttgaatgaatgataaaatttataatggcgctatggactggagcgtagccaggatttttgtttagggtgaacatgttataattatttaaatttaaactacatcaataattattaagtttaacgtagacaaattgaatgtggcattacatataattttactatatttgatgtaggaaaaaattaattatttgacaaaaaatttctcgtttgaaaaaaatttgaggggggaatatgcccaccctttagcataagctggctccaccccgattatggatacattcagtacaacctaccaacttaactgttataacagaattaacaatcttaatagcattaacaaatttattaaaaagtcatgaaatgaataagcatccttttgttcttaataatacaagtgtagtaccttctgaggggtgtcaaaaccttgtagttccttctcgatcaaatttgccattgcctttatgtagccttcacgctggtaccacgaaggtattactgtgtgctgcatgttgactaaatattcatcctccctgatcaatcaaatatctatttttgtcacaaaaaatggtttttgttatatttcaatattataatggcaactgtgcttagatatcaccggaatatactctccaacagtcgaagacttgaaccactagttgatattgaaaattgtggataaagcggtaggacaacaagctttgttatcccatccttttaatctgcaaaattgtttatcaatcaacaaaaatatctacagttcacagccttgcacgtaaaatcctgcaagtttgagggatagacaaaatacaacaaaagtttaaagaaatagagaaagttatccaactatccagcttccaataatattatttttttatggttattccgattctgaaatgcaatgtgccacacacactattgtcaagggtatatcaaaataaggatctatagaactaaatggatacctgttctatggcttcttcagtaaaaggatgccaatatcgcattcccacatatacatttgctgggacatcctttgaccaaagggccttcttcaactcttcaccctgagtaaacaatgataaatagttaagtaagcagaatcaaatatcagagcacaaaagaaaagatattaacatcacaaagaagttatcagtttatcattcacgaaagaatgtcatgcaatagactaagtccagtatgcttttaaaaaattgcatgcctgagcatcagttatccgtcgaagaggagaaccaccaccaattgcggcatagccctctttgctcttgggtgccctgaagacggaaatgaattgtgccaagggcttttgaagaaagcgaaataatcttggcagtcgaatgatatcctgtccaaagagtattagcacactagacaacaattcaaactcatgtgtacaaacaaaacagttaacgaattgtcaaaaatggaaaaggaacaaaaaaaaaacaattaacaaatcccatgattcataacgatgattatgcatgacatgacatgctcgcatgtattaaagaatataataaaaataaagtaacgaaagcaagtaacaatattttattaagctgataataatctttaaataatgacccattaaaaagtactataaataatcaataatttcagcaaaatctacccagattcgtaatctagtacacccttgccgcatcttcccaaaaaaaacataaaaggtgaatatagaaagagggagtccacaactaaactcatcaccccaaaaagatttaacaataagtcatttggccgaagctcctgagaatatataatctatatatatgtctctgtgtgtgtgtgtgtttctagacatatgtatatacctactatattattatacacatatatgtgagaaaatggagctttaccggatcagcaaagaggttaaacagaaaaggctgaacatcgtcgagagtttcaggacctccaagattgagcaacaaaaccccaatcttatcattcccgacaagcggcttagcgggaacagcttgagtctctgaatccaccaacacattcaatggcggcaagcactttagcctcgacttcttagagttagagaacagtaaggaaggctgagtcgagctcaatctagaaaagctagcttcagtacaagttccagagtagcgttcgagcttctgagagctacaatttgccctaagcattactctgagagcagaacccaaaaaagaatcaaacactccaattcttcggtactcaaatcaacgaagatgaaaaagaaaaatccttcttggatagacttaccgatggtccaggggagcagcagaggagatgctccatggaagcatcgctatggattcagccatggatgaagtggaatggaggcccaggaggcagtaggggtaatacagacgggactgaaaccagtgaaaggaaaggacggaatgaatcggccatggtggatggggtgatttttgagtatgggtattagcgtatagggtgtacacgtggcaacctgagaaccactcttaatttttgatcggacggtattaatagaatgagagatggataattgttctcaggagtcaaggggtcaggggtcgtagtcgtcttcttcttcatatccagtcccaagtcaatactgtccaaacctttgtttggaaatggaattgacatttttatcctcttactcaaacggattttttttgtcaaaatatgcaattttatgaaggaaaatgctaagagtaagttgtaaagcaccgtgtcatactcctattagtgcatattaatattgagagtttcatatattttaatttaataaataatataaaaactgctaaccattaataatacactgtggtatagttccttcaaatgtaaaaattttcaaaagttgttctgattatggaaagttagatgacattcgaaagagagttttcgaaactttaacttgtccatccggaaggaatctcgtggaattatagatgccatctcgaagggagaacccggatgcctatcatgtccacctgaaaggagtcttcaagaaagctcgtcttcttccaaaaagaagtttcgaatagctagatgtttcctctaggaaaggagtctctaatagttgactccagttgttgcctgtcttttaggaagcgtacttctcatctggaagcacttcttcttgtgttgacatggagatattgttacgaggagtttgttaagtcgtaactaacttaacaacttaccatttagagacatcaactttgggatctattgtccatgatttctcccgtggcaagtcaggggttggctaagtggcgatgaggctgatgttagagaataatcactaaattttcctaagactacaaaggaaatcattagcttcggtccggaagtccctccgggagaacaagctaccctatcgcaactccgaaagtcaagcatatctagagttgtgataagaaaaaggaatgggtccagactcgtgctttggacgcattaaatgcagtatggagaaaacgcctacaaattactttgaaaagacgtgtcagagctttaaaacgttattctctgattgcacactacgacgattgcataatgaacagtcaaatcatcagcagaagctaaaagtctatcttaccaaacacctagagcaagtctgcgaattgtaaaaaaaatggacaggcatgccctattgtctaaatttgggaaatggtgcaagtaatactcatacaagtacaacaacagttacctttttaccatctttataaggctataaatacccccaactacactcagtttaggggtcgagaaaaatagtgagaaattctttgtagagaactactgcattaataacagtgactcgtgaactaaggctcattaacgatctaatcacgtaaaaaatccttcatattaagtttcttctaatcattaaaatatctctaattaatagttgttgaaactcttggttaatgttttggtgctttcattgagagttgaaggaagctttccatagaaggtaaatcataaatagattcctggtacgatggtgttgactagaaacaactcacgtcgaccacatctgcccgaagatcttgtgggtccagatggagaagaagtggcttcaagggtagatgttgaagaacaagacaaaactaaggatcccaagtatgagggaaaccaagaagagtatgaggagtacaacgatggtagttataccgaactaattgcattgagacaaaaagctactgaccatgaggttaaatttgcagaataaaaagagcaaaacaagcgaatgcaagagatagtaattgctatgaaaaaagtgatggaagtcacaggcattcatgtgcacctgaatgtgggccctctcgaacaagataaaatgggagaaggacattcttagccgtcaagaaatcaaaaataaaagaaccgggagacaagccctatctggttcccttctgaaagtcctcccaaggaaaatcctaaagctaatccggagagaaaaaaaaggcttgagatccgcaaaaagtttattccaatctccctaaagggaaaggtccacatgggggcagatttcctaagggaaagactagtccttaggattggggagatcgaaggagcatattcatgcaccaagagcctgggaaaagaaagggaaaaattcaaaaggaccctccgatcgatttaagacagaaactcaatactaagcacggggacctcaggacttgtctagaataaaaaaataaaactgtgaaagttttgaataacactttgaatgaaggaatcctggctgaactcgttgttctccgaaaggacatagctaaagtctcttgaaggcaaaaggaagatgatttagaatctgactgggaggaccgggagccttgcgccaggaatgtatttgaaaaagaacttcctaagaacttaaaaatgcctgaaatgactctgtatacaagagacacagaccccaatgatcgcttgtcaaggttcaaccgggtaatggcagtcatgagagtcagcaatgatagaaaatgcttgtgtcaaaactgtatgttagagaaatagttcgtcttcacggtgtcccaaagtc

SEQ ID NO: 301399 - DNA, 3075 bp, Cannabis indica
gtactctgtgtgcaggtaaagaaaaacccaaacagtgaagatgtgagctcaaggcatggattacatgttaggggattgtcacgacgttttggttttaattatttcatttaagattatgatacggatatttttgtaaagctttataatttaaagattacgaataaattaatgttttatttttaaaataatgagatatcatgcttagttatttttcaataaagaagtctttctttgtgtttatcttaaattattttgtacggactatcgtgtgtaacatcttgggaaatcgggatgttacacatcattttggtgaagtaaccgtttcagataaggataactagcggtttccagtagtaaattgattcatcccacatgtaataaatcaaatgagacgtggagattatccacgtttcatgaacgattatgaagataagaacaagaggaataaccgtcgtcctcaatataaataggagaagagtttcttgtgggagggggatgaattttaggagaaaacaaagatctatacgattaatacttgtatgatacttgtacttcgtaaaaacaaaaaaacccagaaataagatagactcgtgaactatgaatatttaactttaaaactacgtaaaacttctttgtctattatttacagtcatctttctgtattatttaattgttaattaaagctcacttattagttatcaaaaaatagcgttaatagtttgttgctttcattgagagcctttgagaattaaactcaaaaaaagtccattagcaaaactttcatcatcttcccatcatggaaaatactccaaatgataatctcgtattaaaaagggggcatcacaccatcttgggaaggagtctcaagtggcaaaccctcatgaagacagaaatactggaaaaggtcctactaaatgggatctcgagcgagatgttaatgacgataaaattccaaaaagatggaatcgtggtgcttacgatccaaaccgctatgtgccattggtgaaattagaaaactgctaattttgtgaaagattgctcgagtctaatcagattaatgcaaaattagaacgcaaagtggatgcagcaagagcaacacagggagatgcacctcctactcaaatcggctagcctgcaaggcatcctcgaggaaggcctcgcagttcaaaagctagaaaggcatcaggagcccttgtcaaccatgataatggtttattagaaactcacaccgtagtcttccaaatttatccaccacacacaaggaatagtatgggctactaggataaattgtatttgtttctgttgaattttcaacacatgagcgagaatagtcaagagaaaaaaaaatagttttcatttttctccactattaattttgaaaattatatgttgaaaatttcttccgatttctcaaattaggtttctatttatagtagttcactcccaattaattaaatcgtatttaattatctaaataaaaatctataaccgaattcaattattgatatttcagatgagggaatatctcagctagcttgaaatatctttaaccacttttcaaattcaaatatttatctaattgaattaattaaataattaattaacctaaaaaataatagaatcaataaggacactctactatatggtagacacctaccttgtcttattgaagacaaagatggtgtcttatcctcacaacttttgtcttaataaatattatctagtgattagcccttcatgtgttggtttgtaattagttttggtcaaattagtgtttttaccattttaattacttctttctcctttagtaccattaattcactagtgaaagtataatttagatcccatataaatttgtgcacaactttccagtcccagaattaacacttaaagggaaccaacattcgatttgttaagaaaatcaagattccataattataaatcatgttcccagccatccatattattgcattcccaaaacaaaaattgtaagaaaatcaaagaaactaataatatgaataggagttcatgaaaaacttaggatttaggtcgatctaccattgatcatcgttatgatatgaattaggtctttttatagtaaacgacatgttagataaagataactttattcatatcggtccttgtcatatatactctttattatatacaacaccttcacttagatgtcatactatattagtaattcaaaccgagattacttgcaccgaaaaatggacatcagcgaactgtactagcaaccattgattaaagattccataactttaatatgttgttgactgttttattcatagctaagtgatcttagttcgctgtacagctacaagtcacagcctcatatatgaataacgaaatttttgatatttatatataaactatttagtaataaataataataatttaacattcatgcatatatcaaaatattcaaccctttattaataatcataaatgtctttataggtttttcaaggtagaaaccccaacaattacaacaaataacaatcggaccccatcaaacacaacataggaccccatcagacctggccactaaaaccacattctaattagacattggaccgaccgtcggtcatatattggaccatctaaaccaatcgggcacatatcagacacaccatcggacctatatagacatcatccctaaactcgaatctgaactaaccatcgggccaccatcaaactcctatcgggtaccatcgggctagacaaaaaaaactagaaaccaaaaaaacacaaaaaatttaaagaactatttccacacaaaaaactacataaaacagcaacaaccaacagattagacattaaaacaacattataaattaaaataatcaaaaaaatcacttacacattaaatctgtaatggtactcatcttgcaacaaccttttaaacgtgtcatcttgcaattggctagcgatatcatctaaaagttattacattaaattatatgtgactcaatacttaattggactaattaatcaatagctctttatagggttgtacatcggtcggtttgggcggtttatcctatatatttt

SEQ ID NO: 301400 - DNA, 525 bp, Cannabis indica
ttggtgttggagtggttgcccgggatgataagggtcttcttctcgaaggtttttgcaaacgttttcatgggtcaatggaacctctgctggtggaagccttgagagttaaagaagcccttagttggatcaaagctataagggttggcatcatgtttgcgtgacggactctagtggtgttgttcaagctcttagatgctcattacatatgttgtctttatttggccataatataaatgattgtaatgtttttctttcagagttaaaaaatatctctgttttttattaaacgatcagcgaataaagttgcctatgcttttgcaaatgcttccctattttatcctgattgtactttttacctgaaggatgttgtagtaaatttgctacctctgtttggtagttgaaattgttaattaataaaagatgatttttccattcaaatatatatctattctatataaagtgggtccatataacagaatttttggtttatgagaaattcatggtgattttttatttatattaaaa

SEQ ID NO: 301401 - DNA, 4821 bp, Cannabis indica
ttttttggtttacctcagtggttgggtgaattggaaggtacaatacaccagaccctatagtgattggatcaaaggtaacattgtaagctttgagaggttgagaaattgatgatctaaagttgttgagagcttcatcaagactcaaacttatggccctaacgactgtgatgtggggttggaattggggtccaccgaactcagctcgaagaaactccatgagtttcttcactctggttacaacctcatcaggtggaattgcccacactgaatacatctccttcttctccattacaacctcttctggtttttgggtaaaacaaagaaagccaatatcaatttgagtgagaaaatgttaaataaaaaaaatgctacttagaagaagttgtctcaaagtattattggaattgttttattagtaagaagaaaatggtatcatggtttagatctcttccccactcattttagcttagagaatctcggagaccacatgtcagttatacgagtcttatatctcattcctattccattaagattggcactgtcacatctaactagccttccaaagagtcaagcataatccctcccgggaagagttgtggtagattttcatcctattaaataggtcacaatactataattatactaaaagttcgtggcgacattaataaattgattcgtggtgcatatccttttcttacttattcggtagcttagacaatcctagagaccatgtgtcagttataggagtcttatatatctcatcttctcttaattgagacatcagtatgcacctcatgggttgatattctattaagattggcactgccacaactagctagtctcccaaagggtcaactataatccctcctatgaggatatgtggtgagtttccatcccattaaataagtcttaatactataattatattaataattcgtagcgacatcaataaattgatttgatgtcatggtgcatattccttccataccctttcggtagtttagacaatcgcaagaactatgtgtcagttatataagttttatatttcatcatctcttaattgagttattggtatgcatctcgtgtgttctcatttaattaaggatgacactgccacaacaagctagactcttaaaagaacaagcataatctctcctataaggggctttgctggtttttcatgccattaagtattatagatattgtttgattaaatttttttttatctaaatcgtactccttaaattttcatccatattaagtatgtgtaataaaattaaatggaagtgtttgaatccatgttaataattgagtaaaaaatttaatttgatttatatatatttaattgatctaaatttcatccaattatactgcagtagctttaactttttaaaagtaaaattcttaatttattgattcaatccaaactcttttattcctcttaaatttaaggtccaatcaaagacctaagactaactaaaaagacttatagtgttgttaaaagagaaaaatacactttggtaactcaaactttgagcaatttttctaactttcagcaactagtcttccaatatttttatggaatatctaaaccattgttagaaataaatattttgacaaatattagtaatgctttgaaaaaatataagaactaatgatgaaaaattatttcttcaatcatgtgatttgaattttactccatctagaatagaaggaaaaaaaaattatatgtgaagcattaactttgatagaccaaataaaacatacacaaattactaatatattattgagtaattgacagaaaaatccttttatattttaatttatatacactttaactctttattttttcttttttttttgcaaaattcttaaatttactttttttttttgcaaatttgatacacaattaaatatcactgttaaatattaattagatgaccactgtgtacacctgtgtatacgtgaaagtaaaattttaaagccaatatagaaataatacaatatcggtaacaaaatatatataatttgagtatgtatcgagcattgctctatttattaatagaattaaaacttcattcaacatctcaaatcatcaaacaacatgccaaaattgtccataacttttaactgaaaatagcacatatggttaagtttaaagttcttcgaacaacttgcaagccatgacattaaagaaaagggtattatgagagaataatctacttgggatcgaggctgcattcggcaatcttttcccaagacttgagagttttgtcttcggtgtctgttttgtacaacgcgagacgagttatagggaagctcaggccactaaggctgtcgtcaaggatgttagctttctcttgagcttttttcttctcatcctcggttaaatccgagtagaggatgcttaaatgaggcatgtatgctgcaaagaaatgaaaattcacaaaatgagaaaaggaaacacttatctaacaccgaaactagtttcgggtattgaatatgaacaagcaccaaagactccaaaaattaatcttgtattcaatttttggttcaaagttcagaataagcaaattaagttttcggcaaagaaataagtaaaagactaatttttgtttcgaaagacacttttcgattgtgtttacttacttttctaacactctcaaagttcataaaaagtgctgcaaaaattaataccccattaactaaaaggtcacctcagttcatgtcaagttcaaaacttttagaagattaagtgatttataatatttcaattttcatagcaaaatcaatattaaatccatcaataaaacatgacttacgtgttgagctgttgtaaccaaaatgttcacagcaatgtgatgaagcttccactacctaaacaagataacaaaactgataatcatcattatacataaaacaacaatgaaagatgaaagtgaacaagcttcctccaccatgacatccaacccaagtgcataaactctttgatgtgttctttacacaaagttaagtccttgacaatgggatcttaacataaatgggaaacaaatttagtgtatcttgatttgaagtgtgggaattttggtcatgaagttgggttgttgagaaatttgagggcttaaaagttggattggatcagaattttctaggtggaattattcctgaggagattgggaactagaaagagctacaagaattgtcacttggaaccaacattttcgatggtgggattccgcggcctcagttggattcttataggagcttaagaagttgaacttgagtcacaacctcttgtattggttagttaactaacttaactaccttttggtcttgggtggtaataggtttgagtggtgaaatcccatagttgtcaatacataaacttgaaattaggatcacaataatgagcacagccttttatcaaacaatctacaaaaactaaactcaaattacccattaagccaaaaacacaaacaagataaagaaaaatgaaaatcatatacacaatacaaagcattatagcattataaggaagtcaacaaattaaaaaagtcaacaaattaggatcacaatcagtttcacacaacagagtggtctcaaaatgagtaaagctttttatcaaactccttacaaacaatctaaacaaatacccatcaaaccaaaacacaaaccaaagataaaaaagtgatctttttagaattacctcagtggaacacactggtaatacaagcattatatgtagttatatactgctttgactttcatcatacataacaacaatgaaagatcaaagtgaacaagcttccaccatagcacacacaagcaaagccttatactcctttgacttttcatcagagatgaaaaagtcaatcatttttttcagttcacacaacaaaaattgagtaaagcattttatcaaacaccttacaaacaatctaacaaacacccattaatccaaaaacacaaaccaaaacataaaaaagtgatcttttttcttatttacctgattggttggatgaatgagaagataaacacactgataaaagaaagtcccaatagccacacggtcaacggtaacatcataagctttaagaccttcacaagctgttttgagcttcttaacagcatcttcaggagtcaaacttatggctccaacaactgtaatgtggggttcaaattggggtccttcaaactcagctcgaagaccctccatgagtttcttgactctggtgatcacctcatcaggtggaattgcccacactgaataaatctccttctgtattagctctgatgggattggttctggggtagccatggaaattgataagaggaaaagagaaaaacccaggagtccgaaaagggcgaggaatctgattatgtggagactgtgaaacattcatgggaattgttgatgggaaggaataaaaaagccatctttggtgttgggaattgaaagtggtatataattgagtgaattggggtgtgggttttgaaaataataattagtaatgattggttgggatgaggaagaagaagaagaagatggtgaagtagtgaagaggaagatgggttctccttagtttgaggggagactgtgtttgggacaataccatgtgggacacctaagtatactcgtgcactcatatttggttatatttatttaagatatctggttaaattttgagaaatttagaaatctgttttataaaagttattaattggaccttttgttttgttaaatgacaaaatagaccttgtattttctaaaatagtacaaataggaccctgaattgattttttgtcaaaataaagtttaat

SEQ ID NO: 301402 - DNA, 1992 bp, Cannabis indica
ttagggtgcgtttagaaaaccacgatgttattggatttgtgtgtaattagaggtaattacacaatttgacatatttgtctgaccatgtaatacactgtaactgtgtaattggaagtaattgaggagttccaattacactctccaattcccatggtccccatgagaattgaatatacttttcatattaaacattagctattaaaaaatataattttcccatgtaattactaactattttgccaaacaatatattaagaattcatatgtaattatcaatttatatctaaacacacgttgcattataaaatatagtagatataaacacacgttgcattttaaaatatagtgtaattactaaattgtgtaattactatatttctagtaatattaaacttaaaatattaataaagttagagatataattgttattatatatcttgctagtgtattaacatcaaaataaagtttggataagatcaaaagaaatttatttatttatttatttgggcagtttttcatgggtgagggaacattcaattccttgcttcctggaaacactagacatgtgcaatagtcttgtcttaacaaataacgatatattagtttgtttctagctaataaaatcacttatttggttaagtaacaagtaacaaccttactttcagatttggttcataaaagtagtcgaataattccccttctggaacaacccactatccaaaacccagtcttcaatcatagcctgagagttcaaagcttgatcagtgggcaccaaatgaccagcccccaaaacgacgacgttcgttaaactaccccatttctgcacatacccacttagttcatctccattcactttccaaacctttctctctgcgttcaaaaaattctcaatcccttcccaattcaaagtcttcacccaagcctccgtcgaaacgacgccgtctctcagatcaaaatgcccttggtaaagcaaaaccttgctttccttcaccagccattccaccatgtacttcgcgctcttcatcacatcctcgtggagtatttcccccaccaaatcgctacatatctcataaactacggaccctttcactcccaacactttcttaacgtcgtcgttttgtaaaagctcctctaccatctcgtccttgtaagcttccttcttagaaaaatcgtacaaagtggctaaacccgtcatgttctcaagcttttgcagtactctgtttctcgcgtccgtcgcggcgctccagttcccggccttggtcagagccacggcctccgattgaagcatttcgagcacccccttttgcctctcattgaccaaaccggagaagtaaacgtttgccgcgtgagtcgatacttgaatttccggatcgatcaacccgtttcctatcgcgactcctgctaaattaatccgatcccagctcggtaactctgtgttcttcttcaaaatgtagtacccaattgccggaacgtactttcccgcatagctctcgcccgttatataaattggccgagatttgaatgatgagtctgatttgataaacgcctttaaggctgcgaataggtgttcggcgactctggtctgatttctgggtatctcttcgggtttggatgcgacactgaacccggttccgatcgggttgtcgatgaaaagtagaccgaatatccggttccatgaacccgggttgggttcgagtgccagtggttcatcgggttttttgttgaaattgacacgccatggacctagctcgtagaaatttccgatcatggaggagcatcccgggccaccctggagccatatgagaattggggttttggagagagttgatattggtttctgagcttcatagaagagatagaaaatggtggagtcggaactgggattgactggaagatagcctgattttgtgggtagagcttctttggggaagagagaggctgctgaaagggctaattttgtgttgagacagaagaagaagaagataagtaaaa

SEQ ID NO: 301403 - DNA, 2080 bp, Cannabis indica
gctttctcccacaaacatggcagcagatgtagcatggttctgatttcggcaacgttttaagagctgtctcatagtgagagagtcactttgtctcttaatggtatgcatgggtggtaagttttccttgtttatgacagtagcaactatagatggagaaatagtggaggtggcagggaacaagtgtgggccattagtgcttgattgagtggtagaaagtggagacaaatttggagggtaagttgccacggggtaaacaggtgaaacagtagaaccaatatctggagtaaagatgccagatagatgaataagaggcttactagtaggaacatgcatattggagtgtgaggtagagacaagagaagtggggttgactatcacagaaggtaatggtttggatattgatggttgatttagtggaggctgattatgggttgtgaaagtgttatggctatttgttgactggtgcgaaatagatggctgtgtgagttcttgaggaaagtttgtaataacactaaagggagtgtgtgttacagaagcatcatggtgtgttggtggagaaaaagttggtgaaaaagtagcattagtaacacatggagcaggccgagagaagggtaaggctgagacattttcagcatctgtcaataggcttggttgtggagtggctgcagtattgatacgagggatggctgaagtaagagtggtacgggcaagacaggttaagagcggccatacattccctttagaaaagtcagttctatacttatcataacccgttgtaggaagccgtgcccctttcatccatggtccataaggaagatcgtcatcatttccattgtccatacgttccatgaacttgacacatttctcaaaggggtgtccgatcaaaccacactcaaaacaaaactccggtagacgctcataacgaaaatcaatccaaaactcatctcgtactttaggcaggctaatcatttgtccacgaggaagaggcttgttgatcaatattttcacacggattcgaagaaaaggaccccagccctcatcaagggagtcctcatagacatccagaaattcaccaattagatttcctaaggccttagcaagagcttttgatttacttagaaatggcagtcggtaaatttgaacccaaaatggtgtggaagtcaagttattcattgagacattctgcagagcacttggagtgtacatcacaatgaggtgattttgaaagtgccaaggttccttattcataacccgaaatttatcacctgcacaatggaaagaaaccttgaacatatcatccccaaaatcagaaatcacaaccggaaaacggcccttccagtgtcccgacatctggttaatgaaagtcggcttgtggacgtatgaatcagtgagaactcgagcaataaacatatggccggaatgcacatctgcaggggcagttacttcatctgataaagcaaagacagttccttccacatcagtcaaggagagtgttgtattaagggcattctcgataggttccatgataaaagcaaaaggaaaagggctgaggaggaatgaagacagtagcgagatcagaagaagaaaggcatgggtagatgaaggagaaggcaaaccagaaaaaaactgaaaacagaggagaaaacgatttcgaaaagaaggagaagtaagttaaaaagaaaaaaaggtggttaaaatgcacaactgcaacagaccaaaaaaggcacttatacacaactgtcaatttgaaatatttacttacatattataaatattttagatttaaataattatgttaatgcaacatatttattagttaactcaactacttgaaatagaggagaaagaggaagagatagttaccgttagagaagataatgacaggtggcatcatcgtgaaagaataaggaaacaaaagcatgctcacatttttgttagatctctcaatgtggaattattcgcatgtgggacccacactacaacaagaacagacggcttttccttctactactacttcttctcacgccacctcaccaccacattatgccatgtcatctatatcttttctttttttttttaa

SEQ ID NO: 301404 - DNA, 1501 bp, Cannabis indica
ttttttttttttattatatccatagatctttaacatcatcatccttttttagactaaattaatctttagcctttttttattgaaattcaaatgtttttttgagcttttctatcacaataacattgctaccaaacccatcagtaaatgtactcaattattcaaacaatatgcagagtgtgttgttgttctgacaaaagtggccacaaaaaataaactagtttggtgcctacataatataaatctactttcttatcattattttcttgaaatacttactttattcctcttacattttacatatgattgaaaaattctcacacatgtgaatgaaatagaaaaatgcttcataactaattccactcaaatatatatagttgcatattaaatgatgaactataagtctatatacagtctctattaatgtataaactataaagtgatattgtgaaattgggatgtaattgtgctacctaattataatgagtggtgttatttttttttaatatatatacatatatagattactagtacttgatgatattcatatacatacatatatttagcttaaaataaacaggacctaccgacagtgaaattaaatggagaaagaggtttagagatttaaaaatgaaattaaattaaacatttaggtgttcaatgcaaaacgacagtaactagttaacttacaattagggatcttggatagtgattagattcttttttctaactaaagtaaaattctagaaggctgttctttagctgtaaatagtaaatacgggtatgttgtactagtctgatttaattttttcgtgttttttaaaatactggcatgttgtgttgggccataaaaaatatggatcggatcgtgtcgtgtaataattttataaggtaggctcgacacgactagttcgataatttcgtgtcatgctccgactcatttttcttaaatagaccaacatgttttctaattagggtcaaatttatgctctatattttttacatttttattacaattgatgagctaaatactaaaatttgtgtattttataatataaattacttttttttaataattacacacaatcatataaaaataatgataattattacaagttgaatattactatcattttaattgataaataaatatttatcattgttattattatcaaattattgagtattttaatgtgtcatactttcgagttaatctatttgtgcttaaatgtcgtgctttcgggtttgtcgtgtcgtatcgtacctaagtctatattttttgtatcgtgtcatatctaagcctatatttttttctattgtgtcgtgcttaagcacatattttttttatggggtaaataccattttggaccctctgttttgcaaaagttaccaattagaccctgtgttttgttaaatgacaaaatggatcctgtattttctaaaatagtacaaataggaccctcaattgatttttttgttcaaataaagtttaattataatccga

SEQ ID NO: 301405 - DNA, 2025 bp, Cannabis indica
ttttagaagttcatgtttagaatgtttaaaaacatacttgttagtaaatctaggtcctggtaaaatatattccaacagctctcatctcatccaactgaactattcactttaacctaccaaacctagttttcattctctgacaactagtagatgagagacaccttctatagcgatttcaagcctccttaattgttcttcacctatttggccttagtgatagagtgtcatgcccatacatagcaagtcaagtactcaattatagtgcgaaagacggtggtaatcaacccgaaggagagaaggagatctaggctcagatcttgttattactctgcgatggaaaggaacaagggtagagatctgagtggaaggagacatattattctgctgcaatcaatgtaaggttttctaaactctgatgtgtttaatttcatagtaatagaattcatatttaagatgttaatcaacatacttgttattaatctagatctcggtaaaatatatcccaacatgactaactagcatctgtcacactctgacatccgagtaggattgtggagaagatgtccgaccaggtatggacatgtctgccgagctacatatggaagatggcaacatcgaagaataatctcgatgtgtccagacgcgaagacaatccctataatcgtggggtggagttagagaaaaatgataacataatttaatttcctatttcttgaattgcaattatggaattaatgttgtttcctattttattcgttgtaaacaaaagggaaaccatccctcatgtaataagttcctataaatggtgacctagcctcactatgaaagggatcgagagaattgttgctaaaatatattctagagagaaaagagtgatctaagagagaaacatactcatagatcatttgtaagagctttcaagaggaagaacactttgttccttctctcaagtcaatacaatataaagggagtaggttattaccacacttacaaggtcgaacctttttaaaatctggtgttcactttactttaatgtttttgctttctcttaattacattacttaatcactttattcttgactcactgtcgttggctagaaacgagatcaacaatcataattaactaattaattattattaaactgctaataatctactaattttcatacttaatcatgcgacccttaaaaatattaaataaagaaatctataatttattatcactaaatatattttagttactacaaattttaccatagtaaataattaacaaaattttgattaaaagtattttaataataactcgtaaataaatataattgtttacccacaagtaattaattcttttattgtagctagagtatcctttcgtaaaagataattgttgaattatttttattaagaaaatttacacaatacactttaaaaatagactttatttttacatttttatggacctttattttatttatatttttgcggatttttttttacacgttttcacttattttttttccagaaaaaaatattactataagatctttggcgcaaaaaggagttgatctgtatcatcttgacttgtatctgaatttctttatttttttaagaatactgagtcgggctcttctcctactcgtatcgaatagaaccctgtagcagcaatgttaaaacaacattgttcttaaataatagaaaactaatacttcgtattgttgttaaaaaaaaatcacgttgctttcccatagtagcaatgtcaaaacaatggtttttcgaaaacaacactcagtatttttgtaaaaatttaataaaatccttaaaaatatatataaaaaatagtacatccgtgaaaatgtaaaatttttgccatttctataaatgaaataatccattttaatagggccaagatgcaaaatggcccgaaatctaacaattaagttaataaatgtccctttttaaaaaaaaaattacaaaatgtcctagttaaaaatttgatgataaattacaattataaccttgaataattaa

SEQ ID NO: 301406 - DNA, 3062 bp, Cannabis indica
taaccccaaaaaaaaaaaaaaaccattgtactttgaccaaacaatctttgcaggactctttctaccctgttgaccaggatggggggctaaataagctatacaaaattgttgggagtgtgaagtttagttgatcatgtgataaattttgaaaatatttaaatgaattcttcaaatttttaatgctaagatatatgaccagggatcgacaagctttatttaaatataactttataatatcgtaaattttaataatccaagaacaaaatctgaacaccaggggaacaaaccaacatgagatttgttgaatctgtatattcataataatattctacggccgttggtgttgtttacctcaaaagatgtatattttcattacagaaaatatactatattcacatacatgcgtcaacaatgtcgtaacatagcatataaaaaatgtactacataatttttctctaatataatatgctcaattatatgttggataatattttatttttatatataaaaaaagctggattaattaaactaattacagaacatggtagagaactcaacttactatttgtctctttcggagttctactactcgttatggctgttgaaagtcaatgaataagattttgggttcctaagcagccaaattgagagggtttagattatagactttgtataagagaaagatagagagagcaccaaaacgagaaacagtcttcgtcgatagataaattaaaaaagccttattcaaactttcaaccttgacattttcattaattgactttttgcttatattgtataaaaaaactcttgtactataaataccaactacccacaataggtattctccattcaaatcctttcaaaaccattttcaacaaaatctctagcctttcttttttctctatttatcactctcagtaatttgatctgtttatatataagctagatcaatagtatagaatggtcacaattcaagcttcaagcgcggtttatataaaggtcagtagcattagctgctcatcccaaacacgacgtcgttttggagtttcccttgctcctactagagccattcttaacctaccaaaagtgcaaaaccaggcaaaaagtacaacaactaatccattactttctcttcaaaaaatcccatactctttggggtttcaagatatggatatcataaaaagatcaaatcttgattcgtcgaccatacaaatggaaaagatgtatgcgattttggagtctgtgacggacagagtggagatgcataagaacattggagaacagcgtgataattggaacaaactcttgttgtcatctgtgaattcgatcactctagcagctgcaacgatggctggaatttcagtactgtcatcaccctccatagccctgaaactctcctccacgattctctatttggcagccactggaatattggtgatcatgaacaaaatccaaccttcacaattggccgaagaacagagaaacgcctctagattattcaaacaactacaaacagagatccaaaccaaactcaccattggaaacccaacagctttggacgtaaatgaagccatggaaaaagttttggctttagataaagcatacccgcttcctcttttgggcgccatgattgagaaattccctgaaactgtagaatctgctgtttggtggccgagaaaaacagagcagaaaaagcaaaaatcacaagaaactggaatgagaaacgattacaataacaacaatggttggagtccaaaattggaagaggaaatgagagaggtttcaaagattatagaaagaaaagacgttgctgattacttgaggcttagtgaaaaggccttgaaactcaacaaaatgttggcgatttctggacctgtgttgaccggtttagctgctgcagctacggctgtttccggtggttttagcagtactcatggggtgggagctgctgccacggtggtcggagttgtggccggagctttggctagcgtggtgaacacattggaacatggtggtcaggttggaatggtgtttgaaatgtataggagtaatgctggtttcttcagactcatggaagagagtattgaatctaacttgaaagaaacagatgtggagagaagagagaatggtgaagtgtttcaaaccaaggtggctttgaagcttggtcgaagcttgtctgagctcaaaaatctttcttcttcaagttcaagatatattaatcctcatggttcttctgattctgaagagtttgcaagcaagcttttctaagattaaagtatatacactcacattatatagtcctaacgatatatgtaattaatagttaactattccttcattttttaatttgttaacttgtataaatatacgcaacacaaatttgttaatggaattgtgattatttagtattatcattattgattgatcttcatgaggaagttacaaattttacaaaatatggcttagaaaaaagtaaaaacgctattttatcgaaaaaattcaattgaaaaaaaatggaaaacaggtaaggataaccagctaatatggagtcaatcagatagtaaccagagtaatatgctttatgtgaaaattgattatgtatctttaacattgaaggatgaaaaatgattttcgtccctacagagccgatccttgagatgagttagatccaatacaaagtttattactttcaatattttttttcaataaaaccttaataatgtttgtatataaaatggtatttttgaaaaaagtggactttttgtaggtagagaaaatagcatttttgaaaaatgacgcctcattaagtaggaatcctaaacaacggcctggtccgcatgtacccaaaaacggttgtccctactccattccccccatttaatcacagccttattaaaaaagagtttttacagcacatacttaatttttcaattttttaaggaaatttaaaaaaaaatattaaaatttgagttaatttttactaaaaatactttagacacagaatttttttcaaaaattaactgtatttttattaaaacaacagtagaacacaaaacagaaca

SEQ ID NO: 301407 - DNA, 2385 bp, Cannabis indica
aaaaaaaatgactatttaagtagttttgatgtttattttttgaaaacaaagtatgcattgttagaaaataaaattttgattagtattaatttgtatattttgttgggaccgtcatgtcatggataaaatagataaattataacgagtggcttatcggctgattcctctctttcaatatatagtatgttagtttatcagggattgtgtctagttattcctaatttaattatttggagatagggttatgactatatgatggagtctatgttcaaattttttattgtatgagcttgttatcttatccccagaatgagataagataagaaaaaatttataaagttacaatgagaaatagtagtttatattattgaaagtactaactatgagaatgaaccaagcctttttagctaagtgggggtgaaacatcctgaatggttgtcaatctctatgttgcagagttcttgaatcgaagtacttaaaaggaaaagatttccttaattgtggtttcaaagcctcagattcctggttttggaaaaacgtcattaaaacgaagaccatcttaaagaaaggtgcttgcaagctagtggggaatggaagagatactaggatttgggtggatccttggatccctcacttaaaagattttatcccgaagccccttatttctcattctgtggatcatagacttgtagcggaattgttatctcctaatggtgggtgggacatccacaaattgaatagcctgcttgatcgtgagactgtagcggcaattctaagaggtggggctccctctggtgtggggcttgataggtgggtttggacgctagagaaggatgagcgattctcctgcaaatctgcctatctagttcaagccttggaaagagctccctcatgcgatgtagccctctctctctggaataaactctggaatagtaaagtgttggaacgacacaaggtgctttggtggtgtatcctctccaaggctctccctctcagatctattatcagaaagagatttcatattgaggatgtgagatgccctctatgtgggagggaggaggaaactatggaacatttatttctttcctgtgaggtggctcatcatgcttggcgggcgtctccttggggcatttatccgatctgtgagacaggtatccggatgtgggactgggtcaaattcatatgggatctgaaacacaaggagattgttgtggaggaggtgtacttgtatgcgtcaattgtggtcgacactatttggcgcattcataatgataaggtccataataaccttaccttgaacttgatgcaaggtattgactctattcgattttcttatgcagatttacatgtgctactattttccctagtcccatccctaacctgaaggagaactggtctcctcctcctcaggattggattaaactgaattgtgatattagagtggggcttgatagcatgtgtttagcagctgttaccagaaaccatttaggtgaggtggtgcgtgttctaacgtctagaatggactttgctgatgcgttttgtgggcaagcggcggcttgctgtttggctatatctgcagcgctggaagtgaaggcccaatttgttattgtggagagtgattcgagggtggttatcaatgcactcaatgggaaggagtccagttgggtcattgaaaactatgtatctttttgtaatggtcattctttcttattctcttgttgtattttctctaatattaagaggacttgtaattatgtagcccatatcgtggctaagtgggcgtttacccacaagatatttggtgatatcccgttatccaccatcctttcaaacattttatgtaatgaccgagaggtctaatttattcttaatctaagacgaaaaaaaaaaaaaaaagacttatctaaggtcagactcttattgggctttttagcccatcttttattttttttttccctttaattagactttaatctaagttaggccacccaccttaggaagtagaaggccattttggtactaacttaggaacttagatctcaaattgaatttatcactatgaagaatttgtaatatataaatttttagcattttatagaattcattttgtaatagcttatgttattatgtatttaacctgacgatgatgtgtgaatatacttctatatgtactttctccctttgtttttattcaaatttacgcttaatatgtggtcacataatcgtaggagatataaacttcgatggttttaattaaggttatttattttctattttatagatttatttttgttctttttttattttataaatagtcatgataaattaatatgttatattaatacatgagtatgtatgtgttgaccgagattttcggcaactatt

SEQ ID NO: 301408 - DNA, 2739 bp, Cannabis indica
tgtcataaaaagacttagcagttcttcccaagtaatttgatccacgtgtcccctcttgattggtccacgtacattgggcgattttaggagcaacagttttcaatttagttttacatataattttcttaatcattaagttttaatttaattaatttttaaaaatatatattatgtttttttaatataaaattatacctattacactgatgtggtaattgattaagcaatcatatcatattttatttatcatgtgtgacaaaacttgatagaatgactaatttacactattgtacgtaaatagttcaaagaacattgtaacgacctgaaaagttcaagagtataataatacgtatgtcatagaggcaaaaaattttaatagccaataaatataactcgatctctaatattgaaaagattgaaaaaaataaggaagaaaactcgttttacttgtacaattttcgtataaaatatttattataattatttaacccttatttttttttaataagctgctggttcaaaatctctctcatggtgttgaactatcaccgtctatgaaaactattttgtagcaaccgatctataggcctccaaaatataagccataagttattttttaattaaagactcatattgatttgatcatcatgtatgtgtgtatatatactttatgaccaagtttttttttttttgattcaaactttatgaccaagtttggtttatatatatgttttacaatatactaaaatgttaggtgatcacacgtaaaagttaaaagtacgtcatatatatatatataaaaaagaacgttcctaatttataataaatgaatattctggtattttagtattaatataaaattaaattcgtcatactttgcttgcaactccatcgcaagtaccttagtttcaaagctcaagaataataaagagctagaaatgcatgatctggtgagtaagtactagaattcaaaaggaaaatgctgtgggcattacatgtatatcgtcattgagttttcaatatttttagataaaaagaaaagaaagagagttgtcaatatttttagatcaaaaagaaaaagagttttcaatactcactatacagtaagtagtactatatcagttcgtttagtatatgtattaatgtattagttttatttagtacaatattatttttaatattgatttgtactaatagattatgtaaaattacaaattgtttaagggtaatttgcgatcaaactctttagacttttaaatttagtatgatttaatcccatactgaaaaaattatgactaaagttccctacctcgtattggttaataatcttttggttagttttaatcataccacttggttgtaaacacaagtgtacacgtggtaaaattttattgggccacttaatattaataattaaaaaataaaaaatatatttaaaaccaccccctacaacccaccaagaagaagcagaaagaaaaaaaaaggaaagaaagaaaaaagaaaagaaagaaagaaaaaaaagaaaaaagagaatttttttcttttccaatttttaaatattttaatttatttttttaatttttaatattaggtggcccaatatacttgtgtacactttggcaggtctatttggcacttaatagccaaaaactaacccaaggagtgctggccaaaacgattgtggatgtttgggacttgagccataatttttctagtatggggattagatcgtaccaaacttaaaagtctagggatttcggtcgtaaattacccattatttacaataaacttgaccccaactccaaccatggcctggactcagtcccagacccataccccgcatccagaatatgcctgcacctggaccctagactcgaacccaaacctgaacctcaaacccgaaccaagacctggaccccagactcgaacccagacccaaactcggacctcggacccagaccccgacttgaaccctggactgagacttagacccagattcgaaccgcagacctcgggttcaggttcgagttctgggtttgggacctgagttaggttcatggtccagggcctggtctgggttcgagtccgagtctatgtccagtgttctaggctgggtctggggtttgggtcggggtccagggttggggtcggggtctatggtccttgtttagctctaggttttggttcgagtttgggtcaggatcaaggtccgagttgggctcttggtctagggttcgtgtcaaggtctgggtctggggtttaggtctaggtctaaggtccgagtaggggtcagggcttggggtcgtggtctggggtccaggtttaggtctgggttcgagtccattgtcagggtatgggtgtagggctggggttgaggtcggggtggacccttataatgccctaactcctagggacgccacatgtgtgcttttgaaacataattttattggaaatattttaccaagatctagatttactaacatgtatgttggattataattctataatctaacatcctaaatattaatttcctaaaacaataaattaaacacgtaaaaattgttgtataccttacattgatggcatcagaataatatgactctttccgttcaaatatctaacccttgatcctttctgttgcagagtatgatcaagatttgaacctggattctctttcagttgacaattggactacatagtcttcctcactatgctgagtatttgtaacgtccccgcttc

SEQ ID NO: 301409 - DNA, 1212 bp, Cannabis indica
ttggtatgtaggctcagtcatcaatccaagaagcagccagagtggtgtactcgtgtataagaacttaggtgttatgaatattttattaaaacaatccatttaaaattctgaaatagtcgatttcttgatatagccaaaaaaacaataattttatttattacaattaggtattattaaatctcataacagaataaataatagaatttttgttatgacagttgggaaacaaaacctagggagctgaattagttatattcactatgtatataaggctctaattacttctcatttcattcattctattccctcacaacggtaaatagagagattatctagagagagagcctttgagagaacttatgtccactgttgagagagatatctcgaagcaagacgccattgttgtatagatttgagaactcgtgttaataaagagaaaacattgcccttgtagctagtttgaccatggactagagtggtgtctagccaaatactcacatgaaaaaccattctatgtaataactgatgtttgatcaattgttctcttgttaccaaaattcaacatgattctttatataaacgggtcaggtcagatcaacccggtggatttaggttttactttttgacacgattaataaatgaatcgagtttgggtttgatattttcttgtaatacttaagcctcgacacaacatgaacacgacccacaaacacgaattaccatctctaaatgaaagcattccataaatgaggacatttttttttatttatggagtgagggcattcataaatttatattttatggaatgagtacattcctcggatgaggacatctataaatttaatagaacgagagcattccataagtttatattaggtagagtcagggcattcccataaatgagtagtaaaatagagaagaataaaatacaaagtaaaagagagggaagaatgagagcaatctatgaatacttacccttgaaaactgaaaaaagggaagaacaacaataacagtaatttttttctatcttcatttttttatttccaaagtgtctgactcttgtcctcccattgttagtttgatattttttctttatagacttcaattttttttaattcttcctcaccagtttttttcatatttataattattttatttatttaataataataaagaaaaaagtagttcaacataattattaaattaaaatat

SEQ ID NO: 301410 - DNA, 2489 bp, Cannabis indica
gtcttcaattttcataaatgtaatctcatactcggtcaatgtgggatcctaacaaaatatcactttaatctaagcaatcttcctttcacatttgtgctacttattaataaagcaaacagaaaaggttgattccatacctgttgctgacaacaaaacctcatcaccaccagggtggtcctccataaactttgtcacatcatacacctgttttcaccaaaaaggaagatcagccctataaagcttttcaatgatttcatcttacaagtaaagaggacccccataattgaatttaaattagttttaaactgaaagatacgagaccctctactaaattacactaatagcctacggtgttgagccttaaaacttagacctatgcctcattgccctgcagcaatgtgcatttatacacttttaaaattaatactgagctataacagataactgttttctgtttaagatttcggtagggacatatgttcttatatttcactttctgctcttatattttcctgtgaatccaactcactaagaaaagttagagaaaatgagagccatgtcaagatggttcaaatttggttgtgtgttgtaagagatggggttcaaacccgagctgggctaatgtaacgaatggaatacaagtgatcgactacaaaggccaccgattgtgtatagtcgaaaactatatagattgatcaaacctctaattcctcatggatttcatagaagtaccataccatcccaaacaaaccagaagcatgagaagtcatacttctaaatatcgatttgcttaaaagcaatgccacccgtaacacaaaactacaaatcaaatattaggatagccttttcccaatcgtttggaatctagagttattacatatgtctccaatcccaaaactaagagaccattttagtcagatccctcctagaacatagaacataacacaagaaaacatctaaacagacactcttaagctaagcaaataaacaggcagaagtccttatatttgaagcgttttctattcttgaaacttatggtcattgatgcagctcagcttatctcatatgaagaaagtcaggaactaaaatggaaaatcaacctcacaagtcacaaataatacaagagctgagaatcttctcaaatacattatcaatcttcgaattggatcagtttctcctcaacaaataagttctcgggccaaaaattggagaggtgacaaaacccttctcttgttatcatgttctcaacaatattagggtgcgtatcgttggggtaatggaatggaatgggaaagaatcaaatttcatttcattcctttatttgattgaatgttaaagtactgtcattgtaatggaatgaattttcctctatttggtagaatggctattccatttcgaaataagtggaacggaaattaataactttttatttgcattataaatttaattttattcctattctttatttcattctcatttgtattattcttatcttttcattccttccgaccaattgaccaaacatacctttagtgattatctaatgatctaatatttaacactggagaaggtcacaagaaaattcaggatcatacaagcagtaattaatcataagtcataacattgaagatacaatacccaaaccagaaaatcaaaatcacaacaaaagattctaacttaaatcaacaaaacaaaagtccaataatagatgacaaagcaagaatctacaactaacaactttttcttcttcagtaagtttaagtggataatgaagtatgaactaaagtcatataaatgtatcctagaatataaaaactcataacaatgagttaaatcacatacaaaggctttaaaattcacttaaaactaaaaaaaaaatccaaactttaaaaaactcatttagagacttaaagaaaagtgtacgtatacatacatatatatataataattaaacaaccaaaagtaatagttaacatgtaatgtaatccctcatcaccactcccacatgcaaaataacattaatgttggcaaaaagctactttttttttcaaaataacaatttgaacaaatgaaatgccaggtgagatttcaaagaaggggtttttatttttagtggcttcaagaaattcaatcacaaatgtaaatgcttttatactctaaatgggatcagaagaaaaacaagaaacaaaatcatcaaaaagttaaaagcttgggatcaaatcaagaaataggaaaagatataaccttgccattaatgattagccaacagtcctttggtgtgctgtgttcagaaacttgggccaaagtgaagacctttccatcactacccatttggctcttctggctatttttaggttggggagtgagaatatgaagatgggtatggctcaaatcagattggaaggctaatcacctcaatggggtagtcacagaagacctgtaaatgatagtagtgagtgagagagagagagagagagagagagatttag

SEQ ID NO: 301411 - DNA, 3297 bp, Cannabis indica
tttggttgtattttaagtatcaaaatgtcattttaatagaatgtcttttctactattttggtacaatgactatttattttgaaatttaaagaaagatcattataaaataatatgagaaaattttaataatttttaatcaactttttttatacattttaaattttattattctattttattcttattgttatgtttttatttctctcaaatgaacgtcacctaaagcataatttcctatattgttggaaggagcatagatgcccaaattttgctacaataattgagttgttgcaccatctatttatatatttaattaattttgggtaataacctacatttccatttcatgcattaagattaaaaagactctttctcacatcacatgccttgctctatccaacacacatacaaacaaacaaatcagctaacagctatcacggaagtcgagcaacatggtggggtccacattcttacccaccaataaccattgcatctatcaactgtgtcaaatgcgaccaccgtgtccccaccacctttcaatcctgtcaaatcacttacagctgtttctgccacctcacccaatccccataatccacatacatacctacacatccatgcatacatacatacatacatacatagcaatagcatatccatagcataataatattaatttttttattaataattaataaatgaggaaaagaaaattgcgtagccactagccatttctcctctttgcatacagagctttataaaccacctctctagctctctcacaaacactactctatattaaaacaatagtgggagaaaattgtggagagagaaatggaaggatcaccgtgtcaatctgatatttgggtttcctctaatggcagttttgagcagaccccagatgagaaaagcttagcaaagcagcagctatggaggacgacgagttctgggtctagttcttggtctgggcatgatgacgacgaggaatggggtgggttgaagaatgaaagaaagaaaagcaagaagaaaaatcaggttttgcttgaagggtatgtggaggcggcggacgaggataatctgaagagggccaagagcttgacggacgatgaccttgatgagttgaaagggtgtttggatctgggatttgggttcagctacgaggagattcctgagctctgtaatactttgccagctctcgagctctgctattcaatgagccagaaatacatggacgagcaacagaaatcgcctgacaattctgtgtcggcggcttcggattcgtgctcttcggtctcgagtccgatcgctaattggaagatctctagtcctggtgagtcactcggatcaacgcctttctcatttcaacatttttctttttcttgtcttgtgacttgtttggctgtaaaattgattagaattttggttctaggatcttcatcaatgttttcatatgtatagatcaaaacatggaatggtttacttgttgtgattatcagaagtcctgaccttttttttttgtttccttgtctaggtgatcatccagaagatgttaaagccaggctcaaatattgggcacaagctgtggcttgtactgtcaaattgtgcagctgaattcagctacaaaagcgctgaaaagggaatccaaattcttttaaaaggcgaaaatggaaaaccaacgtgatctcagaagcctggaccttcacgtggagctttttcttcactaatgaaacttctcagctggaagagattttcatgtaaaattggataatgagaattctggtgatgatggctgatgggtctattttgagggagaaaaagaagaatgtttcaggtttgagattgatcaaaataagtctgaattcattcttatttagagtcctaactcctaagatgttatcttcgtaccattattgtattttgtattctttaaataataagaacaataatatgatgaataagcctttccgtcatctgaaaaaaaaaacaaaaactctatcatgtgtttcattttgttcatctttgtgttgagacaaatttccaacattagttgatggttttatgcagcactgagaactattcaattagagcttcaacaactctactttgctcaacctcagtctgcattctgctgaggtaactaacctaactgttttggtgaacattgtgtttccctcaaacttaactttgatcttgacttgaacctttgatgaaagattatggtcatgatactaacaaacctttaactctctttgactagttatgattgtccattctgggctggtatctggaggcaggtggaaatggaatgagagggaagattgtgaactttgttttcttgattgatttcgaagtttgttgtgttcttcctctcaatttataacttgtattttagttgtttactataagggcaagtgtagagtgagatgggggagattgtgaacattattttcttgactggtttcaaatttggctgtcatcgtagatgattactggaggattctagtctttttctcccttgtgattatgtgaagaattggatccgagaattgagacttgtaactctgacatacatgtgatgattgaactttgtataatctggttcttatgggaattggcagttgaactttttgtcatgaaattatataaataatcaaatttctattgtttgtcatggttaaacttgcttgttgagactatatcatgttaacttaggttaagtacttgtaggttaatgatatagatcattttatatgtttctgatactagggttctgaaaggagtcttaaagagtaaagggttacatacatgagaaagtaattgtgggtggatgcacaggatcttcattaggaaaatggggtcaaagcctctggaagtagtacaggattcagtttagttcattctagagaagaaaagagcctcaacttctcggtttaattcctttaaggaatggatgtgggattatatttttggatgttaaaattagaatggattgaattcttataatagaaatgtgagttgacgctgagttttcatgcgtaacagtctttgagattttgctagcaatttagttctaacttaaaagggttgtgctggaatcaaatatcaaagatgtattaccataaaaaagtattaattgaatattaaactttgtataaagttttctgaatgtttgcatgtttgacatcataactaaaaaactgttttttgtttttaaaaacagaaaattgtttttaaaaataatttggcttgtttggtcttgttttttaaaaacagttttgagaaaacaaagttacaaaaaaa

SEQ ID NO: 301412 - DNA, 1296 bp, Cannabis indica
ttagtttttttttttttgcagaatagctttattttgatattattttgcaaaataataattaatttgccaaggaaatatattagttgattacttgtaaaattaaaagggtaataatgtaatgtagtgcaggccatgtgattcaatcctgagttgtcttggttgtggcagatggatgttgtttaattttgaaatgagattcaacttaaaataattaattaattaatactagaatttggtttaggtaaaatgagagcatgtcaccttgtgcatcatcaatgctattgttaagattgtataccaaataatttaatataagtgttgatatttcaacaacaccattttgattttgttgttattaataaaaaaaaataagacatcttaaaatacttattttaaattgtgtcattttgtcctaaaaaaaaatgacattagttgttaaaaaatcaatatgtttgaagtattgttactgtaaaattatgcatccggaactattattgaattgtgtttttcaaactattactactattaagtcgtgtctttaaaattttgagtagagaagtataaaaaattgtaataaataaaaaatattaagaatgactaattaggcatggttatgaaaaacaaccactagtatcacatatggttaggacctttttagggtaacaaatatattagggttcgaccacgaaatgccacaatttacatatttcatgtttctctttgtgtggtggtatctagctcactttcaaagttattttcgaataaagtataagcaattacaaattcataaatattattgttcttataaaataagaaaattattggaagaaaaagaaaagtaataggataatagattcactcaaacatattaataaaaagattgatactctccatccttatttgttcggaataacgaaatcgccttttaaaaaattattaaaaaattacttgaaaaataatttaataatttcgtagatgaatattgatttatcattccatttctttatatttttcatcttctcttaactattcatcttctatattctccttccatcttaccaaacatattcttagatttgtatttttcactctacaatttttattttcttttttgttaatacagtagaacctctatttaagaatactctattcaagaataacctctaatttgttataaaaaaattaagtcccaatttgggctagttataaataagaataacatctaaattgtaattagttatactttttcaaagtcccatattaataaagtatacctctatataagaataattacat

SEQ ID NO: 301413 - DNA, 1412 bp, Cannabis indica
agaagtacatgattaggggtatttggatttactaccattagcatcagtaaacctttgatagaaatccaaagaccatctccttattgaggaggcactgatcgtgaacccaatgattcctactttacaacatccgccaaaggcggtaacgaaaatctttaaactcctccttcataagctagagaatacactcataaataaagaaataaaagttagtcccaggaaactcagtgtgcaagacaaagggagcctaaaaaaaataaggtatagacactcacaaccccaaagagcatgaaatatagtttcgataataataaaacgcactgggtatctagtatcactcggcacaccatgcttggccaggttagccatagttggaatccaattcaaactagctttccacaaaaagatatttactttcaaggggacattaagagaccaaagcatgtaccacatttagaattaccatccaaactaaaaacaaatgacctccacccaacaatctaatagcattccaataactagttttcatagaataagtaccggtcacattataatgccaaataaggtgatcatggacttgcaaggaccttggaatagatggaatatgagaagcttcaccatagaggatcaactaaagcagaattccaactcccatcttccaacaaaaaagcactagcaatagaaacactagggtgaccatgaaaagaatatgaagtaaatgcaatcgatttagggtttcaggcattagtttttaaatttacctgagtatcatcaccaattaaccaccgagcacatcaagaaacaaatcctttcccccacagaatactcttcaataaatatgttcccttacaggtttcaacatcattaaggaaatatccattgggagagtaaattcccctcaagaccttagcagccaacgactcaggaaaatcatacatacgccatgcctatttagcaataagagctttattaaaaactaaaagatatttaaagctcatatcgtcatcagaattttgccaacaaagacgtgcctagatacatcagaatttgggctatatatttatcacttttttatttctttttcaatggtgccataaatactatttttaactccaaacaaagataaaattaaatccaaacaaaatattttcaatatacaatatatcaaactaatttcatgaatatatttatctaaaactaaaatttagttaattcgtagtttctttaataattgatacactttttctttattacttttcttcatttctttttcttatttatgccataaaatattatttttcctacaaaattaccaaataagttgtgcaatctcatatcgcttggggaaggtcaagtgtgattattctgagactgtgtaggtatgggactacacaattgaagagggcttaaat

SEQ ID NO: 301414 - DNA, 1442 bp, Cannabis indica
ttttttttttttttctttttcttttcttgcttcatttcgtaatttaagatcatttcaaataatactgattggtcaatgttcatggatgcctatcaattgtcttctacaggtgatcaaacccgagttgctcaaggaaggatttgagcttgtaaataggtaaccacttatcttttcaccacctcttaaaaaaaagttagataattgacttccaccatctcaatttaatttcaagcctgaacagtgaggttactttggttagaagaaattcctcatacacattgtaaaatgaccaatgtactttctctttaaattttgatatagtatgcattaaacttgtctacagggaaaatctggaagtgactgatgatgtgtctatagtggaacaccttggacatcctgtatatataactgaaggtgcttacaccaacatcaaggtactaaactttcacttttgttgttcatatggaagctataattctataaaaagtaatcaagtttaaagtggtccctttcaaaataaatatttaaagtggtcaaatcttttgcaggttactactccagatgatttattgcttgcggagagaatattgagtatgaactctgtgaaggctgttgcataaatattcattttttgttgtactttcacattctttgtaatctgaaaataatagttatgaggaaatatttcttgtgaagtttgcatctatctatagccaatataaaataataacattaaagggtatcataggacttaagtctaactactaatgagtaaaatgaaacaaatagtacaaatatgtgacagcatttgtagtttttttttttttttttttttttgttatgaatgacaacatttgtagttgatctacataaattttaccacctattgctgattatttctatgatatgcatgctacttttaggactcttcaagtgagaaattttataaatggctctttcattgggctcacaatgatccgacagtggttaggggagttccattttgtgtcgtgggtgagctgtggaattgtttttaaagtaatttgcggcataaatatttaattttaacttccagttgcaaataaatatttttttttaaaaaaaataaaaatttaatgacttgcattaatcagggattgggattgtcccataataatttacttaagactttatagtctaacagaatttttaaaattataatttatgtattattaccgctaaaaattaaacttatgtatttatttgcaaccaagagtcaatatattttataactagtaaactatgggagtaaatggtcgtgcctctcggttgttcactataaaaaaattgctacttttagtgacaatcttttagttacaacataaattttttgtgactaaatgtgacttttagtcacaacaaaaagttacttgtgactgaaacatagtatttaattacaagtt

SEQ ID NO: 301415 - DNA, 1265 bp, Cannabis indica
gtatcaatgactttgcatcaattatttctatccaaacaaaaagaagagtttcctcattcaatggattccctatttctttattaatttttatattttcattaccaaatgatattaaatatcccttgtcatgcaattgcagggaatctgacttaatttctctctctcttttaaaatacgacaagtttcacttattgaaactgacccagtgtttttaatgattacaatatccttcaaactaaaacttaacgtgagcagttggtcaacaaagaaaagactgtgaaagatcgagcgataattcatcacagtttttccatttggtgtaaatggacctgtctagtttataaaaccctttaaagattctttctcctctctccaaattagccaagctttggttatgagtaatgatcatgtatctataatagtgatcagttaaaaaattgtgatttaatttaattttgtgtatactttaagagtggccattgatacgatgcagtacatgcaaaagagataaaagctttttattatttggagaaaagaaattaaaattataatgattttctttggtaattaatatacttttcttttcagtcgcactttatctctttatattgtttacaatttgtaagggtaattttgtttgtgctcaattcgtacgtacgtagtcagttgcagggatatatgtttcataaagtgaaacgacaaaaaccaaagatagaaacgttgaacaagagaattgttgtaagtgacactcaaaaaagtgagcaagttcattctttatctctttagaaaatatgggtacgtgcctcttacgtgtttttggactgataatatatatatagagttgcccataacttcatccataaaggaggaacagtactaagctagattttgataaggagtataattgtagtataaaactgcattgtattacatagttcatagaatttttccaatatagtccaacaagtcttttttttttaattattttatattgaaggagaagatagtcattcaacaaagactaattattacagagaggaaggcaagtccaagacaaggactcccaacatagggtacaataagctttaatatctacaacatacttagcgatacaaagagtgaaggttcacatctctacgctccaaacaaaaataatgagttcctaagctcgaaacaagcctttgtttaattaattcccaagtttgacttatattaaaactataaaaaaagaaaaaaaaaaaaaaaaaaaaaaaaaaacgaaaaaa

SEQ ID NO: 301416 - DNA, 3361 bp, Cannabis indica
ctctctctctctctatatatatagtgtttgtagtgaagaaagtttccattttccttatggcgttggagttctccagctgcgtggactctggacttcagctctccaagcgaatatactacgggaaagaacttcgtccccctctagctccggcgacggcgccgccgcaagtggaggaacagaagatgacgaagtcgtctccggcgatggatgaatatcttccaacggcgccgatggtgtacgcggtggtgccggagccggcgatcgtggacaatcccgacgtgccaagctaccagccgtacgttcacgggcgttgcgtgccgccggctttggtaccacttcacatgcacggaataaccatggaaatcgatacttttttagatacagcgttcgtcaccatcgccggcacgtggcgcgtgcattgcataatgtcctctaagcgctgcgaatgccgtattgctctgcccatgggagagaaggtataatattactactgaattaaaactttcgccttttgactttttgacttcctctgtttttttctcccttttcctgaaaaaatgggctttatagcaaattattagatttggattgaagaaacaaccatattttttgttggcttaaaactttcaagattatttattttagcgaaattctcaataaaaaacccatgatgttctaacagggttcacttctaggtgttgaggttgaagttaatggaagatcatatcgtactcaattgatcggaagagacgatataggaagagtagaaaaagtgtctaaagctcaagaaggaagctttctcagatgccaaatatacaccttcaaaattccaaaggttatattagtattacttctcttgccacctctaaagttattactgtccaaaaaaaacatgattctatattttcttttctttcaggttgaaggtggttcctttatttcagttaaagccaattggtctcagaaattagtatatgaggttgaccagtactgcctccgggtaccttttagttttccttcatatgtcaatccagtggggaagaaagtttcaaagagagagaagattttgttgaatgttaatccttgcacagccacacaaattctttgcaaaaatgccagccatcctttgaaggtaaaaaaactgtccatttacttttggctttttgtgttcagcttcttcatgtataaatttttaaactgatgtgtttttagtatatattttttctaggacatgaagcgtcaaggaggtaaattatgtttctcatacgaagcagaagtagttgcatggtcaaatgcaaacttcaatttttcatacactgtaagacaacgaacaatttagttgttttataagttggattgagccaatgctaatgtgaagttaaaattggtttgtgatggtgttgcagctttcttctagtgacttttttggtggtgttctattgcaatctccatctcttcttgatgctgatgaaagacagatgttttgcttgtatctatatcctggaaataaacagactaggaaggtttgtaatcgtcgaaagttactttagtctttagctgtgaaattggggtttaagcattgactgtctatgtccattttctgtacatttgataggtatttagaaaggaagtggtatttgttattgatacaagtggaagtatgcgaggagaccctattgagaatgtaaagaatgctctactggaatcactttctaaccttaatccccaagatacgtttcaacattatagctttcagtggagaagttcgattgttctcacaaataatggagctggctactgatgaatcaatattaaaagctacagaatgggctcacacaaatcttgttgccagtggtgttactaatatattactaccaatggaacaggtaaggtgactttatgagcagagcaggtgcaacattattgttcaattttactcttattatggcttggcttgatgtataaatttcaatgttgtctctttaggcaatcaagttgttggcaaaaagtaattcgattcctttcattttcctcattactgatgggtctgttgaaaatgaaagagagatttgcagcattgttaaaggttatgtcacaaatggggattctgtttgcccacgcatatgtacatttggcataggtatctctattaccaaatttgtaaagtcttccttttttaattagttcttatttttatatttttgttggtaatgaacagcctgtttattcgtttttataattgcacacttatttattatgtgaaacaacattccaggtttatattgtaaccattacttcctgcaaatgctagcacagattgggaaggggtattatgatgctgcgtttgattctggttggtttctcctcccttattttactgtgttcgatttctttcactagtgttggcaaaaccaatttcatgtaattcagaaaatttatcagtaaatggtgatgttaatatctgaaatttctaatatcttgttttttccagcttctattggctctaaaatgcaaagactattctctagcgtttcatcagttattcttgccgacataactttgaactcgttggaacatcttgattcgcttgaggtgactgctaatgttggaggaaattgctaattttactgagaacattgaggtctcatgttttccttccctgttgcagctatatccatcaaatattccagacctttcgtatggaagtccattgattgtgtcaggcagatgtgatgggaattttcctgacaccattgaaatcagtggtaccttggctgatacaagcagtttcaccatcaacttgaaagttcagaaagctaaggatttgcctcttaataaggtaatgtttcagcttctctactcaattgaacactgcattaagaactttgtttcttaggaaatgaattttttaagctcttaacttatcccctttatttcacaggttcttgcaaggagacaaattgatatgttgacatcccatgcatggttaacacaaagtaaagagatagaagagaaggtttgttacttattaaaagtatattcttatcaacttttgttctctgtccgagacaacattgtcataatttgggtatcttgcttcgttccctattttttaggttgttaaaatgagcaagcaaacaggggtaccgtcagagtataatctcatggttttagtgcatcctgataagggaaagaaaacaacagcttcagtccctacacaagaggtacgcacaatattcctaagactaattagtaatttttcccccaactttgacatgtagtaaattgtgtccctgaacttttttggccgttaaaaatttctcctcaactattgagattgttaaatttaaggacttttgtc

SEQ ID NO: 301417 - DNA, 1458 bp, Cannabis indica
gaaatttaggaattagtattttattatgaatttttatttaatttaaaataatttactttaaataaaaatagaaaaaaataaagaaaaaagaaatagtactttctagcatttttagaccgctacatcactgcctcacacttcttctttatatatatagatatagattctcatttatctccttagtaaaaaatttgttgtttttcttatctataataattacattttatacattttaatataaattctcatttatctccctagtaaatctattcgtaacaattaatgttttatttatgtttatcattgttatttttttcataagtgaaaaatttaaactattaaaaaaatgaatttcatggttacatataaataggaagatcacatgtaaagagactcttctctttttctctcattgattagtattaagcctaaatgttgttaaattctagagagaatattatattcgtcatcaacataaatgactcgtagactaagactcattaatagtacaacaacatataaaatttgtctcaaacatcctttaacactatctagtctcttcttgaatccctataatcactttgttgccaaaaaattgagtgaataatattttaaaaaaaatcttaataataaataggcttaatcatccaattcaatttagaatttccactcttaactaactcaattcaatagtagattaaattttaaaaattcataatttaccttttaacattcatttcaatcaaatcaaattattaattataacttatcaataattttattattcaagtcaattttaacaataataaaagtataattgacaaatttaattctattattaaaacaacacttgattattttggattctctttggctactagggtttctctttaacccttttgtcgctacaatcttctttcaatctgaccacagcttgttagcctcatctggcgttgggcgtgactcgttgggttttgatttatgtgtcatggtcattttgataaggtttttcctttctgatgtctctctctcttaggcgtgggtggcagagttgttgagggttgtaggatgcagcgatcactcaagtgcccgtttaggaatcgtgttcctctggttatcgagtcatggttcaagatcttgggtgctaggtcatgagatgggatttgtttcttggctcatcaggttggttcaaatttcttggtttttgggtggtcgcttgtccagatctggggttgcaatggttgctggtgggggctctacgtggtaggggtgtacatcggtcagtttggtcgagttatagtgtatttttactaacccaatataaatgtcgggttgtaaatttctaattgtaacccgtccaataaaaaaaataaaaaaaatgtaacccgcccaatgatttctatcggtttggtcgggttaacccgtttaaaccgatctttattttttatttttttcatt

SEQ ID NO: 301418 - DNA, 2822 bp, Cannabis indica
gtatgtttcaaataaatataaaattagaggcaaatttgattaattgattaataaaaggagtatttttcaacttaccccataattagattagatctggttagattttgagatctattcggatcaaatcgaataatgattttctaaatccaattactaattagattggatcaaataaaaaaaaaaatagattgaatcgaatatccaaccctaatgcatcatattcgaacatatgcaaatcaattatcctccaactcagtaatttttccctttcaaataatttaaccatatgtatctgttttatttaattaaaaaaaaaaaaaaaaaaaaaaaaaaaaacaatggccataggtatgtgttaaaacttaaaatgtgttatattgtcatccctatacacaatacaatgttatccaataagtaagaatctcatcacttatgagctctgctattcaaattcaattctttttttcttttttggctacgaaattcacattcactgtacaaattatttacagaaaaacaggctcatccacaaagcgatgctggaacaaacagaacagattactcactcaataactaagttcatgagaattaacaaatcttgacctcatttattctaccaaaccttaacaaaacaatacagattttgttttagcatctcttacaaattatgtagtctctcaacctctttcctcgataagcaattcttcaagttcccccctccgtctctccaattccttaagttttgaaaaacacttacaggtcagtacaaaacttgaagaaaaagcttcaattcaagcgagcatgataagtgaagaacacattgttttgacaaaactacacattgtactctcaacatgagtgcttacctctagatctcttactgcctgctcccttgtaatttctttcttctgacgagcacgtttgaggaagccaaggcataggattcccttaatatataagaagaaaacaaaatcaagatatttgcccaaatttgcaaagtaacaaatttttaatcagattcttgcactataaacattgacagtttgggtagagcaagtttagtcaacacattgtgacccaacataggaaaaagcccatttcgattagaagtcaaccatgcaaaaacaatcatgtatttatatatacatctttattggcttaatgaatagataggaataggatgcatttcagttttgcttaccgaaataacataaactacaccacaagcaagaagcatgtagcttgctaagttctgaaggaaaataaggttccttttctcagtagaatagtcaggaaaagcccttgtcatcactgcaacactgaagggaacaatcaagtagtttatagagtcaaatcaaattctatcatcatcttcaatcaataaacacagtagagatttcttaaaagacttacaagatctgcagcatccccctaccaacccaatactccaagacctgcaaaagggtaatttaatattggaattagatggattgaggtctgagattattgaaagctgctaattaaaagatttacatcagtttggcttggagttagcaagacctccacaatcatatgaaagctcaaacagtttgcttggaaacatttttaccttttccattggcgacgatttccgtcattcctttcaatttttgatttttttataaatgatcctaaaaccctaattgtttaggaaaataacaccaatttacttaaccctgactaatgttttctaatgagctttcattcttccagattggattcctcatgttttgtgattctcataccgttattccttcaatccagtaaaccacaccatatgtgttgagacaattaatttagtttgttttgtgtaatgagcatgtcttacgctttaattagctaagatagtttcttattagaatatagagagatcaatgtatcaactttatttactcaataatgaaattcatttcttatgcaaactttatcttctttcatttatggtagtttagaagtttaactacatagcaaacttcaaatttctgaatatgaaaaatcaagatcttcacaagtactaccaaaaacaaaatctaaagaaagaaatttaaatttctaatcagaaacatttccacgacgaacctgccaaaacttcaagataaatccccattccgtctcagctacaacaaccaaagcagcaatcaaaacagcgtaacaccgaaatattccatcgaaaatctgtgattcacctcatcacaaaaagcaacaatcagaaatatcaacaactgaacatacagatacacaaaacacatgatataagttgtgttacatagagaaagagagagtacatcagatccgttcttgaaagatctgatggcggagagaacattgacgacaatgcagagaatggcaacgagagcggtgattacgctaaagaacctccagacgagcaagaaaggatcgggcctccttcttaatacggtgttggaagacaatctaggaacggaaggttcatcttcgggtgctgcggtggtggtggtggtgttggacataattttcccgagaaaataacaaattttcccgcgaccgccctaactaagtgaagcagagtaaaacccagaattgaatagtttggaatggtttaatggctttgttttgttgtttgttatgaatatttctttccaatggaatcacgctttccttccaggtgttccgtagtgacgtggcatgagttgaatggttgttgggaatgataagatggtgggcaacgtaacgtgtcttaacttttttaaatggaacttgggaggaatgaaaatataagaatagaaataggaatggaatggaat

SEQ ID NO: 301419 - DNA, 6045 bp, Cannabis indica
aacttataaaaaaacacagtaaacaagttaaaaatatcgtctgacagtatttttgtaaaaaaaatgacaaaagttagtatacaatgtaaatttccttaattttatcctaaataaactatatatatatataagaacatgtaccacttcattcattagcagttggttttaagataggaggattctcaacaatattataataataaagtggtaattatcaccttccggcaaaattgccatctgttttcttgagcaatatttttcattaattaattaattaaaactaaatttggattatgaactggactgacttcgttcatatcagcctgcaaaatcatattaataaccatttgtcacttatatgtatcaacttcacataaatccaactattaaattaaatttactaaaataccctttttcattctgtaacaaactcattcttattagctatgatttcagtccaaatatacatatcatacacataattactaaacataacataagcttccatggctaaattcatcttaaatttccattttttcaatccaaataaatgtaaacaactacaattctcttgtttttatgctttaatctctgtcaccactctgagtttcttgctttctcaaacttcagcctctcaatgtgtccttgatattcataaatcttcatcatggaattatgactcaaattgtaaagaaggaaattggggtggatttataagtaattgtagttgtggggaagcttttgatgattacttatatggattggcacaaagggccaaccagagtaataatcatcagaagcttttcttgaattcaactgaacaaaatagctgcattgataataatgatatttctggttgtggttttgaaaagctaacaagtggagttggtggttgttctgacttttcttcaaatgatgttgttaataatctaggaaacaaactcaatgagcttgaagaagactgtaaatttcttggctcaatagcttgttcttcctgtctaaaaaggtgggaagagattgttgcaaagaatgggaatgagactaaaaaagaagaaactgaaactatggtatgtggttttgctgttttgattagtttaagcagtggaagagttaaagatgagaattggattcacaccctttatagatgccttggggatcaagacatttcaagaggtaaagtactaatagttgtttgagcaatgagtgtttgcttttgtctattctctttaatgttagtaaaaacagctaaaatatgcaacctttgtttaactgcagaaaaggaagacaaaactagtaaacataaaaagttgaggacaggtaaattgcctacagctaaaatagccatgtattatatatgaaatttgaaaggtttttaggttgttaaaaatttcacccgaactattgagataattagatttatgaatttctatccagttttactgttagtgcttgacgtggacacaagttcgggtggtacaatttggtaccacgttaggcaactgttagtaaaattgaacagaattagagaaaagttcttgaattcaacagttttaataattttgagagaattttcaacgacttgaaaagtttgagaacacgatttaatacatgtcaatgttcaggagaaaaaaaatcccaattagtcgatttgaaataatggggttgtgcaaatttgaataagtttcttggttatgacaggtttatggattctagctggtgctctagtgggaatgacgatactagtaactggtataacatggttcttgtataggaagagagttgaagaccatcttttatcagaaaaggagggtaaaaatatgatcttttttttcaatctataaactttgagacctcacttgatattattattaacattctcaattcacataacagaatctgatcatagcatggatatggagtctacaaatgaagaaaaaggctgcattaagatatcaattaaggaagtttattttgcaacagacaatctcaattcttctaacttcattggccaaggtgtagcaggtgagacccttagaattagtgaagaataaattgttgttcttaagaatggattttgataacattttaagtatttttttttttcagggaaagtatataaaggaacactttcaaatgggaaacatgttgcagtgaagcacataatcaaagatggtcatgtagacacattcattagagaagtgagaagcctttctcatgtcaaacatccaaaccttgtgcctttactcggatattgtgaggctgcagatgcatgtttcctggtttatgagctttgccacaatgggaacctttcagaatggttgtttggtaataaagtcttcttcttaaatgaatcttcttgtccattttcaaacaatggaaatctaatccaaaaactgtgacacaaaacaggtcaagatgttgttctctcgtggatcgaaagactaaagattgcgattgacagcgccaaaggtctatggtttctgcatacttatccagatggatgcattgttcatcgcgatatcaaggttgttcttggtctgtatagatttttactgctatttactctttctttccagtgatttgttcttgacatgactttttggcagccaacaaatatcctcatagattctaaatttcaagccaaactctctgactttggattgtctaaggttatggaaatagaccaatcacatgtggtgtcagaagtgagagggacattaggctatgtagatcctgagtatcaaagaaatcaccatgtgaacccttcaggagatgtttacagtttcggaatagtactattacaactcttatcagggcaacgagtaatcgatttcaacttggccacaccaatgctgctcctcaaaatggtgagaaaacaagcttaacaactctttgttttttcatgttttggcaactgttttgatgtgtttgtttggttgattttcaggctaaatctctcacagctaaaagtagtaaagacgattttgctgaccccaaactcaagagggaatactcattggaagcctttgaacttgtattcaagctagctttgtcatgcacaggacataaacagctaaggccatccatgaaacaagtggtctcaacactagaaaatgcatttaatatctcaacacaatttgattcagttacttgactcataatttatcaaagaatattgttcatatttgcttattcaaatagaaaagaattacaatatggtgtaatagtgtgtacatagatttatacaaaagcttcatcaataaaaccagaagctgatacactttagctattaactcttacaaaaaccgagctaatatactcatgacttgattatatatctacacaacacgaaaggttttaccctataaaatttgggttaccaaacgtgaacagatcgttcttgtgaaagagcaggagaagccatcaaaccagaagaccttctttcataaaattcatggaggaccctgatgagagcaccggctttcttgctagctcgagatgtaccttcactcagcagagaatacaaagatcccattagagatggactattggctaatagagcaaccacttcttttcctccatttctacaaagagctagcagcaaagacacgcagtactccttccctgtcctagaactaatggagcttaaaatctcgatgatcgaattcaaaccaccatggtgcaaaacagcagctgtcccatctgatttttcagcaagagttgctagaattgcaagtgaatctgtgacaagatcatcttctgtatcagaagatttcaaaagattagcaaggacatgaactgtcccagcttccaacacacccttatgatttccggggtgtgcaaggagcccatatatggcaactaaggcgtttttcttgcctctacttgctccatttcttatgagctcggttaaagctggaattgcttcagtaagattcccaatcaaaactctgtactcttcaactgaagcaagataaaagattgtcccagcagcatattgtcttgcttctgagctaactcccttcttaagaacacttgtgagtatttcaagacctccttcttggactattgtagctcttcctttggaattcttggaaaggttcaaaagggcagcagaagaattctcttgagacaatgaatctgttgaaagtagaagattcaacagtggcgggatcacaccggcttctaccaaacaagacctattaaaaacgcttgttttggatagaagccttgcttcataagcagccttgttttgctctattcctgttccaactacaagtgtaacagatacaaaatctgcaaccatattcatggccttttcaaaagccaaactatcagcagaaaccgccttcttaacgtggcgatttctatgacatgaatcaacaaaagaaatgcccttttcagaacaataaagcttaatcaaacccttaagagcagagttaggtaccatttccatgttcttgagcttttcacctgttttgggacaagttgaatttccagctctgaaccatttggtaattgaagaacgatcatacgtttgaccagaagctaccgttacaggatcaatcatcatctccaacgatattggacaccgaagatcatctgaattaataccattcagcacttgacttctacaatttccgtttgattgttttctattgggatcacaatcaacgacaccaaaaaccacgcaacgacaatagcaaacgaaacccattagactgcttagcaaacccaactcttccttttcgtcctttgagctctcgagctcaatctccgaatccaagaacatcgcttccttattacacgagctccagtttctgattccaagattaacaagaacccatttgagatcgcccatatcaggaacaaccccacgttcgaacccgctcaaaacggatcgaacagctgacccgacccgtttatcgtcggattcgggttcgaacctcgttttccgcgcttgcctcgttaccaaatcaacatggtctttaatatcgaccggtacgtcgatcacggtaatcggaagaacatcaagagccgtcgcgatcgcccgggaaaagaaccggaattggttagctacccgctccgaattcattaacatccatacccgagaaccttctctgttacaatcctctaacaagaaccgaactttctggaaagccaaatggagctccgagaaacccagaacgacggaacccggaagatccgaatcccattctcgaatttcttcaagaaaagtgagaatcaccccaatttggcgaattgattcgtgggcatttcgcttgttggaagcgaaaaaattggatcggtaattacatatttgacgagcaagagaaattaacgagttgaggagtgtagagggacgaatctcctcacatggatgaatcgccggaaaagtcagaatccggcgagtagagacattttgagtttgaatcattgaacaaaagtttcaaatcaaagagatttcgataaaagtatgaacttgttttcttgtgctttgaattattaactttcggtttgagaatttggattatatataacgtttggattgggtatgtacacgtgtaagaatatgaatggagttgaagtttaaggttaaaagggactgtagtggctttgactttgtaaatagaggacacgtggcgtgtttgcacgtggagagatctaagcaaggggttagggaatggcggcttcgtacatggcttcgggtgagtttgtgttaagctgacacgtggcaggagcaaggatcatggtatggctcgtgaagttacgtgaagagtgacagccgacatcgacaatgggaaaacagcttggaattattattatcaatacattattgatgaaaaattattaattttttaattatttatttattcccttcttttcttgaaataattgaaataaattgttcaattcattaataacaataaaaatagtaatatgactaatgataataaattgacaaattcaagaggatgaatgaagatacaggaaaaagttgtatttgtaataaggtcattcatgaggctctattattattattta

SEQ ID NO: 301420 - DNA, 1086 bp, Cannabis indica
ttttggaaaatacagggtctattttcccatttaacaaaacagtggctccaattgataacttttgcaaaattaatacagggtccaaaatagtatttaccctaattattatgattaatttagagggataataatatataattaagaagaataattagtagtaattaacctgcattatgtaccaaatagaccaagtgatgcagcttgagacagtgagaagtgaaccctttaaccaatgctcatgagagccattgctaccttgaattttgatcaatggaggccatacatttctcacaattggtcccttgtacaatgtcatggtcatcacaccacctaatgagattagggttccaagaactttggctatacccctcgaatttcggagattaattatctctaatctgtgattattattattaattaattaattaatcatcaacataacaagaagatcttactaattaattaatgtattaattaccttagaacaacagcaattataaaagttagggaggcaatggtgttgaccattgaagcaacaaaagttggagatgtgtatttcaagcttgcaaaatatgtgtttagtgttaaaccaaccctgtcattaattatatatataattaggtgattaattaattaatagagatattcttgtaaaaaaaaaatctattggaaaggaatatatgcatatattctatgtgtatttaattttgttaccccaagagtgaaagaataaaaatctcaacaaatagagggaatgttagctttggcctttgctttctgcaacacaaagaagaataaaatgagtgtcattattattaaaaataatttgggaaatttaaaaaatatttatatatatgcaactaaaagaaaacctttttttaatttttcttttcaaatttattattacattaaataaaaaaaaccaatatatatatatattgtattttgtaacatattatatatattcatgaataataatagcaatataataataataataaaacaaagctaatgtatagtcatacaaattttagtacttaatttatcttgtctattatataaataggtatataaatgaaaaagctt

SEQ ID NO: 301421 - DNA, 4579 bp, Cannabis indica
taactttaacattatattaaatcatatctctcaagttttcagactttaaaatttttctgatctataaatttataaacttttgctcaattttattaacaaaaagctggcatagattaaagttcagagaaaaaatataatttaatacataaaaaattaaatttagagagcacgttatggtagataaaaaagtttagtggcacaatttaatagctgaataatagccattttaataaaattaaatagaaatttttaaatccatcaaccttattaaatcggagaagaaaattctagttattagtcaatataatacgagggttatgtaaaaactgcatgtgcatgctaataaatatcttatcgactactctttcattgattgagaaaaagtttgcgaaaaaaataaaattaagaaaaagtacatatgtttatacccgatatgttttctatttctagtcatggaatattgctatctcctattgattgctcaggtctttagcggagaacaagcttaacggtacaatcccgaattggattgaacatgcagctttctcaactatgatgtaaacttaatttacacattattttgatattttaaaaatttctaagagatatatatgatgaaaataataattaccatcatttgcgaatatattatatatttgtctttatttcagcgatctctcctacaacaatttttcaaaattaagcttcaaagatccagaaagttcaaatatgtaagatatatatttatgcaaattaatatatagaaaatatatattctgctagtttgactataaaaaagtaagtatacgtagtaataacattttctgcttgtatgtttcagaagtctattttcctgctgttgctgtcagccagaaaaaacgtaagtaaatgttcctttaatattgcttttcagatttaaaactatgaataatattctaccctttagataaatgtaatattaattgtcaaagtgagcaagttaaaatgagtattataatcgatgctagctgctatatataattaacaaattaaggtttaaatatatatgtgtgcaggaatgatgatgtgaatcaattgatgactgaatattgtcctcaagggaaacctaaatgtatattctttcttttggcattatatatagagaatttgtagatatttgcttaattttaggtactacatatttacatatatatgatttgtacagatagttctttgtacataaactgtggtggtgaggaagcaactataaatgggattaagtacgagagtgataatgacacgagaaatttttacgtaagtcccaaaggaaattggggttatagttctaaagaaagctttgtagcaggaaataccaactacagcaatgacattaaaagggtgaaatgtggattttctgtctctgaggcacctttatatgagaaagctcgtttttctcctctttctttgaaatactacggtttttgtttacataacggtaactataatgtgacactacattttgctgaaatcgtttacacggaagaggcaggctacgaaagtaaaaaaaaacgtgtatttgatgtatacattcaggtaattattcaattcgatattaatcaagtgtcgtgtctttaatgttgggagtattattaaaggctgatcgatcaattggaaaattctcaatacaggggaagagggtactaacagatttcgacataaaaaatgagagtaagccaaataaaatagccattaaagacaatctcaccgccgttgtgagcaacaatcaattagagattcacttgtactgggctggaaaggggtcttcagactacacacaagagccttcagggcaatatggcgaatctgtaccaccccctgattttaacggcccactcatatcagccatttccgtaactgcaggtacctaaatgattttcagaaagaaaagagctcatgtttacaacggaagctgtttctatgatgagattaacatatatatttcagaatattcataatattgattggctagctagctaactaatcttaacaaatcaattagttaacattttaacatatgtttatggatttaatttcacacaactcataaatggatttccctacggaatagatcagaaaggccataaaatgaaaaataagatagacaaacattttcttgttaattcattattaattgtttgaaaacaatttttctgatttcagattttaagcttggtaagaaattatcaccagtacacatagccttgatcacggttgcttcagttatatttactctgttgcttatattggctctcgcttggatgatgggatggttggaaaaagaagacttacatggtaaatgtactgaaaaaaacatgcttatatatatacttcatcactcattatttaaattggaaacttactctattacatactttttcaatagaaataagagttggtgaagacaaaactgttaccctcagacaattaagcgatgctactcgaaaatttagcaaagaaacagagattggtaaagggagttttggaactgtttacaaggtatataagtatacacaattatgttcggtagttttaattatcttaatggtcattaatgtatagtataatagtataaaaactttccttaatttcatggttccaggctgaatttccagatcatcatgttgtagctgtgaaaaagcttgacactctttcagtggagggaattgagaaattaaaaagcgaaatctataccctccaatctcttaggcatgaaaatctagttcggttgtttgatatatatgttggaaaggggctgtatttggttatctatgagtacatggaaaacaagtcccttgcagatgccttattcagtaagtgtttaataattaatgtgagaacagataaaagtagtcatttataacactggtgcctaatgataatgacttatgcaggctcagaccacaaagtcagacttgaatgggactcaagatttaacatttgtctagggattgcaaagggtttgcagtatctacatgaacatcctagattcaagatggttcacagaggtattaaagctgctaatattcttctcgacagcacactcaagtctaagatatcagactttggattggcaagtgcttatgctgaggacgaaacagatgcaatcaaagtcatcaaaacagaggcaccacagtaagttattgactactctgtttttatcaagccaatataataatctctttcaaaacgatcatattttatatcacaataatgtgaatgttattagtttctgttagagagtctcacgtggaaacataattctatatataatacaggtagtaaaaagtctatacataatgtaattaagagttgaaaattaacaggaacatctgcaatcacaataagaactaattaattcactcatactttgtacgtatacatcttatactattattttagttgtttattttttaaaattatatgatatgacaaactatatatgatgtggttgtccttttttcctattacgtgtataaatagtggatacatggcacctgaatacccaatgtatggaacaatatcaagtaaatacgacgtctatgggtttggagtggttatactggagcttgttagtggcagaaaaaatgcaggccataaacacaaccaagatgagcttgagtttcttgtagacgaggccagtataaactattgacatatttttctataattgtgtccatataataaagctaaattactcatccattaatttatatgaatgcaggtttgtgtagcagaaacaaaaggaagtttgttggatttgctagacaaaagtttgaccgtttatgaaacgaaacaagctatcaccatcttgaagttagcagtaaagtgcaccaatatatcgcctggggtcagacccacaatgtccgaggttgtgagtgttttgaatgaagaaaaaactcttgacgagatttgtgtgcctcaagcttctgatgaacctgatcaagaccttactaaagatgcataattatttgcttatgtccttagaataagtactatcaaaggatgaacaagggaacattatagtaacttgtatatccgtgactttgttatttttctagttacattgatcgaaccactaattactagaaagaataagatcttacaacacattatatatttataattatatttcgaaaaaattaaaaatagttgagtacatgtcgaaaaaacgataaatttcaagttcagcgaaataacaaaaaaacgaagcaaagcaatttactcagtttggtaaaactaccaaacccacaaagagagatatatttcacttattacttcaaaattacatatactttctatctcaatctctctacccaaatcccaatacatcctttgcttctcactcactctcaccacataacaaactcacacttctcttttcacaactcactatttttctctcactccacacacacacctctctctctctctctctcacacacacaaaacacatatttatagagttacaaagcttgggcatcaagacaacttggatgccaagacattccaaagcttccttaagaaggcatttcaaaacttg

SEQ ID NO: 301422 - DNA, 3071 bp, Cannabis indica
atacgtggcatcatttaattggagaataacaaaatgatatacataggatgctttaattaataatctaaacttggttccatgtcttcctatctctcactgttcacagtttcctggctttacctttcctttttttgctctttcttccaaaaaagaaaataataataattataaaagtaaaaaacgaaaaacaatacacaacgaagccaaatgcattatcgtctctttgctcacatacaaaacagttgtaccacgtctctctctctctctctctctccttcctttagcttcatagttcattcattcacttccaaaatgacatagccattttgcacaacaacaatgtacctctgagtctaaacccccttcctcttttggccattcttaatttctttctctctcttctctgccataataatggtatctttcctctctctcccactactgctttctgcaacactcgttttttttagtgcaatcactgaccttaatatcatcagtgtctgcaactccaaaactactcccacacaggaatatttgaagctacccttactccacagaaacccctttgcttctcccgccgagattctctcctctgattcttaccggctctccgttctccatcgccgaagtcgccgtcaggtcgtcaagtctccggttgtctctggcgcctccaccggctccggtcagtacttcgtcgatctccaagtgggaaccccaccgcagaagctgctcctcgttgccgatacgggaagtgatttggtatggctgagctgctcagcttgcaagaactgcacccaccggctgccggggtcggcgttccttgctcgccactccgccacattctctccgtatcactgtttcgactcggcttgtcggctcgttccgcatccgaagcctagccaatgtaagcggactcgattgcacagtccatgccgatatgactattcgtacgccgatgggtccaccacaaatgggttcttctcgaaagaaacgacgacgttgaggaccagctctgggaaacagaccagggtcccgggcttgtccttcggatgctcttttcgggtttcgggcccggctttctcgggcgggaactttgatggagctcaaggagtaatgggcttgggccgtgggcccatatcgttctcaacccaactaggtcgacgatttgggaataagttctcgtattgtttaatggattacactatagcacccgcacccaccagctatcttatgataggaggcgcacaaaacgacgtcatttcggaaatgagctttacacctttgctaattaaccccttatcgcctactttttactatattgggatcaagaacgtgttcgtagacgggttgaaattaccaataagcccatccgtctggtctattgacgaacttggtaacggtggcactgttattgactcgggtaccacgttgagtttcctagctgaacctgcttaccgtttggttttagcggcgtttaaacgtcgagttaagttaccgagttctgctcagccgaatctgggtttcgatctctgtgtgaacgtttcgggcgtgtcgagactgagtctgcccaaactgagtttccaactcgttgggaagtcggtagtgttctcgccacctcaaagcaactacttcattgaagcggcggacagtgtccattgcctggcgattcaacccgttgaattggactcgggattttccgtgttagggaatctaatgcaacaggggttcttcttcgagttcgacaaggacagatcgcgactcgggtttacgcgccatggatgcgcccgaccttgaaaattaaacggagctgtgactctgtcagaaactttttttttttttttcttttaatcgataaatgtttttaagtaaattattttttgaacactgtgtgggttttgtttgtttagtttgaacaaagttccatattggccaggcaaaaagaataattgacgagagattatatataacaacttttccttttaatttaattaaatcattaaatagtcaaatttggcccctttttttctttaattttttacaaatctaatatatttgaagttagaatgaactaataatttctaaaaaaaattttggaacaatgaacaaaggattttttttgtcatcaaaaataaaaaagattcaaacacactcggggagaaaaccataatcccgagaccctggagacagggaccaatgcccaagttgaatctagaatggtcaaaaacagggtaggagatctcgtgctcaagttcttgaaccttggaagtatcaaaatgacatctcaaaagttgcaaaatgagtacccagtgcctaagttgacaaatgtcctgatgaattgagttttgcttatccgattttgattttgttttgaccgtccgtctagtttgtcacaataactaagatttatgaagttagagaagtcaaattcacaacttcacatttctcatttgcaacatgtgaaactcactcagaaatgaagagtttcaagtctctcattttcatagaacaacatcatctctgagaattggtgaccagcttcgtcagaacatagaaatagagtaagtgatgaaaaatatcacttaaacatcataaagtacattctttggacatttttttcacttacccaacgtctaggttgacgtcagatgtcaacctgggtgctaggatgtcaactagagcactggttcatgaacaatctttagtaaaacaaccataaatcactcaatattgattcgatttatgcaattaaacttatattttgaagctattttaatgctatatcaagtcatggatcacacttcaatcacaattgtaaagttatctacctcaaatttcaccccaagaaaattataaaattaagcttcgggttacccatagcgagtcctgtcgggctctgaaaaatgactatcagcctcagaagttaattttgataattggatcatcatctatggtcaaaattaggtgttgactcaaaatttggtcaactgatagcgatgttgggattttatgccctaaataaaactcatttcaatctaatctgatttgttatcaataaaagattagaagtcatt

SEQ ID NO: 301423 - DNA, 3627 bp, Cannabis indica
aaaaaaaatcataactatattagttttgagggcattttggtaagaggaactaaattttgctgttggccaagaaagaaagtatactcttgtacgaattattaccggttcaatatatctccggcgagtctctctcgagtgtaaaattttcacttcttgattagacctacagtctctccaattcttcttcttcaattcaagtaagattattcaatttacaatgtaaccctatttacttcgctctagtttctactttgcaattcgttgtacaaaagttttttgtttacaatgtgtttgattatttgtctaagagaaactagtgactaaatggcctttgattaatatctatcatgaatttctatgtttttgttttttcatttccttattttcttttcacattgttaaatttcaaagggagttaaattcttagattttgatttgttggtaattcaagatacttgggttacttactgatttaattatgaatttgaattggggtgttgctacattgataaatagagaggcttattttcagtaacttacttactgatatagttttattcagatggttctgttttgattgtgagaaaacaaacacatgggaactcagaatattatgtggaattattcaaagaggattttcacatttgggctcataggaatcaccatttctgatagatatgcaagtgttgctgccgttcggggttcttctatgtctcccacatttaatcccagctctggtactttgctgggtatggaaagaaaacttatgaactgtttcagaatgttaaaataatggttttccattcataggtttggctgtctgattgtgtgttttattgcctgattatggatttgattgcagatgactatgtcttggtggagaaattttgtctagagaagtacaaattttcacatggtgatgtagttgttttcaggtaatccttccgtttttctgtttggatatcatttttgttagattaatcactgtcttttggatgtaaaaacttgtagtgctcagtagtattcattcaagtatgactaattccttcaattttattacctagcataatgaactatctatgagacattcttagaaaatgtcggtatcatatctttttggggggtttgaagaaactgctgaccagtaaaacaagaataaattgtagaaatcctcctgttgcaatactacttaggaatgatctaattggaattcatgttacattggtgggtagttttctaagcctcaagcaatgcaaccttgcatgtggttatgggaggttgccctgtttcatattgttttcctcttacatcattgttaccagtggggcattgagtgaacattcctctactggtgatctgatcaaatttaaatgttggcttgtttttgattattattattatttttatccttttgatttaagcttgtcttcacactctattgacaccaagattgtgatgctgaaaaacactacttacttagttgcaacatctgcagctccccacagaatcacaaggagaggcacataaagagaataattggcttgcctggagattgggttgggcttcgtcattcatcagatgtcatcaaaattccacaaggacactgttgggttgaaggagacaatcctagttccagcatggattcaaattcttttggcccggtaagttgattttactacgtcgatgaagagatactttaacaatagcataattgctcttattatcttcttaggtgttaaaaatgtcgcaaaaatcctgtgatgtagcacaaactatagtcttttatgttagtagctaaacagtagtgaatggaacttaacatgatgttgttataactcagtttccatcaagttttagattttgttgcaatccatcatccatgcatacttttaggcacattctttatcttttcacaattcaaaatctataccgatcaaaagacaaactaggctgcaaggctgtttaaacttttataaaagcatcgtgattgcgtttcaattgcaaacagaaaaagtttaaagtgcacagaactttttcctggacaaagttgcaattagttaatctttcaactgactttattgcattataagcttgtgaatgtagctttataaaaactatgctaaaccagaaccaactgtggttgacaggttcctctaggtttagttcaaggaagggcgagtcacattgtgtggcctcctcagagactaggtgctgtggagagaaaagtgcctgaagggagactatcttcttcctagctggattttttatttttcagtcaaaggtccctttttttctcatgggaaacaaatttcaccactacactattgactattgagaatccttatacctcatgtatgttttggggattgaaattctctgtcccatttattacatgtattttggccaagtttcaattcttttgttgagtcatttacttttgcaaaattaaatgttttaatcttcaaaagaaaatgattgggaaagaaaataaagaatgttaatttaataatttgtaacaatctttgactaaatagattggattactcatttaatcattactattctcattcttggttgaactagagctatgaaaacaggtaagagtgagttgcaatgatgagattattattgagataagtctatgagagaatacatgaagagcaacactcaataatacacaaaaaaatcagatacttatcacactccccactgattagtcatcttgctcaaatcatcttctttcactccttgctataccaaccaattcttgcaagttctttatctgtaaatctttattcaaacaatagtttcaagaataataataagaagaaatgaaaaatataaatataaaatactattagattttcaacttagcaaataagtcagaggaataatcatcctcatcagtatcagtatcagtttcatcacaatcatcttgagatttctttaccactttcaagaaagtagtaagcttcatcatcaagcccttttcttgttcattcaaccttttcaattcaaccatgagatcaaagagaatggcattgttggagatgagtttgtgtgaaaccttgaatttggagtcaatgttgggattcccaggatatgaagaaaagcattgagttagtaagtgattaaagtttgttttgagacattgttgatctttatggtaatattggtgaccatgatgagtgagggtcaggtagttgagctcttcaatcatggtgtccatgctttgaatggagttagccaattcagttgctattgattccactaatttcaccagtaatgaaactttgtttgccattgttgaagatattaacaacaacaacaacacaatgttttagagagtttgaaaagaagttgttaaaatcagacttatcctataaatatatagtaagagaaagttagttaatttaggtatttctgtgaaagattcccattttttttttacaaagtgattaggtacatgatactaacatttttctttacaaaggtaatgaattaaagaatttttacacaaagtaattgcaatgatacttttcttatatttttactaataaactgaattaattttttaaggatatttttttaggggaattactctttatattattttttttacttttt

SEQ ID NO: 301424 - DNA, 3354 bp, Cannabis indica
atcatgccccttgaacttttatccatgctagaattttttactaaaattggacaaaagtccttaaattcaacaatctcaatagttcatggggtatttttaacgaccttaaaagttcagggggcatgatttggtacatgtcaaagttcaggggaaaaaatcctaattaaccttacaaaaaaggataattaaatccctagaatatatgactaatatcttgagggaatatccatatcttcatgggttgttggacctgtcccgcaatagcaggtcagcttgagaatcttctagaaggcttgttgtggaccctgcaacttgtttagcctatgtaggaactgtctgcacattctggctggccagccatatctttgggggttgtccgtacagctttgttgtacagcttggtcggtcagccttccttagtccgccaggcctctttggtcgaacagacctccttggtcagacaaccttccttggcctgccagccttccatggtcggccaagcctccttggttggacagacctccttggtcggacaaacctccttggttgaacaaccttccttggctagccatctatggtccgaccagggtctaaagacttgtcttattcttaacttggaagttgcacgaagtgtacctattcggttgttaacaagttgtattccacatgtcttctgttttgaatatgtggatatgccacatcaggcaggcaaaaattagaataacatttgcccccaagtccctgtttgaacatttgtacatagataaacatttcagctcttgtcttggctcttgaagcctttaccgtgcagcattgtctggccaagtattggactattcggatgacgtgctttcatgattaacaatgactttattgtcaatcaattatggagaatcgtgcgacgactccacattttcccatgtttaaacctttgatcttctctctcccatgtatgccttttactttcctcatcttctcttcttcgacatgtctctctttctttggatctaccattgatgagttttaagcttcttaaagtttttagaaactttttgattctcacgttttaaagtagtattttacattgcaatccgcttaatagctttaggatgcataatgtacgactttttgatgaacaagattgagtcttagactggtacttgggtttgttagagaccctgtccgactcttagatcttgtctaggaactctgtccaatacttagatcctatctatgaactctgtccggtacttagatcttgttcaaagtccctgcctggtacttagatccctttcaagaactttgtccgattcttactgcatggttcttgcatggccctggccttatgcatttgaaccgattttttgttcttgtattatggccttaaggccctttactttcgaacaaatgaccgaccaagcggtctttaatcctgactatattctttcgatttttgaacatgtagctgactgggagcctttgatcccaggtttatgcatttttatgttctccttgaagcatgcccgtatgcatcttgcttagctgttaatatctggctttaacgaaacttcaaattttttgcccaagcatctgtgcttgttcaatgctatgtgtgggtgtgtcccaagtattaagcagacttatggtctcttgatcacttgcaattcatcaagtaattagatcctttgcctgtgcattttcttgggaagaccattttacatgcatgtgaaccaaaaataagaattatctttaaaaagctaatttgttagcaagttgtttgatacaatttgaactcaagaaacgtcttttattcattaattggtcttaaatatgtgttgttgttgtgcaatgtatatttttttgataataaaagcttacaattataaaacctgctttcattcatcattctagctacccctgcggagcgtactgggtaggggccaccactaaagagtggtggaaacttagctcttttatactaattcctgtacggtgagcaggaaccactactgaagagtaatattttcacaagttggtcactggtagtacttttttagatgttctccgtttttgtaccttggtaggaaaattaattccatgttcttattgtatctaccaagcttgtacgcacctttacttgttatcttggtaacttggtacagacctttccagtttggcccaaacactcctacttctggatctttggtattcaagaatactctttgaagcactaagtctcctacgaagaatttctttttcttgacttgtttattgaagtacctcacaactttttgttggtaggcatgcaactttcagttagcttaatctattctttcttctatttcgtcaaaggattctactagcaaggtgtggtttacttcttgatcataggctgtcctcctctgggacggtggttcaagttcaacgagcaccattacttcatagccatagactaatgcaaagggtgtttttccggtggtcgtcttctcggtggtcttgtgtgactaaagtacctttgggagtaagtcaggtcaattggcttttgccttttttagacatattgtactcctcctttcccttagggagttaaccgattaggtctattccccatacaacgaagggccaaggaaactgcattagtgtgagctcgtttagtggagctcttgggatctttgagaatctttggcactgttcacattttttgacacagtccattaaatcctcaatcatagtaggccaaaaatacccctacttgagtgtcttttgggacaggctttgccgcagaagccttcattcacttctattaatagccgttcaacttctgtcttggtgacacatcttagaagtggcatggagaaaccacgtctgtacataactccgtccaggattagatgtcgagcaactttccacctcatttttcttgcttcatttttgtcttccaacaagaattctgtctggaggtatgccactatggatgtcatccatgttgggttgtcatctatcatgtctatttcttctaaaatagtgatgctcggttctttgaggaactaaatgggcaccaagtttgtcttgtttgtcaaggtgcagctggttagtcgagcgagtgcatcgactattgcattctcttctctaggaacttgccttatagtatagcccttgagctgacttaataagtcttgaatcttgctcaaataggctatcatttttcgtcgagggtgtatattcacctaggacatggttgacgaccaattaggagtcgatgtatatgtccaggtaatctgcctgcacttcctgtgctaacttgaggtcagcaattagagcttcatattcaacctcattgttggaggctttgaa

SEQ ID NO: 301425 - DNA, 2972 bp, Cannabis indica
ggatcaaacttgaggggattctcccagatggaagggtctctctgtgtggcccaaacattgatgaaaatccgagagccttttggaatggtgtagcctcccacagtgcaactttcacttgggcaatgaggcactaacaatggtagaactgggtgcagcctcagagtttctttcatcacagcttgtaagtaaggtagcttatgaatgtcagactcctctactatgttgtctttgccaattacagcttctaactcttgttgggctctctttaaaatctctggctggttcatgatttcagccatggcaaactcgattgtattagaggatgtgtcactcccacccacaaccatatcctgtttagacatttataaacaaaaacatgaaaattggttgatgaaaccgtagtactgtttatacttaaaataaattacaagaaaaaaaaaacttcatttgtttaaatctcttacagtttctcaaggccattaatatcagttaacatgaataagttgttcaaaaacttgttactaaatttgtgaattaaagtcttcaaaaattgagctttagctcctctgtttcaccttaacgtgaagatatataaagtgtcaaatcccaataacacagcggtactatatagagataaaaaaagtgtgtaccataagcaaagctttcacatgggtaatcgtcaatggtgttttagaatcaacttcttctttcaattccaacaagtactgcaagaaatctctgctctgaccaccaccactactatctctctcgtcccgaatcttcaaagacgaagaagaacgttgagcaatcaatttctcgaacatcatatcgaatctaagagccagcttagtcatttgctttccaaccccttgaaggtcaaaccgagcaagacccggataaaagtccgacaaattaggcttacccagaagatcagtcatctcagaaacaatctgccgaaactcagcgcccaacgaatctctctcgtctccctccacagccccaccccaaagcatattcgtaatcacattcagaatggtcagaaacatctgctccccaacgttaacgggtgacccgacccgactgtaacagtagccaacagtttgacgaacctcccggcgccggagttcatagacggagtccaaggtggtattgctgagcatcttgagaacgcagacttttctaagcatacgccattcaggaccgtacggggtccaaacgatgtcgtatccaccataggtggctatacggccggcgactgggacgtcgcgattagcgaaaacgacgtcgttttctcttaaaacttcacgagctaaagaaggtgaggtgataactataccaaccttgttccccaactgaagcttcaatattgggccgtgagtttgggccaaatctctgaagtagctgtggagctctggatccagagataaaaggttgcccaataagggcagcccacgtgggcctggcggtaacggcggggaggcccgtttaccccgtactttgagatgaattagtaggaggaagacaacggcagcagcggagagagtgaagcacacgcgcgtcaagtcgacgttatgtttcaagaagtttagcaaggttgtgctggtgatgttgagcgtcatggtgacaacacgttacaaaataggaaagatcgagaattttttgggtatattaatgggcgaaaggtaggcattgtatttatatgtgtttatttttgtctttagaggattttgtttcaaacgtatcattagccgaatcttttaattttttatttaaaaaaaaaaaaaatactcgggttaaagagcattaattgggtacaacacggatgtgtggcattattatttgtagcagaggatgtttatttagactcagtctaattatatattagatgttaaattttattaaccgattcgatttaattaatttaagtaatcgaatcaatcaaatattcattacatattaagttggatcggttctatttaatggtttaatttagattaatctaatattttaaaattagtattttttaatcagatcgaatctttctaatattttagatcaagtatgtatcgaattccaatccaaaaaaaaggagtaaaattttaatgttaatttttattttttttgaatgaatagacgtctattaataagaacagaagctagacctcgtggtcattacaaaataaatctttcggaatttgagagataggtaaccgaccaaatcgattatgggtgaatgcccacttagccacattatgggcaacaaaattacaagttctgagaatacacgaaaacaaacaaccattaaaatatttagagagctctaagcaacaattagagtaattctcaatctcccaacaagacgaagcgcggttgagagagttgatcacgaccctagagtcactctccacgatgacaaatttgtgaccgttgagctttgcggtttccaaagcttagcaaacagctgccgcctctccacaaagagcatctgcatagtccagtctagctgaatgcacccagaccacctcacccaaatggtttttagcaaccacggcaataccgaaataaaatctaattacacatacaaactaaatgaaaatactaattagctcaattggatgttagatgtattaaatttttggatactccatccaacatccgatccgattcaattgaatattcaaaattagcatcaaattcgattcaatcacaattggatcttcaatgtttggcggtcaattataattggatcagtcggttgtcaatgaattagattgatttatacacactctttttgcacaattagatattgagttccctatattttaatttgatatttatctggagaaattgtaaaccatttgtaaggtaacacttcatggtgatgttggatgtaattttacataaaatttgtgttattttttttataaaaaaaaaaaaataaataactttgtgatataattgtatcaaatttt

SEQ ID NO: 301426 - DNA, 2077 bp, Cannabis indica
gtaatgggttttatttagggcacaacacccaacatcagggtctattatctcttctcgatgtactagcttcgggggtccgtacatcgtgatacacagcagcaaacctctccaagtttcctcttcctcggatagaggattgggatggcgtgaaaactagttagggatcaagattttgtaatttttggctccttttgtgatgataacagccaaatcagtggcgatagcctccttcacttccttagacggttggggttgtccttggaggttgacgatatcaattctttggatgtttgtaatcaagccaaacctacggagaagttcagtcgtcaataagccctcgacctttagttgttcttcaaagaagaatctttattgagcctctttcttagctatctcctctatccaagtactctggggaggaagttttactaaaaattgtgcacgttaatgaggctagatataaaaaaacaacagcaacacaatagagccagaaatagacaagattcaaattagataattagaatacgtgaaaggtgaaaacttaggtgaagagacaacaccagaaatctggaagagaagaaccactactcgcaaaggtagtgagtacgatctgtattacaaataagcgaataagaatctggatgcttatccaatctaaagaaccccatctttttcctgtccgtccttataggattagcctttacactgtagaagtaaaggatttcctccagagaaggggcttctagcttattcatcttgcagaatatataccaccaagccaaaagcctatatgatgaggggattagttggaaaggggcaatcccaatgccgattctcgcaatcaagtttgtgaaataagttctcagagggaggtcagcgccattgaaaatctgagactagctccatgcactgaatccctctacactgatggaagcagattctcccataacagaaagtctatgccacattaattcagggacattgtgaaggctagcaacgtaagaataagcttgcagcatcccataagattagaagcagttggctttttgatccatttcccaagtggagtcattataggcctgcacttgcgggggggtttagagccccctttctcttctggtttccagagggggttctttttagtaatgggttcattctctggaatgattttcaaggacccctcaggtcgaagtgtcactctgggagccacggtttgatcctgtcccgcagaggttcttttaatagaggagatgagcacacctttagtaagtgtaaccacacttgtgggaaggtcctagctcaagtcaattgctactaacacaaaattaaagaaaaaaagcaaacctcacacactctacctagactaaggccctaggcaatctaatctcatggttcacgggtgtaagggcaaagcatctctcacacactctaccttgctatttgcacgtaaaaagtcctagctctaacctaaacaaaaattctttccttagacgcgaaatgcgaaaagttcaggtaaagggtcaatgtacttagttgtcaaatagggagaaaagagttgcgtgttgaagaagcctgcctaaaagctccaaagccagtcgatgcagctggcttgaaaattgaatgcttcacctaacaaagaactttgtcgatccagtcgaaggggtaaaatgtctgggaaaagcttagcgtggatgatgagtaatcgttggatcaaaccctctaactcttcttgcatgcaaaagtgtgctggagaagaaaaaggttacaaagaaaaatatgaagcttcttctgggaaaagtaaaaagaacgccattgagggaaatttatatttcaaaaagaaaatgggcctatgcaggatcaaccgttcagattttgcagagatccaacggctagtgagataaaaggttcatcttaattcacccagcgcccacttcaccaaaccataaatgtaatacctggaattaagaaatagattagcaaaaccctaactagataattatgtgtaattgaggaattttattattatatagttcaatatatgtgattttatatgaattttaatatattaaagaccccg

SEQ ID NO: 301427 - DNA, 3533 bp, Cannabis indica
tttaaatttagttaaatattaaaccactaacctcttagttatataaactataatcccattgcaccgttttgaactagagataatgcactattacgtttaattaaactcaactcaagcaagactaattgtacaccacaacctccccatatacattcacagccgccaaaaacgtcaccaaaccactaattaatactattataatataacatgattttgcctataaataagtagagtagtacatagtagttcttatcatataatacagagagagttaatagtaagtgtagctatagttatggagagatcaaataataaatttcgtagtttgggtgttgtagtagtgattatgttgtttgttggatcatgtagatgccaactaaccacagatttctacagctcaagttgcccaaaccttaccaaaatcatcagaaaacaagtcatgaatgctctcaagagtgagatgagaatggctgcttctctcattcgcctccactttcatgattgctttgtcaatgtaagtaattaaccttaattaatttatatgtatatggacttggattaagataggataggataggtctgtacttagggtccactcaaccaaggataaaagaaaaatttcctttatttttagtagctttaaaaaaattatacacatagtgaaaacttaacacagtataaaacttacacagtatttttgaaaaaaaattccgtctcgcagtaaaatagtaaaaaagttaaaaattttagtacgtggtataaaaactcaatatatgtatgtggtgagtttatatgataatatgtgatatgcatatgtatatgtatctagtttgaattttatttttaatatcataaattattcaaaatttgtaaaagttacatactaaaataattggaatataaattatataattgccataatagataatagataaaagtgatgtagctttccacctaaaaatctgtatatggactactatagagagtatatatatatgatataatatgatatatgtgtatatatagggttgtgatggatcgattttgctggatggagatggtagtgagaaagaaggagctgggaataagaactcagcaagagggtttgatgtgattgacacaataaaaacagctgtggagaatgaatgtgctggagttgtctcttgtgctgatattcttgctattgcagccagagactctgtcctattagtaattaataataattattaatctcaacttaattctttctttctttttgttcatacatacataatggggttttaatatatataattaattaataatatgtatatagagtggaggacgttcatggagggttttggttggaagaagagatggattagtaccaaacaagacaggagctgataatcttcctgctccatttgaatctcactctgtaattaccaccaagtttgccaatctaggccttgatctcactgatcttgtatctttatcaggtatatatatatatatatatataaatatatacacacaatttattggttaattaatgtatatatgccctcactttgctttgtcttttagaaatgttaaagtaacatgttttaccattctttgggataattaagtaatgttaattaagatttatactcttgaattttgatatatgtatcaattgtattttatgaacttttaaaatcgttaaaaagtttactgttaaaattattgagattgttggaataaatcatataataatatattttagagtaaataagtattttatgatcttttaagctttgtttgttagattgtgtctccaactttgagcttttgtaatttataggattatatgttgattttcattattagacttttgttaaataactagtgatcattttacttactatattatatttctatctttaaattttattactgtcaaaaaattttgtcaaaaaatttcgagtgatactagtaatacttaaacaggtaaaattacatattatttaatatcatattttactaataatgtttatagtttaggtcaaaaatttatagagcaaattaaatacatatttattctataatttagtttagtattattattaaaaaaattgtttaacattgataattaggtataccaagtggtgttgagcatggctaatagcaaatgctttttttatatgtatatatactaacaaatttttctaatcttgtttcaaaaaacactaaattataattaactatttactaataaatataattaataattaattcaggagctcatacaattggattggcaaggtgtgcaacatttgaagatagattattcaacttcaaccaatcaagctcaccagacccatttttagaaacaacaatgttaagtgacttacaaaccctatgtccctctagtggtggagatggcaacaagaccacagccctagatcgaaattctaccgacttattcgataatcattacttcaagaacttaatcgccggaaaaggactgctcagttctgaccagatcctgttttccggcgatgctgcagctaacaccaccaagagtttggtggagagctacaacaataatcaaactcttttcttggttgattttgtcaaagctatgattaagatgggtaatattagtcctcttactggatctgatggagagattaggaagaattgtagggttgttaattcatgagtatatattgctataagaattaagaaaatgtgttacaagcccctaatgatgtactaattaattactctctcgtggttaataattattagtgaataaaaatgagaaaagttagatttttgttctcatgtctatatatctttttcttacggaaaattagaaatatatctttaaaatattcaaagatattggtataaaaatattttcagtttttaataattatgataaattgattattaattaaaaattttggtaaatattattttagatcatgttttataaaaattataaattgaattttttattttgttaaatcacaaattaaactatgtatttttcaaaatagtacaagacacacactctaaacttttttttatcatataaaacttagtattagtaattcaatttagacgtgatgtgttatgataaaaatagttatattttttgtacatattcgtgctataaattatttttaagttggttatattaagaagaaagaattgtttacaataaatattaatgggtgattctacaatgcaccaccttaaaatggatgtactgatttaccctctacttgtttcagcatccagaaaaaaaatttcaatttattttttattcatattcatgtatgttatagttatttaaaatattctacaaaattttgagaaattcaaaataatttacaatatataaaataatgtttaaagtaaccgtctattttacacgcgtataaaataaaatagtcacacatgcaatataatgtttgaacgtaatttttggcatgttaaacttttctgattttcttaaaattttgcaggatgtcttttataactataatttacatgatcat

SEQ ID NO: 301428 - DNA, 2852 bp, Cannabis indica
tttttatgtttatcctcataaaatatacattttcagttatatatatttttatctctataaatttataaatttttatctctatgaaatttataaaatttttatccaacaaaattaatatttttcatacatatccgatttcaaaaaagaaaaatgttttgcccctcctaagataagctattatttaagtacatatattttgtgtacacgtattaccaatctattatcaattatattaaatcattagtctactttggcttctccatgcacaattgagtccaataattcaaataaaataaaaaatagagttgggctaggctagcttgaccttctccaaagtgaggtgtttgccatgtgtattacatgtgaaaaataattcagtgaacaatttcataacaaaatagacacccccaccttattatgaattgctaaaagatactattggtactaacactctcctcagcgttatattgttattgatgtatttaagtatcagatctcatatataaaataaattttaaaaaaaaatatcgctaaccaattctaagacgctaccttttaaaaaagcaatgctttcttattatgtctcgtgaccacttttacttataacccaaaaaagtttcaatctttacacaaaagaacgtgtgagttgtgaattccatatataccatcatcaaaccaagtaataaatctccaattaactgtcaaaacaaaataaaaatccaatctttatctcaattccataaaagggtatatactatatactcatgtttttttgtatttatcttgtctttcttcaaaagtcaattccctcataaaaaaatatgaacttgattacaaaaccaacatgggttttgtccttcttcttcttgttcttcttctccaccatggtttcaattactatctcatattgtgttagtgaagataataataatttatgttgtaataataatgtgtatgaagggagttgggttttggatgattcatatcctctttatgactctaaaacttgtcctttcattagaaaagaatttgattgtcaaaagtatggtcgaccagatcatatttatctcaaatacagatggcaacccaatgattgtgacttgccaaggtcagtcatttattctcatcatcatcatcatcattatttctcaccaaaccaaaattcactatctgggtttttctcaggtttgatggtggagattttttgaagatattaaaagggaaaaagattatgttcattggtgattcaattagtttagaccattttgaatcttttctgtgtttgattcattctgcaataccatttgattctgaaatcattcgtgaaactaatggttctgtttcttccatcatatttaaggtaagtgtttggggagttttatgttttgagtttctttgagtttcaatgataatgttttgactatgcaaaaggaaaatatttttgcaggattatgaagtttctgtgatgttatacagttctcattacttagttgatattgtagaggaggcgatcggtcgggttttgaaactcgattccttgaacggtggagatgtgtggaaagaaatggatgttttgatcttcaacacttggctttggtggtatagaagtggagaaactcaaccgtatgaatgaactctatgaactcaaaaaatataagcataagtatgttgtttttctctttgttatgaacttttttcggttgcagatgggattatgttcaagacggtgacatgatactcaaagatatggatcgaatggaggcatttcagaagggtttaacaacatgggcgaagtgggttaatacgagtgtcgatatagaaaagactagagtcatttttcaaggaattagtccttcacattacaagtaaagttttcttcacttcacttttttgtgttctgttttttttaaggtaaaaatctgttcttgattagattttttacctctttgtttgattagagggagtgaatggggtgagcctaaagtaacaaactgtgggaatgagacagaaccggtgagcggttcgatctacaatggccctttaccgaaagcattgtttgttcttacagatgtgttaaaccagatacaaaaaccagttcatttgcttaacataacaacattgtcacagcttagaaaagatgggcatcctagcaaatataatgcctttaagggtatggattgcacacattggtgtattgctggtgttcaagacacttggaatcaacttctatatgtagctatcaataattacaatattactatatcataaaagggttctctttttttctaattgaccactttttcaatacaagtactcttcaataagattatacattgtaatctcaattttgtttttacctattgctgattttaactaccgtccatgtacaatccatactaaatttaaccaactgccaatcctactttctctatgttcttgacagctcatttttgtttctgtaaagtttttcaatagcatgtttcagtcattttctctattaattacaatattactacattataaaagattgcaatgtataatattagttaatagagaattttttggtttgtctttccctactgctaactccaacaaccacccatatacaatttaggctaattagcaattttttatacttacatttggttacaaatttttttctaaacaaataataactaatatttgtacgatatatgacaacttttatgatattcctaaaatacctccatttacatcacccccatttataccatcggaccacccatcgggctacccatcggaccacccatcgagccacccatcggaccacccatcagaccacaccatcggacccatcggaccaaatctgctac

SEQ ID NO: 301429 - DNA, 4166 bp, Cannabis indica
actgattcacacaccatatttttcgtaaagtttgcatatagaaaaatctttatatcaaatttacgaatccaacatagacacatccaaatttggttatgtgagttttggttaagaatataataaattacaatatatgtattatcagatacattacttaattaaaaaaaaaataaaatttaaaaaatatgtatatataatcacatttaaatgacacaccaatgtaataatagctaaaaataatttcttaaagatcaaaatctcaaattctatttcaaaaatgaaaaagaaaatacattacctaattaaagaaaaattaaacatacatgtattgcacttaacatcacctaattgaacctaattaaaaagaaaactaattatacttacatcaacctattattattataactatatatatttattgaatcttgaccttaaaacaattcaagaactttaattaaatatttaccttaaagtttgatttgagactcgtactgataacttataaaatatatataagaagaaaagaaaaatgttgtaatcatacaacacaaactcagatcagtctaatggttagataatcaacaataattaaatgacaaaaccaagattataaacaatataatttgaacaagaaaacagagagaaaacacaagcaattatcctggttcggatctcaaatcttgagtcctactccagctctcccccaaggagatttctccactatgaacttgcaattacaaacaccaatttctgtacaagatcatcatgaacactcttagtctttctaggctcttgaacactcaaaaccagagcaatttagccaatctagacttaagtttcatctgcataatctctcagatctctctctctctctgtatcttgtcttctctctctcttttctgctccctttcatcaagagaattgagcctatatataacctgttagatgctgacatgtccagctcttaacagttcaaccgaagttagttaataactaacacaataactaacaactaactgatacaagatgaaagagttataactgaaagtaactaactttcaaatatcagtggaggtaaaaactggtttagttttgagtggattatttaccacaaaaagaagataaagagagcaagaaaaattgtataaaaattaaattgtttattctaatggggtgaattcatttttatacaaaagtattaactaaagaaataaaaaattaaatcaatatataataaaaaaaatacgtgataattaatttggtcatttgaacctccatatataatattttataccaaatctatttttttaaaaaagtaaaaaaaatatatatgcttgtattaattggtggaaaatatcctttgtaggtcatggcagcacctcatatccaagtgatattttatatatgtattgattgattgagacataaaatattatctcagtacttaacagagcattgctatgggcattagaaaataaatgggagtgactatacattagaaaaacctagctaaataaatgtgaagtaaactatgccactatggctcaaaaaataaaataaaaatctgaagtaaagtacgactattttatttttcaagaaagtacgactagaattttgtccacatgtgtagtaaccatacaataatttaatttaatttagtatttattctattttagaaattttaaaattttgtctccaatgcctttcaaaaaataaataaataattaaataaaattttgtttccgaaagcataatatagtttgtatcaaattcaaaaggtctttaattaacgcaaagttgaatccaaagtgaatacagagtcatgtttcctaagcttccgatattggttctcttagtatcaacaataaccataacattagttccactcccaccagcattatcccaagctcaccacaataatctgagtttcgtcttcaatggattcaagtcaggcgacgttgaactcgacgggatagctgaaataacttcaaatggcctgttaaagctcacaaacgacacaacacagaaagcgggtcatgctttctttcccaacccagtaactttcaaggcaacaccaaacggcaccgtttcttccttctctactacattcgtcttcgccatcagaaaaccgtacccggatttgagcggccacggcatcgttttcgtgattgctccgacgagaggtcttcctggggctcgtcctagccagtaccttggcctttttaacgaatccaacaacggcaacgccacgaacagagttgtaggagtcgagctcgataccattcaaagcactgagttcaatgacatcaacgccaatcatgtagggattgatattaacgatttagcctccgttaaatctgagccggctagttattttgacgaaagaaaaggtgggtttaccaacttatcgcttataagtggtaaatcgatgagagtgtgggtcgattatgacggtgttaagaagcagatgaacgtgactttagctccgtctgaaggtctcaaaccccagaaacctcttttgtctttgacggaagatctttccccatttatgaaagacaccatgtatattggtttttcttcatcaacaggctctattattagtaatcactatgttctgggctggagctttaagattaatggccaagctcaagaacttgacttgtccaaactcccaaagttaccaagggtcggaccaaaaccaaaatctaagcttatgacaattgggttaccagtgatgttgactagcttggtggctttagtgatcttaagcttagttcattttatcaaaagaaagagaaaatttgctgagctaattgaagattgggagtccgaatatggaccccataggtacaaatacaaagatttgtatatggccacgaagggtttcaaggacaaaggtttattgggcgcaggaggatttggcagtgtctataaaggagtattaccatcaaaaacagagattgctgtcaaaagagtctctcacgaatcaagacagggtatgagagaattcgtggctgaaatcgccagtctcggccggctccggcacaggaatgttgtacagcttttgggctattgtcgccggaaaggtgaacttcttttagtctacgattacatgcctaatggaagcctagacaagtatctatatgacaacccaaaaacgacactaaattggagccaaagatttcgagtcataaagggagttgcctccgggctatgctatcttcaccatcaatgggaacaagttgtcattcaccgtgacgtgaaagccagtaacgtgttacttgatggggagttaaacggtcgattaggggacttcggtttagctagactgtacaaccatggaagcgatccacaaacaaccagggttgttggaacactcgggtaccttgctccggagcacaccagaaccggaaaggccacacctaacgctgatgtcttctcattcggagctttcctgctagaagtggcgtgcggacgacgacccattgaagggagtagaacagagacaggggaggagcttatattggtggactgggttttctcttgttggtgcagaggaaacattatggaggccatggattcgaatctaatagaattagattctactgaagctggactggtattagaggaggaagtagagttggtattgaaacttgggttgttgtgctcacattcagaaccgaggatgagaccgaccatgatgcaagtggtgtcgtttttagagagagatgcaccgttgccagacctgtcgacaacggggctgaccgcagcggggttgactttcgggcaaaaagaagggtttgatgactttgccatgtcgtatccgtcgtctatggcgtttcactctcatgtgtccacagcttctgtggctgagtctcttctctctagtggccgctgagctgaatccgagttccgagttgagttctagcgcgtgaactgtgactctgacgtgcgtgaaacttattttggttatctgttagaaacctgtacattttgttgctttgttgccataattgtacgaagatataatgatacttacacatgtttagtttaatttatttttgttgtataaaattaagaaatgtaatcgtgttgctactttctgtaaaagtatttattttccctgtcttctttttttttttttttttgtttttttttataaaatg

SEQ ID NO: 301430 - DNA, 1249 bp, Cannabis indica
agtagttatcaaatatatatatatatagaaaagttctatggtgggtacacttattttatcttcatatatatgtctattgagatttgaattggtattacttctgtatgaattttgataaatatatagaattttgctgaagcaaaaaagaacctataatttgtcaaagtctatggtacagaaaataataaatgtaatatgcctgtaattaacgtaaagttgatgtgatactaaacgagagttcgatcgattgagtaagctgtgcttgtttgcattttaccatcactgattttgtcatttgctgaatgttaatgtatggggagacaaatagaaacttttcgaaaatttgtctataataaaatatatgattcaaaatattttactacgtaaagaatttgaaaggggatatgaattatgttaaacgtaataataaaaaagtttccaagtgggagaagagtttcgtcttattattaagagaactattaatttattgcatttgaaatgatcaaccgatcgataaacacacacaatcattattataaactagaatatagtcataaacacgaggatcaatttagcaaaacctaaatgaaaatgatgtggaatttgaaagtactattgtggaagttgaggtgttacacctcaatcctattgtatatattttttaagttggagtacaaagcggcacctattcccaatgaaaattatatctcaacaatacttttaactttattagaggaattttagttttattttttctttttaccattggagtatatttttgaccaatcctgcaaaaatcataatacattatatctatggtattctaacattccgtacgggtggtgatatttgtggccttacacgtttaaactagttggcatatatatgttgttgtgggtgggctcatttgactcatactgacttccattaaccaattcatccaaaagcaattcctattaaccatgaaaggtcgactagcttagtacctctgacgaggacaactatttaaacatgaattagtaacattacatacattattcccgttttggggaattacctcgtatactggttttttaatatatatatctatatttttttttttaaatttaccgtttaggtttctaaagtagtttctccggtggtttctatgtaagttgttatacgagtttttgttgcgatttagattgcagctctagttgtaataggagtttctatgtagaattcaataaaaatgctaaaaaaactattt

SEQ ID NO: 301431 - DNA, 3155 bp, Cannabis indica
ttgttagaagttagttgttctgttatgtcctatgcaactaactagaagttgtgtattcgagctatatatagctcttcctttgtattctgtaatcaactctagtaaatcaataaaacagagttcattgtttgcctttttttattcttttctctctaattgtaatatggtatcatagcaggttcgcctgtgattattattcttcttcctcctctctctgtttctattagcaattgctcgaggtgcaggagctcaaactcgaagcaattctgatgcttcaaatcgtttctctattttagaatcaagcacttgatctttctccgatgatgctcgaaatctttattttctttctacttgtgatcatcctggagcaagtttagttccaaaaatattgattggatgcgagaacttcagctcatggcaccgtgctatgcaagtggctttgattgcgaggaacaaattcaaatttgtcaatggcaagctccctgctcctgaagaagacgacgatgaatttgaattgtggaatcgatgcaacagtactgtcatttcttggattctccatgttgtatcaaatgagatcgctgaaagtatcatgtacatggacaatgcaactacgatttggtccaatcttaaagaaagatttaaccaaaaaaatgctccctgagttttcgaagctattcgaaccaagcaatcacttgcccaaggttccaatagcataacaacgtattccacttgactcaaatctctgtgggatttgattcaagaatataggccataaccagtttgtacctgtggtgccatgaaaataattcaagattaccaaaatgaagatcgagtacttgagtttctagttggaccatataatggagctagatctcagatcttaatgcaagatcccattcccaatattaacaaagcatatgctgcagtaatacaagaagaaagtcaaagatgcttatctaatgctcctactaaaggtgacaaatatggatctggatcgaaccagggtcaatttgctagagttgtgcaaccacatcgatccaatttagtttgtactcacggtggaattactggtcacacaatatctgggtgtttttgcatacatggttatcctcctggacacaagcttcatgggaaattccctaacaaaaataccaatgctccaggaaataatcatggtcataaacctagtactgctaatgttgctggtgatactacagataatcttggcaaaatcaatgaagttgttgatagtgatcaagatctagtttctagcctttcatctgtgcagtatcaaaagctaatggcattgttgtcccaaaggattccagaaatgccaccttgccccactgaacctcccatggtttctcaattttctggtaagcctttaaaattgcctaagtctacttggatcattgatacaggtgctacacaccatgtttgtcatgacctttctttatttcaagataagttttttgatcctaatctcactacagtcaaattacctaatacagctaatgccaaaaaaatttgcttaggcactatacatatcttaccaaacttgtttcttcacaatgttctttatgtcctatattttcattgtagtctattgtctgtgagtgctttgactgattcaggtgcttattcttttaatttctaaactaagcactgcatcatttaggacaatttgaagaaacaggtgatttggatgggtgagaagattggaagactctattatttgaagtctactattatagctcctaaagatcagcaacctctcatttttttctattttttctgattcaaaaatttctggtgacacaatatggcattatagatttggccattcatcatgttcaaaacacatcctttgaataaagctttgtaatttcaagtcaacacttctcatgatttccattgctctatttgtcactatgctaaacaaaaaaggcttccttttgtttccaatcacagtatgtctacacacatctttgatttgattcatattgaaatatagggaccctttaatactcttactctagatggctgtaggtacttcatcactattgttgataattattctaggtttacttgggttcattttattaaaaccaaagctgaagcgcaaattgtcatccctcagtttatacagcttgtcaaaacccaatttggagtccaaataaaaggggtcaagattgataatgccaaagaactccaatttcccactctttttagctcccttggcattatgcactatcactcttgtgtgcaaagacctaaatagaattcagtggttgaaaggaaacaccaatatttgcttaatgttgctcgagctttattattttagtctcatattcctctggaatattgggatgattgcataaccactcctacctatcttattaataggactcctactcctaacctccaacacaaaactccttttgaaaagctcaaaaataagcctcttgtatatgaccatttaagagcctttggttgtttagcctatgcatctaccctaccccgtgccagatcaaaatttactcctagatcttccctttgtgtgtttcttggctatcctaatggaattaaagcctacaggttacttgacctgaacaccaacaaagtattttactatagggatgttctgttgcatgagacaattttcccatttgttgcttatgcaacattacctcctcaatatgatcatttttcccttcctgttatgactaatgatgtccctgttgaatcttccccaaccacatccagcagtagacctactagaaacatcataaaaccctcatacttgaatgattatcattgtttcttattctctaacagtgtttctatttcttctcaggaatcaatgcctgtcattgcacaatctataaaaataggtgcttgattactcaaactgtcaccaaaatttcaagctcttgttttggccatttcaagtttgacagaaccaacatgttttgagcaagcacagggaattcctgagtgggacaatgctatgtctacagaaattattgctctagaggccaatgcaacatggattattgtcactcttcctcctcgccagcatgtcattggttgtaagtgggcttataagattaaatttaatgttgatgggtcagtagtgttggaataattttacc

SEQ ID NO: 301432 - DNA, 1061 bp, Cannabis indica
tacttactattacaagtaaaaataaataaaaaattgacatacatctactgaatcgttaaaattataaattaaatagaaacaacaaaactacaataatattaaatcacccatcatgttactgtctccatcttcatcttcatcttcattaaaatcaagttcagcaagcaattcattcaatggaattgatggtggtaaatctaatccatcaccaacctctgttgtttgacattatggtacaaagaaacattaaacctcatatcaggattctcctccaaatcatccaagaattgttcatactctgacttcatcttctcttcttcccctcttttatcattctcaatctccatattgagtgccttgagcttccataaccgcgccttaccgcgcttcctaaggcctttctcttcgtaacttttcttcactaatatcacatcaggaataacaatattcttgtaattgtccaactcaatgtcattacaattagctccatacaaatcataaccaagagccttatcaccaggctttaaaagatgaccaatatgagttctaatgttgacaattgtatcattcttgccaaaatctgttaaccttgcaacttgggcatcagctagtgagtaaagatttcaaagaggatctcaaatatcgatccccatcaacataacattgcctcaaagtaaaagggtcaagtaaggaaatggtattagttacttttgtgcaaattactaaagggccaagatttccaagacttaatgacactttggatggtaaacatatcaaatcttcacggcatattggagatatttcaacagagaaagtgtacttgtaattgtagttgttactcttggtatcatgggagatgagttgcttgtcgtggcggcttctgatcaccggagcaactttggcgatgaactcgacaaattttacaccttggcttctgtttgagaaaaagaaatcgattcctttgtctacttgcttgatctttatggctgcaactgcagcaccatgcttcaaaatcatctgttccaatcaaattagtcattttctacaagctaattatctaa

SEQ ID NO: 301433 - DNA, 4586 bp, Cannabis indica
attttttaatctcgtggaaggaaataataaagttttaaaattttcttgtagatgatggtggtggaatggatcctgaatccattcggaaatgtatgagcttaggctattcttcaaagaagacaaacacaactattgggcaatgtaactctcataatttttctcattgcattagcttttagtgtggcatgattgttttatcatatttgtaactaaaaccttttcaaggtactttagttacataaattcttgttttgacgtgactatcttttaccttttcaaccccagtatgtttatttctcattgtttcaaggatgtctatttctagatggtaatggattcaagacgagtaccatgagattaggtgctgatgttattgttctcagtcgtgcagttcgtggaaggtattccaatctttatatggaagttggtattggattctgtctggaaaatagttcagtcatatttacttgatatttaaatattcgagtacccatgtcttataataattggtttgattactgcaataacctcttaagagggtgtctatattgtcaacatccaaagaatagtctttccattccctcataatattctctttacttacatgtctgtggagctgtactttaatttctcattactccaattatttgctaggcactggtttagcaaactcattatctcttggacgaaagtgggccctagcttgaattctccatttctagtgatatattttaaataattgaattttgactcagtcatttatcttgcatgtatatgctttgttatattaggctgcatttttccataaaaaaaaatagtttgcattcttttgtcttgcatagtcacttaccagtagtagctttgttctacactgatgttatttatcaattttttccttctcatgataatgcatagtttcttattgtcagattgagcaataaagttccaattttcagtgacattttttccttaaattgtatttagccaagccacgcagagtgttggacttctatcgtatacatttttaagaaaaacaggacaggacgatgtgattgtgccaatggtatttaaatccttaacttccagggttgtagtttcctttttgagtgttgcaatcatctatattttggtatttataccgtaatttgcttcaatgcaggttgattttgacattagttctaactgggcagaaccgataatttatggttcacatgatgattggtcttctaacttgaaaacaatccttgagtggtctccattttcatcaaaggaggaactcatgctacaggttaatttggttatattctctctacagaagttcagaattatctgtaggttttgttaactgtaaattattgttgaatttctgcttgtcttactcttacattattattaagataacatatgcttttttatgtctgttgcttacaaattactgactgtagttgttcttattcaattttttgggcaaggagtcagtgtgaatgtgattgtggacattcacattttggaatttgcagaaagaaatttgaaatttatttaaattttgttaaaacttaagtcttcaacaaccatagccagattatttgtacctttggcttgctcttataatccctgaatggtttgttatatttctcagtttgaggatattggagctcatggaacaaaagtaattatatacaatttgtggctgaatgatgaaggcatatatgagctgaattttgatgatgatgatgaggtaagctgcagccggtggtgctgaaactgttatgtaatgttttcttaaaaatcctttaatctacacaattctttaggaagtgctgttttatggtaatgtgatatatattagatgtccctaatgagatggtatacctataagaatgaaaaaaaaggagatgatttaaacaggtggagacttcagtaagcccgccgtacctaaacactaattacctataacaagcatcttctgtcacccacacaatcttaagaagtggaactgtggaatgttagtagtcacataaaatttgttttactttttttgaaaaacataaaatttgttttacattcacaaatctattctatctaccctttctaattgtgaagtgtttaaattattgagaaatttcaaccatgaattaagaaaacatggtaagagtaacaatctttattaaactagcattactttgttatggtgtaacatttcaatattccaaaaccttcctgatgtaaaaccttcagcagtcataggtctgattttaatagtgaatatggttcttgtttttccttgaccaggatattcggttgagagatgaaactactcatggaagttcaaatcaaccaaggagaagaatagctcaaatgcaatcccatatatcttaccgcatccgttactcattaagggtctctttgctaacttttagtggtcttcttgttgtggttctgctttgcttatttgacaaatgttattttataatttcttgtttctaggcatatgcctccatcctgtacctcagaaaattttcgaacttcagtataatactaagggggaagcctgtagaacaatttaatatagcagacgagttgcaatatccaataattgtatcatacaggccccagctgggtacagtagtggccgaggtaattctatgattcaaagcgaagcattaatttttgccttttttattatgctctttcaacacaatgatatcatgataaataaaaatggggttttaattatcgcatagatagtacagaattagtatttgagatttattcaattttgagttcttaaaattttagtattttataatctttttgagttagtttccaattgtattacatttcttatctgtctcagtatgctttttttacctatctataaatatggctaattgtgtttattatttgacagaaaactggatgaattattgatttattccctcttcctttctcctagttttatctttttctctattatatttgttttttaaatctctttaaattccccttttttattcttgtttgtgtctttaatctctttaagttcctatattatctcttcttcactatctttatttgtctcactctcaattttccttcattaattagtatgggataaacgttattttgtattttgcatctcttactaatatcaattctgcaaaatttacagagggagtataatatttaggccatctaacatttaactaacaatcttttgttttaggcagtggacacaaaacttgggtttataaaagaggcacctgatctttcagtttgtggattcaatgtttaccataaaaatcgcctcatcagggtacgttctggtagtgttacctttttatgctgctcaaaatctgaactgtgatattttgcatttgctgtaaatttattacattgaatatcattttcggggttgtttttagttatctatctttacacgtatgagaatgatttactggactttctaatggtgatgctatgtatctgtccacactgttgcagccattctggaaagtcactgctgatggctcttcgaaagggagtggtgttgttggtatttttgttgttctctttttttcccccttctatattttatttgtataccagggcttttgatcaagtattcagtcatttatactttttcctttatattcagttagtgatgattattgatgaatactgtaggagttcttgaagcaaattttatagagcctgcacatgacaagcaagattttgagaggtcatcactgtttattcggcttgaaacaaggctgaaacaaatggttaatgattactggtgagttgtgtatgtctagtgactctagtccaagtttgtgacaattttgattcaatctccctatcccttgttctaggtcattcttttcttctctctctctgtgtacacgtagccatagtttcatggttgtaactttcttaaatttttcacatttaaaataataaataactaactaatatgatttggacaagcaggaaagtcaactgtcaccatatgggatatcagactcccggcaccagtgtacacaagacacaaaaggatcgccctattcaaattaaatcttcggctggacttacttctaatgttgaagccaatcaaactagtgttggtcttccagctaatgtcacacatgatttaaggaatagtttacctcctggattcggtccaagaactggtgttcgcagtaaattgtctagtgtaagtgaccaacatattctttgttattgcttcttttgtgtatgttcttccatgtttttccaatacaattactggagtgcaaggttacccatatttagttacatggccttatgtatatgtcagataggttccggaagtaatcaatgttttaaaatgcaggcccatgtggaaacatcagctgaagtttatgtctagctttatagcattttaaatacttggacaatacatttttacatttctccactgatgctaggtgttacgtgcagtctatgatggcacgttacaagctaagtgatgcccacaagttggccaagtggtggtcaagtgggggggaatgttgtggtgcatgcaggtggcatgctgatgctta

SEQ ID NO: 301434 - DNA, 1700 bp, Cannabis indica
tgaaaacatagaaaacaagcgtaattccgtcccaacacagctaaaaatgcacataaattggatccaaaacataggctaaaaatagcctaacaacaacacgcatcaattggacatttaattacatagctattttttaatattaacttaaaaatgtgaagaaaaataagtaaaaactaaatattaccaattatttaagtttaatactccataaacatgttgctttcaaaaaagtactccataaacatgtcaaataacttaaacaaccacactatatcaagtaataaaataaaataaaacaaaaaatcatgtacaaacacacaaaacaatcaagtattataaattcaaaaaaaaaaaagaaaaaaaaaactaactaactaacaataattaaaatatatattcttaaaaagaataataattaaaatatatatttttaattttgaaaatatttttattatatataaataaatataaatatttttttaatatataaatgtaattggattaatttttaagattggtattcataactcatcaaaaattaatccaacttttaatgtcaaattcaatttaatttatctaattttttgtaattagattgaattagaacaataatattcaatttgattgaattggatcattacccacatctaaatgcaacaacctatttgaattttattggaaaaaaaaaatagaatttttttttccaaaataacaaagtattctacaaaatctattaatggtcatgcatagatagaactgtataaagcaaaacgtgccatattgtcacacacactcacaatataattgttagttatgtgagcgcacgtcttaaaatgggattgagacaaatgataatatcctactaaatatatcattaatgtcatcatggattaagagtaataaatatcattgattaatctatatgcaatcaagttagtctctaccattttctgtattatatttattttccaaatattatatgtaattaattaataatgatgataatgacaaacaatatattttcttcctataaagatgaggatgatttcatgtagaattcaaaccatttccttcttaaacctctctctctctctcactcctacatttgcaaattagtcaaatatggctcgttcaagcttatgcattacctctcttcttctcttgtccttagtcatttttgcctctgctcattatgatattaaacctaataagcttaaaacccctacaaaacaacaatatgggaaaccaaagccagatgaaaagataaaatctactcctacaaaaccaaactatgcacaacctgaaggcattaagaagaaaaccaattatgctccttcaaaacctgtgtatcatgatcagaagccaaaagaaattcccaccaaatcaaactacaagggagcatcaccagttccacaacaagaaaataagagtatacttccaataactactattgctgttcaaggacttgttttatgtaagcaaggcctcaaatacttccccattcaaggtaattaaacataccactctacatctctctctctctctatatattgctaacctagtcattctatgaataatatttctatgttatgtatatactatataactttattttgttgagcaatttgcggcgaaacccctttatgttttgatttttatacacttaacccccttatctttatttttggtggcaaaacccc

SEQ ID NO: 301435 - DNA, 3026 bp, Cannabis indica
ttttttataattaaattgtaattatttaaaggaaataattgtcaaaaataagattaaaattttacagaatataaaaaattctctcaattacacgcctcgaattgggtttttcagtgtttttggaaacgtgacgcactttgtgaccagcatctttctttcttgattgaatttattttttatttttatttgatgttttttggtttgatggaaataaattacttccaaaaataaataaaatagaatatagaataagaatattccatcgaaaatagaaatctagagatgaagtcagcatcaacaccagaccacaccaaaaccaaaatcaaaaccaaatatgttggaaattggaatttggaaagcaacttcatgtgaacgacatgtcgttttatgttatgaagtatgaacaacttgctgccattcaaactttgcttccaaaccacatgtcgttttagaactttgtaaagctttattgccctttttttaaaccttttgcttgtttttcttctcacaatgaaaatacactcaagctgccttattattctaatagtaggttgtgtttatggtttggtttggtcctaattttttttttttcgaaccaaaccaataatgttacaattttttaaaattcaaaactgaagcagactaattaaatgctcaaaccaatccacttaaaaaagattaatttggtgcggtttggtttggtttgatttgaatcacaggctaaaattttaaaaccgtgatcgaaccaaagaattataatcggtccagattgaccaaactattaacacctgattcatttggttcggattggttggagtttggaaccacgaattgtgaattatatgaacaaccctatctaacgatctcattttttgtatccatatttgtcattcaacaacaactacaatcagttaaaatattgcagtagaacaaagtataaatggttacaagagcaaacaacaaaccaagatcatcaaacgaaaaacagtttagtaacaagggggtgggatttgggtgccaatgaatttagctctaacattgctacacaaagaagttgaactcttatcccctgatgacaaattcaaatgaacatcttcaaggtatatattctgacatggaaatcctctgctacattctaaactcactgctacctcagatgatgaagttcctcttatgttcttaaagtaaatgtcactcaatttcacccttgatggtgcctgcatttcattttgtatatcaatgagtttattaaaagaagaaataaaaaacaacaccattgtatgaatttgattacttaccttagaagaacaagataaagatggacaataggattggtctattataatgggattgctcacattgttcattacaatgttcttaaatgtcatattagtggctgcactacttcctggtgagttaggccatgttttgatcctaatcccattacttgttcctgtcattatgcaatcttttacaactaacccacttacatcttcttcatttggatactttcccaagcttccaacactgtcaaaacaacatgtaaacatattagaagaagagtaagttcaaaccgaaaagaggatgttaagtacaaagaccttatgccatgaccaggtccacaactgatgtttgttatagcaacatgagaattcccttgtccaattgatacgcagtcatcaccagtacctattcttgaatgagatacatagacatgagagcttctttcgatatggattccgtcggtgttagggctatcttcaggggctgtgatcttgattttgctacctatgaagttgttacatcccacaagagcaatatgaaagaacatgctgtttattgaagtaatgtcttgaactaatgtcttgtttgttcccataaatttgacactctaaaaacccaaaaaaacagtctttattagtaaagatttttgagcctaaaaagtatgatttaacagactatatgctgaaacatacagttggaagaattctacagttggaatcttgaagacaattgttgtaaggccaagctttaacaccttgaccatcaaaagtaccacctccagtcaaaattaacccttcaagccatctaaactcaatccaaccaccaccagaatcatacttaaaaagttcagttgaagccttcaaataaccctgcaaacatagtaaccaatcaaaacaacataacaaaacagaactagtcatgaaatgaaagagtaaacagttcttcttgcctcgattcgaaaagtgagggaagatacatttttgcaggggcctgaaaacttaatagggccaatcaagtatgtcccttttggtactaaaagttccactctacctttggattcacaagccttctcccatgctgatacaaaagcctatagacacaaatagaagtaccataacataagaaaaagatcaagtttttatttgttttgaacccttaaaaacacagaaaaagacattaaagtaatgaaatcaaacatgggtatcatcagtttggccatctgcttcagcaccaaagctaatcacattgaattcaaaactcaaagcttttgtctttgacagctctcttgtactaacaaaaacactaaggaaacaaaacatgaataacatcaaaaacaacttattattagtaccaaagtgaagactcataatgttacacattgtagtaagtaaagaatgagcttggttttagtattgggagtagcctaaaacactaatatatgttgaacattgtaatttttaaactatttcaagcgggaatttttttgggtttgtaaataactgtaattaactccctaattccattactttagttattctttatttttatttgattttctaagtttgtaatggtagtcctaaaaatatgggtaatggggtatcggttttctaggactgcttttttaaacacgttttaattcggtcttttagtaaagcccatgttgttgactacttcttcttaagtcaacaatatggtagtttacaaacaacaaatataagaccatggcaatcatatattatcta

SEQ ID NO: 301436 - DNA, 1096 bp, Cannabis indica
cacacagatgctaagcccattaactattgatcaccaacaataaataaaaaagaactatccaaccaacccaagttttagtaaaactaataaaatttaatgtaagcccaaataaaaagcctaacatttctctctttcaagttttttttttggaacaagtttcatccattgacctcgtttccaatattaaccacttgagagatgtgcattttgagtttattttaaatgacaatataatgagagagagaacaatatatagtgtaattaagcaagtatgagttcgcttgctgacataatgttatatatggttgatctaattttttttgttttttaatagctatgaaataaaataaaatatataggggtatatgtatataggcccagtttagtctaccattaaaaagtagtgtcttatttatttaatatatcattcttgaaaagagattcatgtggtaagttgcctgttaaaaaaaaacttttagatttttttttgtttaatttcctttaccaagctaaaaatgtaaactttgggtctaaaatacctgttataaaaaaaatgcccttattttaatttttgaattcacatttttttatctgtttgtttatataaaaaagaatcctaaaaagtctatttaacataatttagtgtttgtttatcattttgtaagaattttacatttatcatatatataatataaaaaaaatgatgaacaaatccattagtataattattacaatatcaaaatgttgatgaatgaatttttatatctatatataaaaaagaaatataaggaattgatgtgatattttagatgaacttttattttttttctcactcatttttctcttttagcttttattaattttttctactatttaatattttgattacttatatttaataataatgtaatattatttcattgacaaaattagcgactttttattttgataaatttcgtcctaattaattagtgatttttttattttcatgacaattaaaaaaattattaatgtcttttcattatttttttttaaaaaagatgttattatgtatagtatatattgttatattattttataatataataagtgtaga

SEQ ID NO: 301437 - DNA, 1057 bp, Cannabis indica
aaaacagagcagagtattattattttagtggaaggtcagggtcgaagtttgagttcgaagtctaagtctagggtttgggtctaggatcggggccagggctaaggtctaggcctgggactggggtttaggatcgagcttggatctagggccagggttgggtttcaggtgcgggtctgtggtcgggtctggggccaggttttggatcctaggctgtaggggtgagcaaaaaatccaagaaatcgagtaaactgagtaaaccgagtacaccgaccatccgaacaccgaaaaaactaacaccgaaaagatcaaaactaaaaaaaccgccttcagttaaaactgccttaacatagtcagttttagtgtcaatgacaaaccgaccgattaaaccgaaaaccgaccgaacatatatatatattatacactatatatataatataattatttttgtacatattatactttgtatactacattacaacaagaaataggcctataatcactaacaaattctagatatttgctctttggaactagtataatcactctagagtttatctctttcaatatgttacacgtgtgaagaaaagaaaagactgattaacacatgtttgccgccacaatgtcccaacaatcctagaaaaagaagctattgtattcgtctagtcccggggcttggggctttgatacctggaattgagaatacaacattcttcacatccttgatagagtaaagggctaataaggccataacttgttccctggacacaaatgtacctaatctcacaatagtccttttcattttagttcaagcaaccggtttattgcccaaccgattattataataatcaagaaaaacttcagtgacatcattaggctcatccacctaaatacccacaataaatctgactgaataaattacggacccaaaatttttattttgtagaacttatttattattaaaaaaatattgatacttatactataatcactcttattaggtttatttgattttgtgagggtctttatattattttgatctataattatcaaattaaaa

SEQ ID NO: 301438 - DNA, 1265 bp, Cannabis indica
aaaaagaagaagtacaattttttatagtttgtaaaaaatgtaatttttacaaaattactaaagattaattaaatttttatattattagaaggttttcattgtaaaaatctaaaaataattttatatttaaattttgtaatattacaatgaaagtatatagagttaaaaaaaaaaaattaattaaaagtgtctaacataaaaatcgaaggtctccatgcttattttcttttataagtatgaaaataaattttttgagctcttatttgagcatatttgttttaaagcttcataacactacaataaatactattataatattttcttttaaaagtattgttattgagtattagtggtgcctaatactttttaaatgtgacactctacaattgtttaataatattttttaaatattattatattaaattatataagatctaatatttatactagtaacataatattaagaatatgttagatattagtagtagcttttaagatttctcttaattttaagtacatttcatgtctaaattttcccaaatgtctaaaattttgtacagatattgaaaagagttaggatatgttgtaaaatgtgattttgtttgtatggtggaaaggtttcttttgtaaaattattattgagagtacacaaaacattaaaatatttaataaatgtggaacacccaccatttattattagcattaataagctgttctttaatcaaatcaatttttttcttctagtgggggactaagcttcataacctacatccgtccgcagaggataacaccctcgaaactgtatcgggctttggaatgctgtaagtgagaatcttcttttcaagtccaactgtcactcccttacccttacccacttagcttaacttaactgatatttaaccttaaaacggccgttaaatcagtacgacccccatttcacagttcacactataacaacgtaacggttcttcgtactccgtcaaaaaaaagccccacgtgaaacgctacacccttagatgaataagagggtaatttcgtaaattgtacttagcaatccttttttactttctttttcttctgtcctagtatgccacgtcatggctcctacttgatgatgatgttaaaaagttattattatccatggcatacatacatgaatgcatggatgtatgtgtgggccatgatacatgtattatatttatagtatagaattttataggagtttgatttgtgacggcatgcttgtgtgtgtgtgttttttttat

SEQ ID NO: 301439 - DNA, 3340 bp, Cannabis indica
tttaattattggtttattcaaattttttgattttctaagcatagaaaatcaaatttcccatcctaaataaaatatgattcctaaaagagtatggaaaacatattaattagaacaacaccaaagaggaaatggaagtcataattggaggtcaaccttctttttcttcctttccttttgagtcagcctactcatgatttggctgatgattgacacttgtcctacatgaaaggtgggatcattaactttaatccacgcccttgatttccggcatacaaatcctggaactgatctctgctcggtgaattaaattccttataccacacacgcatcttattggtccaaccattgttgttcacgtgggtctagccaataaaataatttcacctaataactatgcatcctatattattacgagaaatgcttaacggcgtgccatctctaatattgttagtccaattcaattgagaaagataaatgctaaaaggtattattggtgctagacactctcctacgtgtcaatattgctattggtctaattaagtatcgggtcccatatagtttaatataatagttttagagaatatcgctagccaatcgtaagacaacatgtcttaaaagtaccgaacaccactaatatcctataacaatgctcattgaaaaatatggtacttatttaatataaagtgatacttattttattttaataaatattaaaaataattactaattaattatatgataactttattgtaatattaggtactatgagtatttcatagcaatacttaatttaatattatgtcctatttattttactttaatatactcggagaagagtcatcaaaggtttgtataaataattgaatagtaagtcatttgaaagttttctacaataatataatatatatatttttttaaaaaaataatgtattatattgttattgatataatgaaattaaatttaagttttgataattatatagaatattgctttattattaagtattggtcatcctaatcaaaaaatattaatactaatagtgctcaacactatataaatatattatattactattagtgtaatttaatattagattttacatattttaattatataattcttatagaaaattgataaacactcgtaaagtaaggtaataaagtaaggtagtattagataccactggtgcttaataataatatttattttcataaaaaaatgttaaaaatatattagtattatctatcactacaaagtaacaacttacgaattagtagttttcaataataattattatatatattaaatatgtaaaactcaatacttaaataatactttattagaataatagtaaaacatccataatattttttttttattattattattattattattatatagcctatcttcaaaactttaaaatatattaaatgtttagtctattacagaaaccccaacctaatataaaagaagaatttttttttatatatataataaactaataatgcagtagtttttcagtttgacaggtagttatttttgtatcacaagttaaaactttggctttggtaataactatcaataaattgtgttttttaatgagttggaaagtgctgtttgaggatgttatagttttattgtctaaattttcgtggacaattttgttccatgtagctcgcgataagaattctgcagcacatagtttgataaagtatgctttttggttagatgatgagctatcttagtttgagtaagtgtcgatgccgattgtaaattactgtattattaatcatgtatgattttgatcaccaagttagagagttggctatttatatatacatgtatatggagatttcctatcaaaataattgtaataatatcactactcagttatggatcttgtatactttctatgtataaatatttatcatataatatattatgaaaatatccatttgggtagtgagatttgtaggattgagatgtgggtctggtccaaaggtgttggccattatagcctaaacccgataaaggcgtgccaaggacatccctcggttgggtagtatggcattggcaatgttgttttcacgtgccattgctcccatttgtttggcaaaactataaaaatataaatatatatgtacatataattatatgtatatagatagaatatatgtatttatgtcagtaattaattcatgctgacagttataatcgttttggaaaaagtcatcagaagaaaccaatgagaaattgattaggataccttaatcgaacatgcaatatttctcaaatattatagcttgtttacttgattaagctaggcatacgaaataacacttgaggttcctttagtatgttgtgttgtattgtcaaatattgtgggagtcgtaacttgtattttatatcgaatgatattgagtttgtgcaatattattttatacagtactatatttaatgttgatttatataaatagaatgtgtaaaattatatactttcatcttaaactcaaatccaactcagacctagacctggactcgaataccaatttcgtcctcggacccagactctcacctctgaccttagacccaaaccccgacctctgacctcggactccgaccctagatctcacatcgaacactgacccctgatcgacctcggaccccggaccctagaccccgaaccctggcattgacctctacatcggccccagactcgaacccgaactcggaccctggcccaaacttgaaccccagtcctagacccgaaccccaaacttgactgtaacgccctgaccctcagggacgccacgtgtgtgcttttataaacttattatcactaatctataattttggaaaaagtgtggtttaatttaaacctttaataaaattgaaaataaagacttccattttaaatactatcgtaatatagggatcccctgtttataaaacaaaactcttttacaatagattacatttccaaacataaaaggacttcgatcctgcttcccagaagccaagacccaacggctgatatgtacattgctgggagacctctgactcatggccgaacacagcttctaacttccttacctgcaccacgaagcacccgtgagtcacaatgactcagcaagaaaagctagaatataaaatcatagaaagtgccaacaaatttcattacaatgtaatatatataccaataggtcatacatattcaaggtgcataattaacttaatgtctatgagagcacacttattccataatcaagtatattcatagttatttgtaatcaacaatctctgtgtttcatacaacctcctaaacatttatcatta

SEQ ID NO: 301440 - DNA, 1620 bp, Cannabis indica
attattctactagtattaaactagtttataaaatcacacacgtggcgtccctatagattagggcgttacactcctgctgttggatcttcagtgtttaggaaaactctttagagcactaggtctcctatgaagagtttcctgtccttgacttgtttgtttaagtgccttgctaccttttaaaattgagataacacaagtgaccaagagtcataagtctactcagtcacttggggggcaactatacacccatacaaagcataggtaagtaacaagctcaaaaaacaaaaatatctacatgtgcaatcatttagacttaaaagaaaatattcatttttaaaaaaagataacaaagcatgataactgtgggattaaaagctacctagccagctagttttcttaaaacaaaataaaatatttcccaagtttaaaggtttcttggtcggccatattgacttaaaactaggcccgtaggccgaagtgataaagaaaaagatgaaagtttaaacagctggagtccttagttctttatacagatcagattcatcttcagcagctggggtttcattctcttggtcagtcggagggttggtgctggctgccttggcatcttctttggctttttgggcttcacagaaactaagataagcctccttgttttcattgaggtaatcaaagttagcttctgggttaagccctccaaaatttataaaagacatccaaggcagccatctccaagctttccaccaccttttgaagaacctcccgttcatcaccaaaagatgccctcttagagtcaagggtctcctgcaaactcttcttttcttcaaccagatcattgaccttgatctcgagactggaaagaagaatacaaagactttccctctcgtcctaaagggaattaacatccttttcaaaggcctcattgtctgcctcgagctgagtagtgaatggcatatcactaatctccttcttcaagtctttaacgagcttgttagtaactaggagtttcttatgaactttgcccaattgagtactcttcatctcgacctcctttttagcctccatctcattttttaaggttgcagacttaacacaggagtatgtgtatgctagcttcaaattgaatttcacaatgagataagatcaaatcatgcacggttaaaagcatgtgaagaaaacaaaaggaaatatatttacgtgggtgaattcctttaacaagccacccatgagtagctctacagacatgtcctcccctttggccaactgatcatttacttcgagaagcacacgatcttggtagaatgaaagcatctaattccccttatttatttttggattcagcacgagaggagtggatagaggtttggacagtctgggccccttcagtgctggcgcccttagagcccttggacggagcatccatgcattgagactttgagttcttcatggttggcgggactgagtcagaaaccactacctcgggaacttctaaggcagggtcagtcaaactcctctcagatgtcacctgaggagtcttagtgtttgggacgatgctctttgtgttggaaatattttaccaggatctatatttactaccaagtatgtttgattaacatccta

SEQ ID NO: 301441 - DNA, 2082 bp, Cannabis indica
aatttttaacggcaaaaaaattcagggagcacaatttacaacatgtcaaagttcagggaaaaaaattactaattagccaaataataatacccactattcatttctctatataaacttattttatcaatatattaattatttattttatatgtataaattaatattatatatttaaatattaattttaaaatataatattggtatgatttaataaaaaagtaaagaaattaaaatttgatataatataaaaatttgatgtaaaataaaaaaaaattaattacttttggtagtatattgtaatgtatagagatcgaaaaggttgacataatttattttgattttttgcaggaaaaaaattgacattattactgagtcaaacaaatatatatatatttgatatgaagagtcaaacaatattttatttcaagagttttcacactgatatgattttgattaagtagggtcatcattccatattcatatagtaaagtcttatttacatataatagattttgattgtttcctatgtttgcgtacacaccaaaatccacatgaaaaaggctgacggcttataataatgataaatatatgctattttattattcttaataaagaagaaaaagcctttattttacttatatataacttctttttggctcaacaaattaattaagagacaaagattaattaataaataatcgtagctatgaacgcatgaccccaattttgaattttcttagtttgactacatatatctaaagaagaaagaaaaaactaaaaaataaaataataaaattcataattaattataataatggtgcattttcttagacagtgattctttaaaatagtatttttatgttttcttacaatgaaatagttatattttaatttttatatatatatatagtatagttatttaagatattttataaattttaaagaatatttaaaataatttattatatatacaaaataaaatacaaacaatatatatttcacaaggtatataaaaataaaagaatacaaatacaataaattactttttttaattttatttttgctgttgtaaattattctaattttttaaaaaaattagaagatatttattctaaatgtttacagttacaccaacttattaggaaattagaataataaatgagaaaacatgaaagagtgcaataagtgcaatatgataagtgactatttctttttataatacttgaaaatagatgccatgctaataaattatgcatttaaacataatatttccaataacataacatgcataaatgattggggtgagattgacaaaaaaaaaattattatctaaatatcttctacgctttgatctaatttggaaagacaagttagcttcttttaaaaggatagttacattaactcagctcaactttcatgaatgccaatggagtaatgctcaaacaaggtttcatattcctcctcccttaagggatcaagcttcgattggaggtgtcgagcattggagtgcacttatttctcccaaaatcaaagttaacattgatggagctatctttgaaaatgaaggaaaatatggccttcgctttgtggcaagaacagcagctggtgcggcattggaagcagtccaaatgagctgtcctggaagattttagcctacgatagtggaagttattgacctcaaagaagctttgagttggattaaatgttatgcttggtcaaatgttattgtcgaagtcgattgccttttgcttgttaatgatctcaattgttttaaacatatagcctctcgttatggctatattcttgcgaattgcaaggcgttacttgatgaacttatgtcaatttctttatgttttgttaaacgtttaacaaatcatgtagctcacgctttagagtgtgctttgggttttcatgctgattgtatttacagttgggacattcctcttgctgtggcatctttagttttggatgatttaaattagggctattttcaaaaatatggaaaaaattattaaggttatgataaatatggcataaaaagtaaataccactaaatatgacattatctaaccaatcaaacta

SEQ ID NO: 301442 - DNA, 664 bp, Cannabis indica
aaaaaataaaataaaaaatcaccggggaaatgccgcttaactccttgtcttctcgcaagatcagaataataattccggccttaaccttagccgggaaatgccacctcttagaatcgccggtaccaaaataagtacagctgtatacatagagggagagacgagaagagaagagaattaggagagagaaatagacgaggttgtgaagaaaaccgtgtcttgccaagccaacaaaaccaagaggaagagagagagagaactgtgcttgtttgttttgataggtagagagagaaagagagagtggggtgcgggtgtgggtgtggtgaggtgcaccgcaggatcggtggggcgaaccggggttgggcttagggttaaaggggatgggaagggagagagtggctctggtccaataaatgcaggccagctacacccggtcccactcgaattaaggttctctcagatgcgtcaatcatcattccatacgatcaccgacacgtgttcttaccatatggcctccccttccgtattacggctttggggttggttcgtcctcgccgatttattccattcaacttacgatacgccgacaatttatcgcgaatacgatattttagctaattatttgttatgcatttttcgaggatatttattattatcattaatgata

SEQ ID NO: 301443 - DNA, 7543 bp, Cannabis indica
caaatataacacctcacataacttattaaaattagagtcgtcccaacacacataatggtgatattaataaattgagtataaattaaaagtaataaaataaaggtaaaaaatagaaatacaaaataattttctcgtaatatatctgttgagtgaactttacatagggatatttacataaacacttgaaaagtcaaaaaaaaagtcaaaaaaaaaaattataaaaatacaattgtaactaaaattttaaataattttacagtttactaaatttttatttaacaaaaaatacggattgttaatattttcattgttattttgtattataattttgttgttttgttgttatttgtatgttgttttcatgtaattttcttgttatttttataggacaccgtaaaattataactaaagaaataaaatagtgcccgagtggggtttttctctattgcagttactatttttctggtttcctctccttcttgtgcgccatgcctgaacccatgttcttcaccttcttccctctaactccaccaattctcatcatgcatcatgatgtcttacagatttggaaattttacttctctcaagggtctatttatggtttccatccgagcctatacactctattccttcatttcattttctcatactctgttttaattttctgtatggattctatccttcacgacatgacttcaaaccttgttctttctcaaaaggaaagggaggtctacactctctctgaatctaacattatcgaaccacaacaatccccaaaattcttcttggttgctcgttgcctttccaatgtcgttaacccaaagattttcatcaaaaaaaatgagcaatttctagagcaataagtgtcgatttgaagttgtagtttctgaataacattctgatatgttcttactaacaattggatgtgcatgagacaaattaaagatcatatcgggtgaaccttggcactattttaaccaacttattttgcttcactccccaacaatgttgcagaatgttactaaggaggatctttacaaagtacaactctgggtgcagatacactgcctgccctttttaagcaaatctagaacccttgctatgaaggttggagaatgggttggagagtatatagatgtgtatgaagactcacttcatgaagggtgggggccatttatcagaattagagtttgaattgatgtctctcaaccgcttatgagaggtaaaatggctagccttcctaatgtaagagatgaacattggttggagtttcggtacgagaatcttcctattttttgttcccattgtggacggctgggataccccttcgagaaatgtattggctttttggaattagtggataatggtattgaaccttatctcccctttggtccttttatgattagtgataaactccccagttcgagttacgcttaatacagaagtgatttctctaaggcaaatatttatccttttcttacaagattggcttgaaaaaccattgtctcatcaatccccaatgtaaatatccttccacctcaccttttgccacttactactgctaaaaattattcacaatatctccattgacaaacaaaaagatattataccaaacttaccttcccctattcccttttatttccaaagtttgtcatcttctctgcagctaccagtaatgctaataccagactacctgtccaaaatgtcactcactctatctctggtactcatgttattacaagtgattcaatcattacatctactaaggacaaaagaaaagctattcttagtgaagataacagtcatcattttgagtctttggctatgacttttaagaggcagatcgatcctaataattttcaaagtgtcctaaaaagatgtagaaatatcaaccaaggtagcatgtccaacaatgatttcagccctctgtttctagtacacagacagatgctattgaggagacttcatccttttcagcggaggttgctttgaagcagccccgcacctagccatgaagatcatttgggtaacccttctgcattcagacatctcaagctcctggttaattagcagcgtccacatttactgtttatgatggaatctaaattacaatgtaattatgtcactcgtattcgtttttcccttaagtttagtaatggtcttgaagttcctagattgggcatgaaatgaagattattgtttttatggatagataatgttaatataaatttaaacacctattcaatgaaccattttgatgtttttgtcttgtatgataacaatcaccatttctactttactgcaatctatggtgaacctgaagctcatttaagaattcatacatggaatttgcttaaaacttagcatcatccaccacctctgaaccatgactgatttttggtgactttaatgaaatattatccaatgaagataaagaatgggtcctttgaggagggaaagtctaatggatgactttcgtacaacaattgatcattgtcacttgactgttattccttttacgggtgaaaaatacacttggactaataaaaactacaatgacacactcattaaggaacgattggatagagaatttactaatgggtattggagtgatttctttattgattcccatcttatacacttggatttcttcaatttagatcatagaacaattgaatatgttgtttcggtacctgatcagattcggacagcagtgaaacacaataactggtttcgattcgaataattttaacttaaggatgatgagtgtagagatgttattgtcaagaattggaatgattccacacttaataatccaacatcacagctggtacacagcttaactgcttgttcttctactcttcagacctggcacaacaagaagtatggcaaaatgaagcgagatataaataatgctaaaaaacatacgactcatttacacaacagtaagaatcattctcctcaacacactactgatatgttgaatgctgagaaaatcttggatgatttacttgaaaaagaggaaatgcattggcaacaatgtgcaagagtggattggcttaaaagtggtgatgctaataccaaatttttccatgctaaagcaaaagctagacacaacaccaacaagatcaaaatgctccaaactagtgatggaaatatacttcacactgatgtcgattttgctacagaagcctcaagtttcttttctcaactgtttactacttcagggattgataatgatgctcttaatgtcactttggcttccatcacctcttccattacagcagacatgaatgtgagtctactgaaggatttcactttagctgaagttgaagatgctctccattatattgctccagataaatccccaagtattgacggtatctccgccatgtttttccagcatcattgggatgtagtcaggcctcttgtttctaaatgtgtgctacaaatcttaaatgatggagctaacatctcggctatcaattcagcaattatcactttaatccccaaggtggagagtcccaaacagttgggtgaatatagaccaattagcctatgcactgttatctacaaattggtctcgaaaactattgttagcagatttaaaaaggtgcttccagttgctatttccccacatcaaagtgcgttccttcctggaagattaattactgataatgtgcttcttgctatcgaattggttcattgcttgaagaataaaaagagaggacgtttgggtatgcagctttaaagttggatatgagtaaagcttttgatcgagtggaatgacactttttagaagcggttatgctaaagatgggatttgctactaaatgggttgagcttattatgagatgtatttcatcttcaactctctgcttcaatgttaacggagctattaaaggatcagttatgccccaaagaggacttcgtgaaggtgatccactatcgccttatcttttcttgatttgttaagagggactctcagccttatcacgttcaaacaaaagctatggacatcttaaaagatttgtcaatttcacggggagcccctttagtgtttcaccttttatttgctgacgatagtctccttttttgtcatgctaccgaagcttcttgccaagcaattagtagggccttaacaatatatcatcatgcctctgatcaacttctaaatatgagaaaaattgttatgtccttctctcccaacaccactgatattttaaagtccagatttcaccaagtgttgggtatgcctatttgcgaccttcatgaaaaatatctgggttacctttttatgcaaaaagaagtattcagcaacataaaggaaagaatatggaagcttatgaactcatggcatgctaaacttttctctataggaggacgggaagttcttttgaaagcagctgtccaatccatccctacctacgctatgagctattttagctagccaaaaaaattctgcaaccaattagaatcaatgatggaaaatttttggtggggttcaaacaccaacaaatcgaagattcattggaagaaatggaaatttttatgccaatcaaaagcaaaaggaaggctaggtttctaatcttttattcattttaaccaaccactcctcgcaaagcaagcttggcgcattcttgaggatcccaaatctctattggctagagttctcaaagctcgatacttcaagaatggagatttccttaatgctactaagggtgtcttaccatctcttacttggcaaagtatttgcgatggaaaagagccgttagctaaaggcctttgctagaaaattggctacgaaaataaagtctgatatgctattgatccttggctgcctggtaatataaagagacacatattgcgttagttagcaattgacgctaactactttagtgtgggtgcatattagatgctaagttggtttgcgtcaaataccaactgaaaatgtatgcttataattttttttaataaatttcatctttagcatcaggtttcgttttagtgtcggagttacaaccgacaaaaattaattattatttgcgtcggttaccaactaaaacaaaaaagtaagagttgatttttgcatcaatcaacaatttgaccagatacgttgatcgacgcaaaaagtcttttttgtagtaatgcagccatggatttggttttaacaaccaaatcaaaattaagaagatggcctgtgttaaccttccgcttaccaatgttctttccctgagacgaaaagatcttttgagggcgaccccaaccccgccatggcacacagtcggagactgtagatcagaatcctagcagagcttctctctcaaggttaaaacgacaactttttttattgaaaaaacagatagtatcttacctattgtttctttgatgtgaaccttatataactatattttaaatagtatgccactgttaattcctgttatgtattatatatataaatataaggttgaccaaaaacacgtattcacaacatgcatggtgaagaacatgatatatatatatttatatcctatattttcaaattcaatgcaaaaatattgtctgataagatgatgtgaaatttgaaatccctacaaaattgaattaatttatataatatatatatatatatatataaatatatgtgaggtagtgtattacactcaaacctattttcatcatcaaggctcatcttcaaattggttgataggataatgaaccaacaccacttaatctcaactaaatcaatatctagagaaaaagcagagaatgtcaaaaggaattatacaataaattattatttttaattaattaaattaacaaaagccatcattattgtacaaatggtactatatatacctataatcaatatgattttggttgtcatttcccttaaatttgaggcaaatattcccaaagagtaggatataaaatatatctagttgattttgaaccttgaacaaccagactaaagagaatgttatatatatacaaatacactactatatatttactaattaaatttgtttatatttttgtgttgctgatccatgcactattgttttctaatgtaaacggttaaaattaataaacattattattttaaatatttatttttgcatgttatttttttttttcaatagatattttcaaaattaatgcacaaactttagaattattaggtatttagcaaccaaaatataaattgagcaggtattttaattaactgctatttactttattttccataattttttttttgagaagaagaaggaaatttacttaaagcaacagtacttgcacaaaaaaagaaaaaaaaaaacacacaatcaaatttatttaatatgaggaagctgacttttttttaaaaaaaaaaataaaataaaagttgtaattaattatatgaaaaaatttgttgtgacctctctttagagccgaaagtagaaatcaattggccttgaaagaagggaagaaacaacattcaaaatagaaaagacagtcctgcttgaacaaaatttattggtttcataggatcgagtggaagcaaaagaacaaaacccacttaccaaaaaaaagtataaatattaggagaaagagtagtacacgtaaaaaaacatccacaatctatgtttatatatgtgcattgcatggataaacctcgaagaaaagaatattaatatctctacacaataattaatacctcactaaaatataatatattgtagtgataatattagagtattattattgggtattgttgtctaatatttttagacatgtcattttgcgattgactaacagtattctttaaaaattattatattaaattatatgtaactcaatatttaattaaactaattaatagtgatattgatacataaagaatgctaggcacactgatgccttttagcatttctaatattaaattttgtttgatgtctttaattactttagatgcatacaaaaatttcagttgttttggttaggttagcaaaccgtgttaggggagccaaatggtttggtcaaaataagatgacccctttccatttcattgggattgttatatttatttgtaattattattatatgttatagatatttatatgattttattatgagatcaattattgagcataaagcagcaaacggatccaataatatgtgttgcatgcctgtatataaaaatttgactaattatatttttgtgtgtctcttaatttctcttttctctttttgctgaagtgttcttaattgatgatgctgtaatatattgaatctgccaaaagaatgtgtatacattattgtaagataattaaaattatagaattaaaaaaaaaaaaaccaatcataaagaagtaacaatcattaatattatttctattaattaagaaactaaagtatttttttagtcattgttctttaaattataattatatattatatcactcaatgtattagaacgaacataacctccaattcctattattttagttgataacctttcattataatataaattttttagttgactaaatgtgacttt

SEQ ID NO: 301444 - DNA, 2335 bp, Cannabis indica
aaaaatcaaattttgaaaaaaagtattcatcttgttatgtgaaataaatattgttgcaataatttttccaaaattcacataataatttgatgaatagatttttagatttagaatttaaaatatattttcaaagcaagattgactatagaattaattacataagcttaatttttattcatattttatataagttattttcaatgtgcaatttttgaggatatttttgatatcaccaaaaataaaaaaaaaaaaaaaaaaaatgtgtgtttgtgaaatagaaataggataacgatcaaatgccaaaaggatagtaaccaaattcatgaaagcaccatgccctgacaacaaactgttaacattaactttttactccttcttcaaatcaaattccagaaatactctttctcttctatgtcatcacttaaattttctcctcactgatatgcataacctcaatacaagtgtaagagtagaattttacgaaaatcttttcatgaagaaatctgcaaaatacaaatattttctactacacaaatgctaatgagattatatttaacaacaagaaaactacataatgaaataaagctaaaagaaacaagacaaagggaaaaaaaagacacctggaaagacgctctactaacaccccatgtcgtttgagagcattaaaaactgtgaagcaacatagaagcttagcccctttaaaagtagaaaccagccgcatgtaaattgtgaaaatcaaagcaaaaaaataggagctttctcatttgtctttcttctgctgaaaaatataaaaacttacatctatctcgtgtagtctctaaacggatatcatcatcttgtataaaagtctgtgaaaaagcatggcatacatggatccaagtcaatcattgagtcaagaaaagaccttatatatagagaaaatagtgaagacagtaaagaagaaaagagctatgtttttaaaataattaaccaatcaataatcattgagtactaagtgctatgccaacaacagaatatataattccattatgtaaatcaaaacaattaattattctcagatcacacaattctaacatgtcgatacctatagaagaaaaaaattgaaacccatttatgttaaagaaatatgaagtatgaagcttttatataattcagacactaatccttaaatagattagtagaaacatcaaaacctctaaccagctctctttgagctctttcgttttgttgatacaaaacaataaatgatgatattgattttagtattccttttcctgcatcattaccacttgaagcaaattactaggcaggcatgaggaatcaaaccaagacctcatgggagaaaaccatgggcattatatccatttacaattagtagctattgcccttttgaacacttcatctctcaaaaagctctcagaatggtattatcaaatctaaacagtttgaaataccaacaaactaataaccaatgaaattccaaataaattgaacaaattagcctgtgattacattaatctcgccgaaatggaaaagccactttattaaaggaataagaatcattaccaattctcccattatgtcatagggacgtcggggaaactgctcaagttgccgcaatagttccccccagacatcacactcatgtacataataagtcagattagatgtaatataatagtattgaaaataacaaccactgacgcaaagttgaattaaacaatcaaaatcaacaaaatgtccgatacatattatttgtaatcattctctacctcagaaaaattgcaaaagcacatactgtaactgtagaaacgtagaagagcttctagctagtttattgctattcaaagtatttctcactcaccatcttgtcgtacaaaaatgaatgtgtttgttttttttttacagagattatcggtaatttaagaggtttttcttttcttttttcagaatgaatcgaacttgatgatactaaaacatgttgttttgaactgaaaacacaaaattgttatgtaaaactgaaaaagaatagacaaaggaaaggaatatatataggaagataaaatggtttgagaaaagataccttgcgagaatagtcccctccggaatacgagctctttctaagttttttcttctgcgattcttcaatgtcgctatccatctctctctcactcactctcttctggctttttggcggagaatattgaagaagacgaagaagaaatgggttgggtggttggttggctttacccgaagggttatttgcggtaaaacccctttaagtggacaggtttttacaactaaccccctaatctaaaattttggtagtaaaact

SEQ ID NO: 301445 - DNA, 4263 bp, Cannabis indica
ttaaaacttcaaggagtctcttgtaaacgactcagcttttattaaaaattgagtacatgtgtcctctaaacaagagtatggtctcgagtttctaggtaagagaaatctcactataacaagtttgggggtaaaaagttgtactgaacttacctattacccgtagctctctgaagacttccatagaatttcaatgtaaactcttagatttctatctgaaataatggctttaagagctccatggagatgaactatctcgtgtataaatagctctgcatacaaatcctattgtataggtagtctttactggcagaaaatgtggtgactccataaaatagtgcactatgacacatactaagtcatacattctcatagttcaaggcaacccaattacgaaatccattacaatatcctcatatttccacttgggtagggttaatgattgcagtaaccttgctggcctctgacattcagctttgatttgctgacatgctaaatatttaatcatataatttattacatctttcatcatcccatatctctaataatagggtttcaaatcctgatacctttgatggttttcgagtgcaatgaataaggtatagtgtgagcttcgtcaaggattttcctttttaagctcgctattatctagaatatagacccaagctttgaaaagtaacatttggttattcgagatagaaaagtccttaggccgaccggcaaatacctgatcttgaatttttccttgctcgggatatctaactgtgcccttttgattctttttaacaaatctgattgaagtgtcaaattgtgtaactttcctaccataaattcaatttcgtccttaaccattttcaaagctagctgaggagctatcatcacgatgttgaaaacctacgtgagacctttttcgctcaaagcatccgccactacattgactttcccagaatgatacagaatctcacaattatactctttaaccaatttcaactaccgtctttgcctcatatttaaatctttatgagtgaagaaatatcttagcttcttatgaccagtgtaaatttcgcatttttctccacacagatagcgtcatcatatttttaaaacaaaactccgataacaagttctaaatcatatgatgagtaatgttgttcatacttctttagttgatggaaggcataacctataactttatcagcttgcacgagaatagaatccagaccctgtctgaatgtattataataaacgatgaacttttcttaatccaatgacaaggcaaatgctggtgctggtattttccactgctcaaacttttgaaaactcacctctcacttatcaaactatatagatcattcgttcttttttttaattaattttgttaaggacattgagatgttagagaagccttcgaaaaagcgctggtaataccctactaacttgagaaaacttcacactttagaaactgttcttagcctcagccaacctttaactaatttgatcttcccctgatcaactatgatatcctcttttccaataatgtgccctaaaatagcttacaatccctgagttgatgtaataccatttagaaaagttgctcatggtcttctcttgaattcacaactgatgataaccaaatcacaagtcaatatttaaaaatagagtcttctcttgaggctgcttgaataaaaaaatttattcgtcagcttacttaattcctgatagtcattgcatattcagagggaaccatccttccttttcacaaataaaaccggagctccttaaagcaatacactgggtcggataaactctaaatcgagcatcccctgaaattgtattattattatttttttagctccctaagttctgctggagccattctatactgtgctttcggtacgagttcttccctgggtgccaaatcaattgtaaagtctatctcttgttgtgacatcaatcccaccaattccttggaaactacaccaaggaattcgcttaccactctgactactttagacccaaatgtctcaggtctgctgaagtcaatcacaactgataaatatcttacacatccactatgtagtaagtccttagctcttaaaactggaatatctgggatgctagacccctcaacagatccaacacaaacaattggatctttgcccatcggttaaaaccattttccacttgcagtcaatgctggctgagtacttggaccaagaatccaccccaagtacgatatcaaactttattaattccagctctactaggtcagcactcaactctctgttttccatactaactagcataaacctatatcaccccttagggacaaccaattgccctactaaatagcagggttccaaaccctctcttaataaaagtacaagactaacctaattgattaattactcataatgccataatatagtcctagaatcaagtagtatagtataattgaaattattgacaagaagctgacctgctaccacagaaggactagctgcaacatcagcttgactgatagcaaacgccgttacaagtaccggttttgcctcttgcttttgctcttcttcattctcatgaggacaatcctttttgtagtgagccaccagaccacattgaaagcatgccttatgattacattctcctggacgatgtttcttagagtgaaaacacttaggataagtataacgtcttccaaaaccacctcggccctaggtcccccgaaacctcttgtttcatcttgagcccaccaatgtcgatgtaggtttcttttttttctcaaccaaagatccactaccacctctaccataattggtaataaggggagtggtgacccgaccttccgtcataccctcttaaggttttggaacaaattccttagggttctcaattcaaagggcgcttttcacatctaaatctccttaaagggctagagattcttgcatctaatttcccccatgcaatggtcccacttgcttaccagccatactccgcttcactagtaaaactgaataaaaaataattggcatatgaggtaatggtactaccgaaaacctttgttgtttcaacctctgaatttcctcttcatgtcactgaattatagcttttatctctacgaacctctgctccaaatctagcagagtctgtgactgataatcatcacacccgccaaaatccctccatcggctttcacctcggttacgaggataacttggactccattttctccaaccgttactagcccttaccgcactattgtgaccttcactattgcaccaggtgtccattctatggaacaaacctatcaatttgcaagtcagtctggccaggcaacgacctaaggtgtaatcttactaccacactcatggattttaaggtaatgcatttagacaaataattataaaatattaaactttctaacatgcttttctaatcacataaattacaaaataagtaaaggtttactgaatcgtgagttaatcctttccatgacaatgattgtacatgtcttgaggatcttcagtagacaacctggcggctctgatactaaaattgtaacgccctgatacttaggtgcgctatagtgattttctaattaacgtgccttttttgctaatcaaaggggttttctagaaaaaacatgtcaattttaaactttaagtaaaattagtaaactttataaacatatacatattcataatcgggatcccgtgtgtaacgccctaaatagttaggcacgcttccgctgcgccactatgatatgttcaatggttgtagtaaccctgcaggcctctaatgctcagcctttacttgctgacatgtaattggggttgaatggtgttgaagctcaagttcaagagcttgatgtttgctaagtttaaacatgatttttgggttgtttgtacaatctgattttgagggtttattgttggaatttattccatgagttgtgtattttaactctataatgtttgctagcaactttatttggtaatttgaaagtttgatcaagttttgggttgatttggaacgtttgttgctgaattttcgtgtggaatgctgctggtttctgagttttgaacccaggagttgtggcatggtctgagcatgccgcggcccgcccccttgaatggaacttgggagttggtcctaggtgccgtggcatggcttgggcatgccgcggcccgtcctcaaatttttgggcagattggggttccaactttgaaaatgcatatctttttattccgaactccgatttgggag

SEQ ID NO: 301446 - DNA, 4685 bp, Cannabis indica
gaccagattggctgtaggtgttggttttctgttatgacagttagtttgctgtcattatgtaagtaacacttagttgatagtttgttactatttgcttgattgtgtaactctatataaatgtaacatattaccaacatcaatacacatgagattaatctttctatctcatttctttacaactctttcatctctctctttcattcttgattaatgttacaggttctttatggcagaaaggttcaacagctccagcaagtaagaaatcaagttttgcagcaaaagtctggaaggatttgctgaatacctctgcaagtcatagacacaaatgacgaatgctagcacttttgatcttgccaataacaacacctacagccaatctggtccacgtgtcatttatagccaccacggggaatgcatgtacaacttccttcagtgcagtcattgaactttgaaagcaagttttatgcataactgaattactagggtccatatggtttgtgaacataaagtgaccaacctgcacatgaatccaattgttaaatagagtttgctgtttagaagttctagctcacaattttctgggataatgcaatgagaatatttaatatatacaccaataagaaaaagttagtactcttattggctaagatgtaaaacatgtacatattatgtgaagataatagaaaagaactaaaagaaacgacatcccaggtccatgtggaaatacagagttcataaaatcgtttaccatagattttattgttactataatagaaaatatatagataaatataattgaaaaattagtcacaaatctgactaaaattttaacaaaattttctaatgggttgtaactgaattaacattttagtatagtgataaattgttagtgtagtaacatcacacatggatgttaattgtaaacagtgaaatctcaaacttttataattagcaacattgaatgtgtaagaaaattaaatcattttagctaaaaaaaaaaagaacaatcttggagttgttgtaacatgaatgtgaagaatgtttaatctctgtttcaggtacgtagaaataatatcacggctatagaataataattagcaggctatattaacttatttcatacattaatggtccttcaataggcatgctttaaattatttaagaaaatggaaattaaatataatataattcaatttagtatgataatacctgtacgttcatggctccatgaaaccaacgctgttgttcaaattgtatcatagacgtaacagccatccttctgcacatggacgttgttgacaagaatgtttttggcatgagaaatcttgggccattcattctcttccctcgttctgcaatgctccttaagagtatgacaaacatatatgtatataaattgcaacggaactgttcgaaggaagccaggtagcactcgaagactacagcaatcataaaatgccaaggctcgaagacacggcataagtttcacactgcaaggtacttctgtttcccactcttcccaattttctgcacttatgaagcaaagctcttgaagctttgggtacagagtagtactaaatgacacttgttcatgatctttagcttggtctatcattattcctaagaattcaggaccaatttttgtggagttgaaatttttgaaatggagtgattccaggtatggtagttctcctaaagcagcaggtaatgtccttaaaccatggcaaccgaagaattcaatctctcgcaaaagatgcaacgacatgaaccatcttggacaaaatgtgtggctagtaaaattacctacttttaagatctttaactttggatgaggttcaaagaaatcaattgcaacatcgaattcgtgactttctccagggcatgtgatgatgagttcattgatgtgttccaaagtggttagatcgaccttgttatcctcagctgcatgttctttactaacaagacggatcaaatcaatagtaagttgaccaattttgagcttgcagttcatcttggttaactctctaagagtcaagtacttcgtttcatctttgggaacttgaaaccaacctaaaactcgcaacgaagttagtcttgaaattccttttggaagtctctcgaaagcaccatctctgtaataatagaaatacctcaagttgattagctttcccattccttctggtagctgtagtaatgatctacaagactctaatttcaaagtttgaaggttgcataagttacatactgtgtctggtaacttaatcaaaggattttttgacaactcaagatatctcaaatatattaagtcaccaatgttccctggcaatctcttgagcccacatttggacaaatttaatgtccgaatatgttttagtgttgagaaggtgaagttgttgagagagggatacctacctttctttaaaattagaaaggagtgcagaaatcttttattctcatctgtcaattccaaagcaggaaactcagctttagattccattgctatggtcaaatgtcggatcctttgatcacaaagtctcctcttctgatcatttgaattaacattaaaagtttctacaatctcacattctctttttgtcaaatatttgacaaagtcatgtaatatgtcatgcatcttacaaaccacattaccctcatcaaatacatcttctacctcttgaaaatcttgaaagaaagaacgccttgtcagatttagaaaaacacttgccccttcctcctctgaatttagataaccttctgacatccacaatacaatcagttctcttttatcaatcaaataatctttggtaaatatggagcaatgtaacaaacaacgcttctctaaagaaggtaaatcaagatagcttaataacaacggaccaaagagatcttgttcaacttcacgaacatttaactcccacaatctactacgcaaaacatcttcccattcttgtctgcttctcttgaaatgcataagaccacctaaagtcttggcagccagaggtaaccctttacactttttcacaatttgcacaacaatatctcttaattctttgatttcctcatcctttcttccattaaaagcacgcctttcgaatattaattggcactcatcatgattcaactcttttaagttaatgatcttagaagttgtggttcccatcacacttgctacactctcctttcgtgtcgtaaccaaaattttacttccaacagaagctaacttcttcaaaattatctctaatggttcccactttctgtactcctcgttccatacatcgtctagcacaagaagaaatcgacctttacctaggcgaatagaaatccaattaaacgctgcttctaaggtttgaaatgttggtggcttcttatattgggtacgacacgagccttcgccttcgccttcgcctgcatcttctccttggatttgagtttgataatctttgtgaagattttcaataattgctgaagcaattttgagtaaatcaaaaggctcagagacacttatccaaattcttttgggaaagtgattcttaacagtttcactattgaatgccaattgtgctagagtggtcttgccaagtcctcccatacccacaatagaaatgacctcaagtaatcctcctgggctaatgccatgatctctatcagacattattaacatatctaacaacatcttctcatccttatctctaccatgaatttcaatttcatcaacaaatgaggtagtttctaatcttccagcaacaactagggtattaacattattatcacaataagtgctaattctcatcatgttttctacaaggcctaattgacctatttgactagctgttctagctactttttcatcgagttcttcaatttttagagcaatctcacggtgagaaatcaccttatttaatttggggaaataaaaacaagaagaagggtttaagaaactgaaactgaccaaacttcgcttccggaattgttcctcaatttgagatctgagaatgagtgtgttccatcgatcgagcacgtcacccatctcgtgaaaatcatcttcgagagtctccagccaaaccttgacactttggttactagttgtccatcttttgttctcggcgtcatgaagtacagctcgaattgacctgagatttctcttcaaattttcaaccatttgttgaagatcgttgagcaagctcacttgtttgattatgttttcgagaggaagagaacccaacagctgaacaaccacggaaatcacagcttcggccatagttaagagctgctactgagctaaagtagagaaattgagaaactataaagagaaactataacaattacaaatagaaactacaacatgcaaaattgagtttctataaatgtaaaatttttgtttttaaaaattttgtttttgaaaaataaaaaatgtgttttgtaactacttttatttttcaattttaaaaacataaaacaaaaagaaaacaaaagtgtgttatgtaaaattcattttcattttttgattttatttacgtcggatctaggtccggggtcggatttggattcaagtcagaagtcgggttcagtgccagggccgtgggaggatttgggtccgattttgatcgaagtccaagatattgattaagtaaaaaaaaaactgtttaaaaaaaatattgaaaagtactttttaaaaaaaaaaaaaa

SEQ ID NO: 301447 - DNA, 2512 bp, Cannabis indica
tgcaactaagcttttgtgttctaaaattaaaggcattctttagaactggtatcaagatctcaagggggttcatacaaggaagattcattgaacacaacattataatatgtcaggatctagtaagacactatggaaggaaatcaagcaaggctaattgcatgatcaaacttgatctacagaaggcctatggcattattgaatgggattttgtggaggagatgctacatggtctttaattcccaaattcattcatccaaactgtaatgaattgtctgagaacacccagattttccattatgtttaatggttctgtgcatgggtttttttgaagcaaaaaggggacttaggcagggggacccaatgtctcctttgctttttgttctagagatgtaatacctgtcaagaattctgaaggaagttggtaacaaagggacttccaattccatgagagatgctctgaactaaagattaatcatctcgcttttgcagatgatgttatgctgttttgcaagggggaatttaaaagcatctactacatgttgcagggtttgaagttgttctccttatcatctagtttacaacctaatccccaaaagtcagcaatttactgcagcaacatgcctaatgaggaagtaagtagagttcttacagcctcttgttttactttaaaagaaatgcgtttcacatatttaggagttcctatttgtgctaaaagaatttctcaaaatgaatgtgttgcccttgctgaaaaaatgacatcaaggataagaacatggagttcaagatacctctcttttgcagcaagagtagttctagttaatttgtactcatggccatccatgcctattggtgtcgagtgatgcttttacctaagaaagttgtgagacaagtagagtcaatttttagagcttttctttcgaaaggttaaactatatctaatggacctagactggtagcatgggatactctctgtcaaacaaaaacttcaggaggtatggttttagggggatccaaaagtggaatgaagtagctatggggaagtatatatgggcaattgcacacaagcaagatagcttatggctgagatggattcattgtgtctatctcagggctgtgattggtggagctacaaggcttcagtacaaagtagctgcatctggagaagccttgtaactcttaaagatcaattcaaggacatagcatcaaggcagtaggtttttatgcaggattatcaaatttccaaaggctacaatctgctttgtccaagtcaaaccagagtgcaatggtgtcagcatgtttggggtagctaaataccccaaagcacagttttattacatggttggcaatcaaacaaaggctcaaaactaaagagagattgaggacaatgggaataaaagtagatgaacattgtgggttatgctttttgcagaaagaaactacagcttatggttacaatggcatgtagcagctaacatactacacagtctcaccatgtggattggaagattaaaaattagcaagttcaagaaaaatatattctcagctgctctcacatgtctggtgtactcactctagagagctcgaaatatcggcctttgggaaaacacaaaagcaaacacatggaagttaattaaaggactaaagcgagatgttattcaaaggattagtatttgttggccaaagaaagtaaattcagaagatactagatggtttcaaaacttgtaaaagcgaattgtatgtatgagtatagagttaatagtgtacataaatgtatagatcattctgttggtttttttctaggcccttaggggtgctacttggttgtaaaaatttgattgtgattaatacaaaacttccttgattcatcaaaaaaataataataataaattaacaaatattttattttaaaatttttgtaagtcatctatcttgtaactttaggattcagttttaactccaataatatctgaattttgatacagtcatttatgtgtgatttctagatcgttcaattatctttccaacactattggaatcatctcaattagagttaccaaactctagatatgatcgtttttactaaaatagtttctaatcctacaatttctccaaacttgcgaattttttaaccttaattccaaaataattttatttaatacaattaattaaacccactaaataatttttaaaaccttaatagactttcatattaagctttaattaaattaaagagtttgttgtgtctaaaccctctcaactataaatatacttctagttaactctctaagtgtaaattttggtggtaaaacctttggaaactactgaactgttagcaacctttaaagtatcatatgtttttcgaagttaactgccaacatggatctcttatgtgtacactcttgtacacgtgacacgtttatattgatacacctaatattattatttaaaaggttaattaagattttttcccccgaactttgacatgtaccaaatcatgccccttgaacgtttt

SEQ ID NO: 301448 - DNA, 1623 bp, Cannabis indica
tataatagcaaattttgagctcagaatgttatacatttataaggtagcatatgttgcccaagtgagagattgttggattaaaattttatttgtgggcacatatgtataatgtatatgctattataaagtgtgatgcaaaattaagtgactaattacattatagttatcaaaaggatattaaattatcatgtgtagataccataagttaatttataatttgttgatgggtaattataaatatccaaaactaattctataatcagtatataaataggtaatagtcctcaaaaaacactacggttcttgtattttctccttcttcatcaacgaaaaatacataaagaaatagtgtattattggaagatcataaccttctgtgtaatatcaacaatggcttcatattagtgtttctgctcatcttgttatcatcttattcttcattgatttagtaaaagttctataaaatatgatttagagttttttatattaaaccatttttagaaatatcattagatctatgattatttgtatttcttaagtattttataaatttcaataagtggttttttttaaatcttaacatgtttcacttcgttttgttaaacgatctgcaaatagaactatgcatacacttgcgagagctttgttgttgatcatgcttacagtaggaatacccttcctactactatttcattcttgattttgaatgacttgattgaattaaattgcattatttcttaaaatatgtgaaattcgatattaaattatattagtactaataatacatctcacaagaatgttagacagtataagtgcaatttaatatttctcaattaataatctactctttgtaccataataaaactattaaattcaagtctatctagatatctttatttttcttaaagtcttttattatgtattatcatttgaagtaaaattactaaaagcattacttttagcttatttttacagttgaattttggtaggtaattaaatttcgattataataaatttataaataatttttgccttaaatataagattatttctttgtaagaaaaaaatatatgaagtgactcttcttttttaactttagaatggaaatataagtttctctaatcataaaatgtcatattcgtcaatatcaataaagcgatgcaacaataaaatctcatcattagatatgaatcgtgaagattatattttttaagttaaattcaaaatggtattacatgttatgtttacctacaaaaaaaatgtggaagatgtaatcataaataaataaattagtaatttataagataaaataaattttattttggaatatataattttttaggattacacaccaacttaaatccaacttcttctccacataaaaacagaagtagccaacatttataccaaacctttctgatatctcacttgtgctactactaatgtaagaaataacttaatcttacacagaaggtccaagttttatatatataatatgtgcactacattatcattatccaagactttaaagcatttattccactcactttgttgtccctagtctaacatgattaagataatggatgtatgatcccttttgtaacaccctaactatcttaggcg

SEQ ID NO: 301449 - DNA, 1519 bp, Cannabis indica
tatatatatatatgagtatataagagtgtagttcattaattaattttactgcaatcaagcagagaaacatgactgtcatttttcaaccacgcaataatcagagtttttgaaccctacttgatttggatgttgttattattggtcttctgaatccaattaactgtaatgataaaaagaaaatgtgtttcacttacttatactgtacttgactttttgttctctttttacccaattattattatcattttcatatgcatgtgaatttgtccattgaactcttaccactgtcccgtgattaatcactccatcgatcgttgagcacacacatatatatataattataattacgtgagattactcacaatttattataaaaaacaaactaatatatatttaattaatctcatcgagttcatatatataataacgcacgtacgtcggtacgtgatactcttgtttgtttttggttacccaataaacaggcaaccctgattccggttcagattcaagaatcttgttttgtttaaactataagttttttttttttttttcgtttttggttctcctttctttggaatttatatggtactagtgaaataaactttatggactctaactttatggatatataaaccaaacacttaatgacaattgaaatttgtgaagagctagtttatatgcttactgtatttgaaggtttagatttgttatattgtctagttttatatttttcaagggaaaatatatatatatatatatagatatatatctgttaaatgttgatggaacataagatgggtcacgagaagcaagaaaagaattcttgatgaaaaaagaaaaagaaaaggggaaaagaaaaacacaagttgtgttctaacttcttaatttgtgggcctattattatgatactaaattatatttttttttattattattacactaaagtattgttgttgctgttgtttgttgttaatgattaagaatttcgtctggcatgattaccgggtaaaaaaaatgaaaaataagaaaatagagatagaaatcaagcattttaaggagcgttttgtaaaaatattagtgatgatgaagaagaagtttattagcaaaatatataagcacgtttggttgcacaagcgatcaacaattacattgtacgaccataaaccgattattttgccatcataattgcacaattcaaatagttattctataaattttacacttttatattgttagtttagtaaatttttccattttaagtgtgtggtatataaataatgtataatattttataatttgcatattataaatatattatatatatatgatataataaaaaaatataaaaaagttgatgtatagtgtaataaaattaagttaattaggatttttgtccttaaagtactttaatatatacaaaatcatgttcctaaacttttttggcagttaaaaattccccttgaactattgaaattgttacatttactgatttttgtctaattttattcaattttactat

SEQ ID NO: 301450 - DNA, 1253 bp, Cannabis indica
cccaggttatgctgatgtaatatataaacgcttaaataaaaaaaaacataatacatattaatattatactacaagatttgtttaatgtactattaatgattaacaaccgttcgatcagtctaactattaatctaacagtttcagtgtgaacaagataccttccgaccgaaactcctaagttggaaatgaagaaaggacatggatgaaaatggtgtgaagagggtaaaaaaatgtggattggtgatgagcatgttggccaatatagggtatgtagtagaaaagggcaaaagagaaaactcaattctatttattatgagaaccaccaattcacatgttcatttgttttatttttatttatttatttattttttttttgtggaacaattttttgttatttgtgtatatttatttatttgtgtatattttcactttgatacatggtggatacagtgatgggtgtggcccaatacaatttttttttttttttgtggaacaattttttgttatttattctaatattttgtaggtctttttgtattgtatgaaaataagattatgtatttatttttaatttttaagggctaatgggagccttaacataagcacacattgattataccaacattagttacttcacattgattgattttaagctaatgtgagtttgtgagagggaaattattcttgacaatctaagtcatatggatgaacattaaatcatataaggagaaattttcaaaaatattattttttatgttttatttacaattttacgacctaaagtttttattaataaaaatacttttaaaattttaaaattacaaaaatatattttgttcaacaaaaaaaaaacaattaaaaaacaactagaaatcaatctcatgacaactataaataaactataaaacaaccaaaaaaacataacctcattacaactataatacaactataaataaactatagggatatttgtggcgaaacccccttaaaatttgcaattgttacacatataacgctaataaaaaaaagtggcaacaaaagtacattatcttacgattttattgcagtcgtaatatttttttgctgttaagtgccaattatgcccattaagtgccaactcagaaatacgggacaacatatttctttagcttatttaatacgtggtctaataatatgtctccacgtgtttctgagttgacacttgatgcccaaaaaaaggtacggcggtaacaaaatcgtaagataaagtactt

SEQ ID NO: 301451 - DNA, 2176 bp, Cannabis indica
acacgagggttgggatcttgacccttcttactgcaaatactcttgtgggatgttgaagtttgttttgtcgaattagtacttggtttggtgatcatcgccctgcaattatgttttcaacaaagaaagtaaaggtcacaagtttaataattaccacaactgttgttgtgtattatcattctcatatcttctagctcttgccttggtggtagtagggatgtttgggagacttttccttgtgcatgaatcgttgtggtctcattaaggtttttatatcttgaggcttctctcgtgactgtagcttgaggctcgtcacattgggagaccttcgcttataagcttttctttcatgtcatagtgaaacgattttttcagactttcctctttagtacatggaaagaacttttcgttgagaaatctcttttatgataaatgacacgttcgatgagaaactgtttgctccacaacccttcttggaatcttctacaaagtatgcaattatttgtattttgctaattatttagcccttgtagaacgagattccttacatcgtttatttgtcgagttcaaccctgagctccataaaatggtaatcttgcatgggtgttggttcttcgttaggatcttggtcatgttggaggtttgactttttattggggtcttagacacttgagagtcaaaagtctctctttaggttctcgaacatcttgggtttctctcgtcacttcttgttatatatgtgacacttatagtgaactttggatcccttcaattttcacattacctttttgcataattgttgctaagtcaccctttatttattttatttttttacaagttatttgcctcttttggcacgtatgccttagggtcatttattgtatgtggtacccttagtgggggactcttggcctcatgagctacgttagccactattatggtgttcatgtatcgtgtaaaccaatggctctttctccctgcaaggtaagccaatggtttgtgacttttctattgagcgagtatgggtactttgagtccggtctccctcttacgatttgtttacttttgtaatgagcgagtatgggatttctaggccaagtctctctcttattatctgtgtaatgtaagggagtatgcattctgtgaacctatctcaactttttatgtgcgtctattgagaagcgtccttctcgttttatggtactatttttttaggagcatctttcaagatcctcttgctgctaggtgccttagcttcctatacttcagtttaggcaccttagctacttagacttaagatcgtgtttgggggtaaggagtttctcaaagcatacttgttctttttctcttgttgcaaccaaggccagatgatccttgtttgtttaagatcattttttactcctttaccctttcttgccccctaattgtgtagcggtatttatagcgatggacacgtaaggtgttctttattgcaatgaaacttcaacacagggtttcgaggtcatcgaggttacctatttttcttttctttttttgtgacaacgatgttggagatttatcttttcgtcattaggtccatggaagctcttgtggagggatgtagatgttggtctccacgacttgacttcctgctcccattatatgcttcgcatgacatctcgaatgcctcttatatttggatcgaggaagtaatggtccctttgcaagtgtcatgtccacggtagtggttatctcttctatttttcctctcaccttgaaagtgatatttcattccatccattccactcactcttttggtagccttattcttatatggagactaagtaactttagcgtcgcatgttgagtggaattgtgaaattatacgagtgtgtatatataagaataagccttattcttatatacacataataaagaatgggagtgagagtgtgtgtatatatataatataaagatagggtgagaatatatatatatatgtaagcgtcatacatttcacggggagcgagacgaggcaagcaagcacagggctgcacacgacacaagacgtttgggagtagcacacagaggattgcggcaatactttagagggagtctaaacttgtttaagtcaattgtctttgtaattttgatactttattaattgatttccttctctgggcgtggccccgtggactag

SEQ ID NO: 301452 - DNA, 3663 bp, Cannabis indica
gggcataaaacccaacagcagcatctgcttaattctactcttcctttttcatccgagggcaatctttcttgaaatggtgaccatgccacaatgaaagcatgtcttctgagtacattctccatgatgatgttttttgcatcgtggacacttaggatagaaataaccctgacgtccacctctactttggttcccacagaacctcttgctctgttccaaaccacttgaggttggaacattcttcctcttttgatcaacgttggtattagcaccatccttagtgtaactcgaagtaaaaagggtggtggttccaccaattttttgagtccttcggggcttctaaagtaattcaaatgcaccctcagtttagagagccttttgaaccatctcaacgtaactagttctatcatttgttgtaatcaccaaatcctgcctaatcttggcaatcctaccaagtatgtttctttgttactgaagtctgtcggaacgattcctgaagccaacatagcaagtcgatcaaacatcattgtatattcagttaccaacatggtctctcactaaataagtttaataaactctttccacttagcattgcgaactgcctcgttataatatttggcattcaatatatcttgaaactttttctatctcattttggtgacgtctcgagtgagggataccaactcgtaccacacaagagcatcctcctggaactgaaaggtagtgcaagtcacccgatcattcccagtgacacctacaaagtttaggatcctctcagttactgtaagccactattcgactttcataatgtctgtactttcgagaaaaactggaggctcctgtttgcgaaacctctcatacaaaggttccagacggttgccaacaataggctgttttgctgacactgcaggaactaaagcgaccgacatttgtgatagaggcactatagggagaccctacactcttagcctctgaatttcttcatctagttggtggatttgggcttgtatttctacaaactttgctcccaatcttgaggagcttgtaatggattttcatgtccatatccttgaaacctttcattgcctctatcgagtccacaaagatttagaggatttcaacctccgcgactgtgccaagtctcgaccatgttaccatgacttctcgtgttttgctagacgttcatattataggacttagcctgtgaacccatagcttaggtaggttagacagagatcatataggttctaattattgcacttaaggattttaaggcaatgcatttaaataaataatcataaaattattatgcttcctaatcacataacttaataaacaagtaaagccttactgaacagcgagttgagcttatttctgatgataattgtagatgtcttcacggtcttcggtagacaacatggcggctctaataccaaaattataacaccttaatgattagccatgctatagtgatttttaaattgcagtgtactcctttgcttatcaaagggtttttatcaaaaaattttgtaaatttaaacttttgaaaaccttatactttttataatcataactgtatatacttttacaaaaggatcgggatcatattttttaaaaaatatttatacagccaaaataaacttagtaaacatgttgcacaacgactataaaatgaagcccaagtcatcccaagaccaaactcttcaagttgttccattcaaacatgtacagtcatcccctaactctagactcattaatatttagccttagcttttctcttacctacacatacaagaaataatagtgagttgacaaactcagtaagtaaagcataaaaaatacaatgtattaccgacttgtatatagatactcatacacctatcaacaaggcttaacaaatgattaagaatgttcttaaaaaaggtacgacccttgtaccacatgcactacgtactactactatacaagtatttgtaggatttgaacctaattgtcctagtgttggtaacactggattgtactcttaaacatcatgtgatgtaccacatgcactcagtcgcactgccatgctagtgtttgtagcatatgaatcatataacaacatccatataacatacatgatgaatggaggccatatgtcacaatcacgtaacacttgtaaacaacattttaaaacctttccaggaatctaaactcaaagctaagagtttccctatcaccaaaaagcatggctaagtcctaaatatcgaggaaacacaagaaaataacattatcagggaaactgcctaaaaagcataaggccatttttttgggtctgcaccagtaaaatttgtaagtattattatactaatcttaccttgattctaaatttaggtcatccggtgaacctgactagaaactactacttcacgatttataggcccttaagtcacaaattcataaaacttatgagcaataggctacatcacttttaggggacttaaaatcaaaactagaagtctccttaccgattgatagcatggcagtaccctaaatattgctaaaacacaaaaaacaagggttcagaaattcgagaactagtaaactagatttcaaaaatggaaaacaagttcttagggttctgtctgggaagtggttaatcatttctacatgtatgcgagaatcggttaaatggttcattgcaggaaaccctaaaaacttcaccagcatctcaaattgacgccaaataaaaccaactctccaaaccatataattatgccattacaaacatacttcaagcattaaaaatagatataagcctctcaaacaagattcaccattaaagagtaaagtttcagctctaaacctcaaactttgtctaagctcaacaataaacatcaaatccagcttaaagtagttcaaataactcattactaacatcaaaaaatagaattaaacctaaacaattcgtacaataaccctaactcaaaattatgcttggaaacctaatctcaaaacttgaaattcaaaggaataacaaagaagaagcttaccttgagctttaatctaccaaattctaagaatttccaagctaataatcccttgtaatttgctaagaaacttgaatcactttttcttttggtgtggccgaacctaggagagagaagagcttgggagttttttctaatattttgtttttaaactaaaggataatgtcgaataaagacttatatttattcatcttattcttttctaaagattattttaaaattaaattaagttctactcataaagtcaataatataaacctagggtaaaatgaccttcttacactttattaactaaaaagtaaacactacaccgaggggtaaaatggtcctaatccataagacatgttcgacatttcaaatgtctaactatgttgccctacaacttctaaggtactaactcatatctacgttattatacatgccatacattgcattttactgttatcgggcataaaaatataaaacatatgaaatttcacatacatcataattattacacctagaattccaatatgtaagtaataattaaaagtctaattctaaaattaaatcataattatcttataattctaatattaaagtgaagcgatcaatagaattatctccctgatacaaggattgttggaaattattttac

SEQ ID NO: 301453 - DNA, 1364 bp, Cannabis indica
atccgaaataggtaaagctccaaacccgttcaaccctgttgaaacggttaaaacctttcgagtttcagggaaagaatcctgagtttagaatcaaatctctttcttcgaaaattgaaaatccattccaatatattcttcgtatttccatggatgcgaggaggcgactctgaaagaagctgtacgactccaaaactatgattttcagccatactattcacacaatagatatgagcagtgcatacaaaatctgatggaaaaaaaaaaagggacactaaaacaaaacaaacaaataaagtcgaaaggctaaaaagaatgatgtgtaccgtgaattaaaagaaaatgtacaagagaaaaattagaaagataaattctagtattaaataagcaagatgatgatgatgtatatctttgtcaaagtaaatttttcttatattttactactcaaattactttcgtgaagtaaatttaaattttatttcacaattttcgtcaaaataaaattgtaactcaagtgattttttcatttatttaagtgagataaaaaataaactttcattcaaaataaagtactcacttatccaaagaatacaagattataaacaatatgaactacatttaatttgatttctttcgaaaaaattaagtacaattacaaactaacaaaaatttttaaggagattatttaccttgaaaataccaaataaaatcattcatctcaacaacaaaaatctcatgtgagatcttgtcaaagtgatcaattaatttttttcttcaagatactattgaactatgtctaacttaatctctacaaaatgatccgtagataatttaattactaagattaagtacaattgtaaaatacaacgacaccatataaaaaaataaatctcaaaattcataaaacctcattaacctataaattttttaaaattttcaaatgacaaaatttgtgaaaatggacatataatggaatttttctattcaaatcctaaaatatttcttgattcttcacaaaaatgatatatagacaaatttactaaatttctgcagttttatactcacccaaattttttccgagttcaactaattaaattaattaatattgtcataattagaattagaaagtattttttttttaaataaaaagattgtaattaaaagatttttatatatatatatttttaaaaaatttacgattctaattgccgtgtaaaattatgtaaatatatatatatatatactaggcgacaactacctgcaaggcacgttgtatcttatttttagttttttttttaaattttttatccatataaaaaatttttagttttttgttatatatatatggcatttttaggtttgccact

SEQ ID NO: 301454 - DNA, 8212 bp, Cannabis indica
aaaaaaaaaaaaaaaaggaaacacacactcacaccacagtcgcctcctcaaattgaagaaagaaaaaacatttctttgctctcgcagactcgcagtgctgctctctttatctcgttctctggctctctggtctcctaagccagaaggctgccacagtgcaaggacagggtcgacgacgaacactcgctcgctcaccctctctttctcttgctttgttccaatcgcttcatccatttcaggtgtcaattctatacatgttttcattacaaattatagtatagggttgtactcactagtactcaacttaaaatcatttgattatctatttctttccaaattagttattaattcacaattccatggcggttggaaagaaaagttatatgacattttgctttaaattgttaatttttatataattaattgtatttttacaccacctttggtgatataatattttttatgttcatgaaaagcaggagtatatctagaatctattatagtctgaaaccaaatgttctaccttagccgaattgagcacacattgcgtgtgccacctgacattttgaggcttcctttagctgaagccattaaggttgagcttgagaagctttttttagacaaggtttgtagtattatcttcatgatttaaggaacaccctttgtttctatttcattctttttttttcccttacattagttcagcttgaatttataatttctaaaagaacctatgggttgttttatttaatgaaggttgtttcgaacttggggctttgtatttctgtctatgatattagatccattgaaggtggttttatctttccctctgaaggtgctgcaacttacacggtatgcttcaacagttacatctcttcaaaattgtatttaaatcttgaacttgtaggttgcttactcgcttggtaaagtggcttgctagcacatatgcccaatttcttttattttcactgaaaacattactttatgttgaactgatgactgtttttaattttgtaagagaactgatgactggttttattccagttatgtaggacactgttttgttacaattcaattcaatcaccatgttttcgtaatctggcaggtggtgttcaccgtaatcatgtttcgtccgtttgttggagaaattattggtgcaaaactaaaggaatcagatgctaatggtttacgctgtatgtcttgtagctgcttctagttgttgtagtgttgtgtgtgataattcatttatattgtcttctctgtgtgctgttgtgggatttataattgtgtaactggcagttaattgtgaaattggcagtgtcacttggattttttgatgacatatatgtacctgtcaatttattgcctcagccatcacgccctgagcctgatccaagaaagaggtattagtccatggattgtctgttctaatagaaaaatgtgtaaaactatcatccttgttaaattttgtatttttaagattgcttcctttaccaagtaattggatccaaatgttaatgattcaattcacctcttgaggattgcagaggcagagtgacatggatatgggactataatggagaagatttcattattgattggcaggatgaggttcatattcttgtactttggttttttttcaggtatggcaactgtgccaagagtctaaaagtgttgtttttctttttctttttctttcgtgcggcagataaggttccaagttcggagtgtaaattatcctccagttccaattgaacagctgaatgagtcaaagccatttgcccctatggtgatcacagtaagttcatccatgaaccgccatttgatttggtatcactttgagtacatgatatcttgtcattttcaaaggctcaagataataacacagattaggcaacagtgttctttctttaagtttatcttttccccccattttgtggaaaatcaggaacagtattatgatgatttacatgggttgtcacaaaatctgtgttttagtcatttgaaacatctccagtgcagtgctaaattgtggcaatgagagatagcattgtcaaatatttatgttaaaggtatactaagaattgtgctaaatttgtgatattagctgtacttaatttgacacaaagtatacataaagtaaagtattaaagttgaccaattaatgtttgtcaaattaagtacagctaacatcccaaatttggcacaatttagtatacttttaacaataaagtattaatgtgctgtttatattatattgagaaatcaattctaatcttattgaatattattgatgtttatatattttacttttaaatagaattacatgtactgacaaaaaaaaaaaaactagaattacttgtaggattaggatatgcactaaagcatcatgctaagcattgcttaggatagatcatttagtccatttttgttgatattgacacacattaagcatgatgttatgttgaattctgtacatgaaagattcaaaacagcttaaccattttgaagagtctaatattttgtttcttgattgatttggtgttgcagggatcactggattttgatggttcaggccccatttcatggtggactgatgcagaacaagttgagtaggaaaaaagaaaaaaaaaaggctttagaaaagtaggaaatttttgtaccagttttgcctgtagctttttctgacttctgtcctagaaatcaaagatagaatagaaacatctgaagttcaaagctaaaaaaagaagatgacatactgtcgtttgctgcaaaaagtgattgtttatactgagattattagaacaacccaagtggcaacttgtgattgtttcaacttcaagttctcaatccaaattgtaaattgacagtatttttcatctttatttgttttttggtaagttagttttatcaattttaaatacatgcaggatatattcctttagctttccttttgtctttaaaactaatcaaattgttcttgtcatcaaaataaataaatgggaaggagaatcaaattttgtttttgagttatggtttggaattgattttaattttaaaatacccttaaaaaaaggataagtgcatgaaatgtaatatgaaaagggtggccgtggctctagaataatccttcaatcaagtttaagtaaatctcaaccgtgtatcacaaatgggacccgctataaatggacggtcaggatataatctctctccacagcataaggtatatctttctcatttcagttagtagactagtagtagagctcagaagaaaccctcttccccagaaatggcgtcttctttcactacgccaaagctcaccacatccacaactctcctcttctctaagaacctctcattttctctctctagcccctttctgtctcttccagtaaatttaacttcactcgctcgcgcccgctctcgctcaatctttctcaatgatcaccatcaccaccggcagcggcgtggtttcattacagcttctgccgagtccgaaaacggcgctgaaatcggccgcaagtacgattttgatctcttcaccatcggcgccggcagcgggggagtccgtgcttcccgctttgccgccaatttcggtgcctccgtcgctgtctgcgagcttccattcgcaactatctcatccgacaccactggcggcgttggcggcacgtaagtttttagaaacttgaccatgttcagtgcatgtgtctgttttgttttctgccttcaatcattctgcattgaaacattattgccgtctcaaatatttcgtttttctggtatcggatattgggacggaaatgagtgtttgtggatgtgttatatacacctatacatacataatgtgtacatttatttatgtatcacatgattaattggaaatgagtatctgttttcgcttactgtgttataaaagggattgagtcttaactatgatgtcacaatggaaatgaatttggggcaatcttttatgttgggttaacgagcaacgagtgagtttcatgaatttcacgtttgtgctatctgttgttgtgattaatagtaaccttttcaggtgtgtgcttcgtggatgtgtgcccaagaaactactggtgtatgcttcaaaatattctcacgaatttgaagaaagtcatggttttggttggtcatatgacaatgagccaaagcatgactggagcaccttgatggcaaacaagaatgctgaattgcaccgtctcactggcatttacaagaatgtcttgaagaattctggtgtcactttgattgaaggccgtggaaaggtgggacaaagccatcctctttgggtgtttaatgactagttatctgtttattcctttcttgttatggctttgcagagttggattttcaatattttcctttttcataaacataattttgtttcaacgacacagatagtggatcctcacacagttgatgtagatgggaaaatatattcggccaaaaatatactaatttcagttggagggcgacccttcattcctgaaattcctggcagcgagtatgcaattgattcagatgctgcccttgatttgccatctaagcctgagaagatagcaatcgttggtggtggatacattgccttggagtttgctggcatcttcaatggtttgaatagtgaggttcatgtatttatacgtcagaagaaagttctgagaggatttgatgaagaggtgggtgatccattcttaatatgatcttttttattatatcataaagatgaagatgggaattttctgggctttttttttcgattgtgaaatttgttattatgattttgtaggtcagagattttcttggagaacaaatgtctgttagaggaattgagttccacacggaggagtctccccaagcaatcactaaatccgctgatggtacattgtctttaaaaaccagcaaaggaacaattgaaggtttctcacatgttatgtttgcaactggacgcaggcctaatactaaggtatgtattttatttaatttacttgaagtgcctggaggcatctccagattcatgaaattgttgttcgtcaaggcttgtgtgcaagtagtatatctaaagatactagttcctgaagtatttaaatctgtccttaactgcttatctgttatgggatgcaagaaaatttaacatattgcattgcagaatttaggactggaggctgttggggtcaatatgaacaaaaatggagcaatagaggtatttttcttaatatagtcaagttttataacctctctttgtttatcatgttggataaaccttttttatttttattttttgtaagtaaaattaactagtgtttaagcaaaagggatagttattcataaatattttgatcgtagggtgcttctagaacgcactctaaaaaaaataggtgtattaatacatcatcttcatgttttatccagatagttctaatcttattttatatgagagtgtgcattataattatttaaaacatcttgtacatttttgagcacttcaaaataattattagtacaaaaaatagaatttaaacaatctattttacacacataaaataaatcaagtacgtgtgcaatggacaatttaaactttttttttgacactataactttttttttgaatttcttaaaaaattataagatttcttaaaaatctacaatgtacatcttcatattaaaaattggaattatagttatccggataccaaaaacatgaaggagtcaatcgatacttccatttttgggagtgcattctagaatttatcatgtatcttaaatgcttttctccttcacttgtttctttaggttgatgaatactctcgaacttcagtcccttccatttgggcagttggagatgttacagaccgtctaaatctcactccagttgctttgatggcgggaggtgccttggcaaaaacactattcctgaatgaactaacaaaacctgattacaggtattctttttttgtgacatatcattttataatttttttgatgccttaaagatatgttgcaagtggactatgtctctgaagagttttctcattcatataaaattttgtattattatttattattattattatcagctgatttttcaccattgtttgttctaattttaatacatattctaaattttgatatgtgtacatttggaacttcaaatctgattatcattattttgaatagagctgttccttctgctgtgttttcgcaaccaccgactggacaagttggtcttactgaagaacaggtaagacaattatttgacgcactaattcttgaattgacctttgattttaaattgctagtacttgtgcaggctgtagagcagtatggcgatgttgacattttcacagcaaacttccgacccttaaaggctactatatcagggctccctgaccgagtcttcatgaaacttgtggtctgtgctaagacaaacaaagttctgggattgcatatgtgcggagaagattcacctgaaattgtgcaggttaataatgttttattctctttagatctcattctgccttttcagtttgaaatattacgaattatgtacttatggttgtgaagtatttggaaattccagggatttgcaattgctatcaaagctggcttgaccaaagctgattttgatgccacagttggtgttcacccaacagcttcagaagagtttgtcacaatgaggactcctgcacggaagattcggaaaagtcctccatctgaggttcatttttgacaaatcttattctcttcttttttatatttttgcatcaccaactttgttatctttaacaaaaaaatattagattattgttacatgtaagtgtgcttcaccataatttaggatgcgagatttaagatgtccaaatccatgcctaattttataacttgaatacttataatttgagtttggatttgtcattttatatctatacacgtatatataatttaaattaaatctgtacagggaaagacggattctgaggctaaagctgcagctggggtatagatgatgctcttgcttttaaccaatctagtgactgctcgataaaggtgtgaaaattgttatggtgacttttgaaaacttcttttcttcgttaggctgcccttttgtttggctgacattgacaaagtgcatgtaatgcgtgcttaaggatattaacacaaaataattgcccttcacaataatgcatcttagttctagtcaactattcgtacccctgtaattgaggctaaattttaataatcttaacataaaatgctttgtttcccttactgagaaattgacatactagtgaatagtacattttgccatagtaagttatgcttcttttccaattcactaattaaagtaacaaaacatgaacaggtctccatctatcgaaatcactgataaagttccaaatggtcacccagaatgtaatatgtcaggcaatgcaccatgtttgattagaattctcacaaatgctttaaagagaatgctggtttggcttcggggcaatgagtggatacgggaatggaattcttgaggatcaaagattgttctataccattggcatgatacatatattgtttttgcttatatttcctactttctgtcatttgcagtgaggatgagatatggattgcaatcaataatcagcatttccattccacccttcaataataattgttgttgtggttgttttcaaagtcgaattatccgttttgtacaatatattacagatgttgagagcaaaccaaaccaagccaaattgagtgtacaaaggtagagattcttcactacttagtattgtattttggaatgggagttttttgttcatttttgttaattgttctgcatgaaacatttgtagcgtggaaattacgaaaaactacaggttggaactactgttttatttatttatttagatttgaacaacaatatctttattttgtagagatgaacttcaaatggacgatgggagttgataatagtatatattctttatcaaaaaataaacataaaaattatgcaaagtattggatcaacagtcttgttttttttgcttaaatattggatcagcaaactaaggggtttatataatccgcaatttgtgatttcaaacggatttagacgtttaaaattttttggttattttattgatatttgagaataattttaagtagaatattgatgttgattaattataaaaaaaaatattta

SEQ ID NO: 301455 - DNA, 2013 bp, Cannabis indica
aatattcttttatttttaagtacattctgttaaaccaagaatgttaaaccaagaaataccgttagataggcattttaatatataaagatattattagcttagattccatattttacaacattattattaatattattaatttattattattattttgaagaaattattattattaacttaatcctttttataaaaaattcaaaaaataatgataccccgacagccatatatgatgtagcatttcgaggttacttaattatttatttatttaataataagatgtgggaattttgtgtaacaaggccaaaaggggttgtgtttttatatatttatttatttattattattaaaaagaaatgaatatataattggccaattttcatatattttctttttctttttctttttttaaaaaataattgattaaataaccatgagagggaaattgtttttatgtatttttccttggtgaagatgaagccaaactttatgctataatattaaattttgttgccataagactttaattaattcaattagtttattcacttagttaagatatatatagatctagatgcaatgaaagtacccctaaattatggtttattcaataacattttactattaacaatattcacctttattttatatatataatatttttttctaaacaagattgtgatactttttcattcaaaaaagatttggatacttgatcctagatactaatatgactaatagtaaataattttgttttagatattcgggctgaaaagttacaaattatatgttttttttttcttgatattaatgttttattgtctaatttattttagaatatctctgtgtatctttaagatagacaataatagaaaaaaaaattgtctatacattctgcagttctgttgctaccgcgacttttacgcaatcgatcaaactatatagattttccttcaacacaacataagttatcgaaaggatcagagacccaccaaagtacgaaagtcaagatcttttaaaaaaatagatttttatttccactgaaagagtacataattgcatgaataaactcacaccagcccatcaatttgggattcgattcgggttagatggaaagaaaaaaaaacctcacttttagcgtaacaaatttttttactccattgttaaaagttacttccaacttctctagatttgagaccctttggacctttgctacattaactttggttagtgaatttgtacttttgataatgtagtattttagaattaatgtggtttaatatactaaaaattgaatttgtaaatggaaaacatgtcattacatttattaataattccaaaattgtattctttattttatttttgagagaaagctccttgggaagtaaaaccttgttttttgaaaaacaataataataataataattaataaaatgagaaaataataattgttatcaaaaaaaaaaaatagagaaaataataataagagaaatgaatatataatcaaagacccatcagcgttttattctcccatacaacacagttcagatcacatgcaacaacaaactctttaaatatatttcatatatacactaatttataatttaatttttgattgcagataaatatttaaatttaatttttaataataataatatttaaattaatcgtttttaggtcaatttatatgatcaatacacatatcttttaactaaaattttgagtcgattccaagaaaaaagaatattagggtattgtcctcacttgtttatttttcattttgtacttttattttaatttaaaaacttataaggggcaaaatttaaatggcgtaacacttttttaatcagtattcttttttaaaaaacatgttctataaaactgttttcaattttcaatttttttaattgagaatcaaaactttgaaaacaaaaaaagtcattttcaatatttttttaagtagttttttttcacaattaatattttgaattccgaccagacccggacccaaat
